United States Patent Application Publication US 2009/0081658 A1 - sequence listing, part 2

SEQ ID NO: 1581 - DNA, 6142 bp, Homo sapiens
cggcgaacagacgttctttctcctccatgcagttacacaaaaggagggctacggaaactaaaagtttcggggcctctggctcggtgcgtggagaaaagagaaaacctggagacgggatatgaagatcaatgatgcagactgatggttttgatgaagctgggcatttataactagattcattaaggaatacaaagaaaatacttaaagggatcaataatggtgtcttctggttgcagaatgcgaagtctgtggtttatcattgtaatcagcttcttaccaaatacagaaggtttcagcagagcagctttaccatttgggctggtgaggcgagaattatcctgtgaaggttattctatagatctgcgatgcccgggcagtgatgtcatcatgattgagagcgctaactatggtcggacggatgacaagatttgtgatgctgacccatttcagatggagaatacagactgctacctccccgatgccttcaaaattatgactcaaaggtgcaacaatcgaacacagtgtatagtagttactgggtcagatgtgtttcctgatccatgtcctggaacatacaaataccttgaagtccaatatgaatgtgtcccttacatttttgtgtgtcctgggaccttgaaagcaattgtggactcaccatgtatatatgaagctgaacaaaaggcgggtgcttggtgcaaggaccctcttcaggctgcagataaaatttatttcatgccctggactccctatcgtaccgatactttaatagaatatgcttctttagaagatttccaaaatagtcgccaaacaacaacatataaacttccaaatcgagtagatggtactggatttgtggtgtatgatggtgctgtcttctttaacaaagaaagaacgaggaatattgtgaaatttgacttgaggactagaattaagagtggcgaggccataattaactatgccaactaccatgatacctcaccatacagatggggaggaaagactgatatcgacctagcagttgatgaaaatggtttatgggtcatttacgccactgaacagaacaatggaatgatagttattagccagctgaatccatacactcttcgatttgaagcaacgtgggagactgtatacgacaaacgtgccgcatcaaatgcttttatgatatgcggagtcctctatgtggttaggtcagtttatcaagacaatgaaagtgaaacaggcaagaactcaattgattacatttataatacccgattaaaccgaggagaatatgtagatgttcccttccccaaccagtatcagtatattgctgcagtggattacaatccaagagataaccaactttacgtgtggaacaataacttcattttacgatattctctggagtttggtccacctgatcctgcccaagtgcctaccacagctgtgacaataacttcttcagctgagctgttcaaaaccataatatcaaccacaagcactacttcacagaaaggccccatgagcacaactgtagctggatcacaggaaggaagcaaagggacaaaaccacctccagcagtttctacaaccaaaattccacctataacaaatatttttcccctgccagagagattctgtgaagcattagactccaaggggataaagtggcctcagacacaaaggggaatgatggttgaacgaccatgccctaagggaacaagaggaactgcctcatatctctgcatgatttccactggaacatggaaccctaagggccccgatcttagcaactgtacctcacactgggtgaatcagctggctcagaagatcagaagcggagaaaatgctgctagtcttgccaatgaactggctaaacataccaaagggccagtgtttgctggggatgtaagttcttcagtgagattgatggagcagttggtggacatccttgatgcacagctgcaggaactgaaacctagtgaaaaagattcagctggacggagttataacaaggcaattgttgacacagtggacaaccttctgagacccgaagctttggaatcatggaaacatatgaattcttctgaacaagcacatactgcaacaatgttactcgatacattggaagaaggagcttttgtcctagctgacaatcttttagaaccaacaagggtctcaatgcccacagaaaatattgtcctggaagttgccgtactcagtacagaaggacagatccaagactttaaatttcctctgggcatcaaaggagcaggcagctcaatccaactgtccgcaaataccgtcaaacagaacagcaggaatgggcttgcaaagttggtgttcatcatttaccggagcctgggacagttccttagtacagaaaatgcaaccattaaactgggtgctgattttattggtcgtaatagcaccattgcagtgaactctcacgtcatttcagtttcaatcaataaagagtccagccgagtatacctgactgatcctgtgctttttaccctgccacacattgatcctgacaattatttcaatgcaaactgctccttctggaactactcagagagaactatgatgggatattggtctacccagggctgcaagctggttgacactaataaaactcgaacaacgtgtgcatgcagccacctaaccaattttgcaattctcatggcccacagggaaattgcatataaagatggcgttcatgaattacttcttacagtcatcacctgggtgggaattgtcatttcccttgtttgcctggctatctgcatcttcaccttctgctttttccgtggcctacagagtgaccgaaatactattcacaagaacctttgtatcaaccttttcattgctgaatttattttcctaataggcattgataagacaaaatatgcgattgcatgcccaatatttgcaggacttctacactttttctttttggcagcttttgcttggatgtgcctagaaggtgtgcagctctacctaatgttagttgaagtttttgaaagtgaatattcaaggaaaaaatattactatgttgctggttacttgtttcctgccacagtggttggagtttcagctgctattgactataagagctatggaacagaaaaagcttgctggcttcatgttgataactactttatatggagcttcattggacctgttaccttcattattctgctaaatattatcttcttggtgatcacattgtgcaaaatggtgaagcattcaaacactttgaaaccagattctagcaggttggaaaacattaagtcttgggtgcttggcgctttcgctcttctgtgtcttcttggcctcacctggtcctttgggttgctttttattaatgaggagactattgtgatggcatatctcttcactatatttaatgctttccagggagtgttcattttcatctttcactgtgctctccaaaagaaagtacgaaaagaatatggcaagtgcttcagacactcatactgctgtggaggcctcccaactgagagtccccacagttcagtgaaggcatcaaccaccagaaccagtgctcgctattcctctggcacacagagtcgtataagaagaatgtggaatgatactgtgagaaaacaatcagaatcttcttttatctcaggtgacatcaatagcacttcaacacttaatcaaggtggcataaatcttaatatattattacaggactgacatcacatggtctgagagcccatcttcaagatttatatcatttagagctactcttaggccagatagcctgagcagacagacatgatgacattcactgaacaatgccagggatacaagtgccatggatactctaccgctaaatggtaattttaacaacagctactcgctgcacaagggtgactataatgacagcgtgcaagttgtggactgtggactaagtctgaatgatactgcttttgagaaaatgatcatttcagaattagtgcacaacaacttacggggcagcagcaagactcacaacctcgagctcacgctaccagtcaaacctgtgattggaggtagcagcagtgaagatgatgctattgtggcagatgcttcatctttaatgcacagcgacaacccagggctggagctccatcacaaagaactcgaggcaccacttattcctcagcggactcactcccttctgtaccaaccccagaagaaagtgaagtccgagggaactgacagctatgtctcccaactgacagcagaggctgaagatcacctacagtcccccaacagagactctctttatacaagcatgcccaatcttagagactctccctatccggagagcagccctgacatggaagaagacctctctccctccaggaggagtgagaatgaggacatttactataaaagcatgccaaatcttggagctggccatcagcttcagatgtgctaccagatcagcaggggcaatagtgatggttatataatccccattaacaaagaagggtgtattccagaaggagatgttagagaaggacaaatgcagctggttacaagtctttaatcatacagctaaggaattccaagggccacatgcgagtattaataaataaagacaccattggcctgacgcagctccctcaaactctgcttgaagagatgactcttgacctgtggttctctggtgtaaaaaagatgactgaaccttgcagttctgtgaatttttataaaacatacaaaaactttgtatatacacagagtatactaaagtgaattatttgttacaaagaaaagagatgccagccaggtattttaagattctgctgctgtttagagaaattgtgaaacaagcaaaacaaaactttccagccattttactgcagcagtctgtgaactaaatttgtaaatatggctgcaccatttttgtaggcctgcattgtattatatacaagacgtaggctttaaaatcctgtgggacaaatttactgtaccttactattcctgacaagacttggaaaagcaggagagatattctgcatcagtttgcagttcactgcaaatcttttacattaaggcaaagattgaaaacatgcttaaccactagcaatcaagccacaggccttatttcatatgtttcctcaactgtacaatgaactattctcatgaaaaatggctaaagaaattatattttgttctattgctagggtaaaataaatacatttgtgtccaactgaaatataattgtcattaaaataattttaaagagtgaagaaaatattgtgaaaagctcttggttgcacatgttatgaaatgttttttcttacactttgtcatggtaagttctactcattttcacttcttttccactgtatacagtgttctgctttgacaaagttggtctttattacttacatttaaatttcttattgccaaaagaacgtgttttatggggagaaacaaactctttgaagccagttatgtcatgccttgcacaaaagtgatgaaatctagaaaagattgtgtgtcacccctgtttattcttgaacagagggcaaagagggcactgggcacttctcacaaactttctagtgaacaaaaggtgcctattcttttttaaaaaaataaaataaaacataaatattactcttccatattccttctgcctatatttagtaattaatttattttatgataaagttctaatgaaatgtaaattgtttcagcaaaattctgcttttttttcatccctttgtgtaaacctgttaataatgagcccatcactaatatccagtgtaaagtttaacacggtttgacagtaaataaatgtgaattttttcaagtagttaacatgtgaacttttatgtatgatacataattggctttaacatgttggtccattcccaccttggtttaagtaacgtcataccaaagtccatggatatatgaaaggatacaattaagttgcctgtttgttctttatgctgaaaggaatatatgtcttccaattgcccactacatatgcacaaaatctgctggataagttttaagagggatatattctgaaagcatttttgtttgttgcattgtaccaggactaaaaaaagaaggattggaagttctgccatcaaatttgggtatcataaaaagtttttaactg

SEQ ID NO: 1582 - protein, 1163 aa, Homo sapiens
MVSSGCRMRSLWFIIVISFLPNTEGFSRAALPFGLVRRELSCEGYSIDLRCPGSDVIMIESANYGRTDDKICDADPFQMENTDCYLPDAFKIMTQRCNNRTQCIVVTGSDVFPDPCPGTYKYLEVQYECVPYIFVCPGTLKAIVDSPCIYEAEQKAGAWCKDPLQAADKIYFMPWTPYRTDTLIEYASLEDFQNSRQTTTYKLPNRVDGTGFVVYDGAVFFNKERTRNIVKFDLRTRIKSGEAIINYANYHDTSPYRWGGKTDIDLAVDENGLWVIYATEQNNGMIVISQLNPYTLRFEATWETVYDKRAASNAFMICGVLYVVRSVYQDNESETGKNSIDYIYNTRLNRGEYVDVPFPNQYQYIAAVDYNPRDNQLYVWNNNFILRYSLEFGPPDPAQVPTTAVTITSSAELFKTIISTTSTTSQKGPMSTTVAGSQEGSKGTKPPPAVSTTKIPPITNIFPLPERFCEALDSKGIKWPQTQRGMMVERPCPKGTRGTASYLCMISTGTWNPKGPDLSNCTSHWVNQLAQKIRSGENAASLANELAKHTKGPVFAGDVSSSVRLMEQLVDILDAQLQELKPSEKDSAGRSYNKAIVDTVDNLLRPEALESWKHMNSSEQAHTATMLLDTLEEGAFVLADNLLEPTRVSMPTENIVLEVAVLSTEGQIQDFKFPLGIKGAGSSIQLSANTVKQNSRNGLAKLVFIIYRSLGQFLSTENATIKLGADFIGRNSTIAVNSHVISVSINKESSRVYLTDPVLFTLPHIDPDNYFNANCSFWNYSERTMMGYWSTQGCKLVDTNKTRTTCACSHLTNFAILMAHREIAYKDGVHELLLTVITWVGIVISLVCLAICIFTFCFFRGLQSDRNTIHKNLCINLFIAEFIFLIGIDKTKYAIACPIFAGLLHFFFLAAFAWMCLEGVQLYLMLVEVFESEYSRKKYYYVAGYLFPATVVGVSAAIDYKSYGTEKACWLHVDNYFIWSFIGPVTFIILLNIIFLVITLCKMVKHSNTLKPDSSRLENIKSWVLGAFALLCLLGLTWSFGLLFINEETIVMAYLFTIFNAFQGVFIFIFHCALQKKVRKEYGKCFRHSYCCGGLPTESPHSSVKASTTRTSARYSSGTQSRIRRMWNDTVRKQSESSFISGDINSTSTLNQGGINLNILLQD

SEQ ID NO: 1583 - DNA, 6021 bp, Homo sapiens
cggcgaacagacgttctttctcctccatgcagttacacaaaaggagggctacggaaactaaaagtttcggggcctctggctcggtgcgtggagaaaagagaaaacctggagacgggatatgaagatcaatgatgcagactgatggttttgatgaagctgggcatttataactagattcattaaggaatacaaagaaaatacttaaagggatcaataatggtgtcttctggttgcagaatgcgaagtctgtggtttatcattgtaatcagcttcttaccaaatacagaaggtttcagcagagcagctttaccatttgggctggtgaggcgagaattatcctgtgaaggttattctatagatctgcgatgcccgggcagtgatgtcatcatgattgagagcgctaactatggtcggacggatgacaagatttgtgatgctgacccatttcagatggagaatacagactgctacctccccgatgccttcaaaattatgactcaaaggtgcaacaatcgaacacagtgtatagtagttactgggtcagatgtgtttcctgatccatgtcctggaacatacaaataccttgaagtccaatatgaatgtgtcccttacatttttgtgtgtcctgggaccttgaaagcaattgtggactcaccatgtatatatgaagctgaacaaaaggcgggtgcttggtgcaaggaccctcttcaggctgcagataaaatttatttcatgccctggactccctatcgtaccgatactttaatagaatatgcttctttagaagatttccaaaatagtcgccaaacaacaacatataaacttccaaatcgagtagatggtactggatttgtggtgtatgatggtgctgtcttctttaacaaagaaagaacgaggaatattgtgaaatttgacttgaggactagaattaagagtggcgaggccataattaactatgccaactaccatgatacctcaccatacagatggggaggaaagactgatatcgacctagcagttgatgaaaatggtttatgggtcatttacgccactgaacagaacaatggaatgatagttattagccagctgaatccatacactcttcgatttgaagcaacgtgggagactgtatacgacaaacgtgccgcatcaaatgcttttatgatatgcggagtcctctatgtggttaggtcagtttatcaagacaatgaaagtgaaacaggcaagaactcaattgattacatttataatacccgattaaaccgaggagaatatgtagatgttcccttccccaaccagtatcagtatattgctgcagtggattacaatccaagagataaccaactttacgtgtggaacaataacttcattttacgatattctctggagtttggtccacctgatcctgcccaagtgcctaccacagctgtgacaataacttcttcagctgagctgttcaaaaccataatatcaaccacaagcactacttcacagaaaggccccatgagcacaactgtagctggatcacaggaaggaagcaaagggacaaaaccacctccagcagtttctacaaccaaaattccacctataacaaatatttttcccctgccagagagattctgtgaagcattagactccaaggggataaagtggcctcagacacaaaggggaatgatggttgaacgaccatgccctaagggaacaagaggaactgcctcatatctctgcatgatttccactggaacatggaaccctaagggccccgatcttagcaactgtacctcacactgggtgaatcagctggctcagaagatcagaagcggagaaaatgctgctagtcttgccaatgaactggctaaacataccaaagggccagtgtttgctggggatgtaagttcttcagtgagattgatggagcagttggtggacatccttgatgcacagctgcaggaactgaaacctagtgaaaaagattcagctggacggagttataacaaggcaattgttgacacagtggacaaccttctgagacccgaagctttggaatcatggaaacatatgaattcttctgaacaagcacatactgcaacaatgttactcgatacattggaagaaggagcttttgtcctagctgacaatcttttagaaccaacaagggtctcaatgcccacagaaaatattgtcctggaagttgccgtactcagtacagaaggacagatccaagactttaaatttcctctgggcatcaaaggagcaggcagctcaatccaactgtccgcaaataccgtcaaacagaacagcaggaatgggcttgcaaagttggtgttcatcatttaccggagcctgggacagttccttagtacagaaaatgcaaccattaaactgggtgctgattttattggtcgtaatagcaccattgcagtgaactctcacgtcatttcagtttcaatcaataaagagtccagccgagtatacctgactgatcctgtgctttttaccctgccacacattgatcctgacaattatttcaatgcaaactgctccttctggaactactcagagagaactatgatgggatattggtctacccagggctgcaagctggttgacactaataaaactcgaacaacgtgtgcatgcagccacctaaccaattttgcaattctcatggcccacagggaaattgcatataaagatggcgttcatgaattacttcttacagtcatcacctgggtgggaattgtcatttcccttgtttgcctggctatctgcatcttcaccttctgctttttccgtggcctacagagtgaccgaaatactattcacaagaacctttgtatcaaccttttcattgctgaatttattttcctaataggcattgataagacaaaatatgcgattgcatgcccaatatttgcaggacttctacactttttctttttggcagcttttgcttggatgtgcctagaaggtgtgcagctctacctaatgttagttgaagtttttgaaagtgaatattcaaggaaaaaatattactatgttgctggttacttgtttcctgccacagtggttggagtttcagctgctattgactataagagctatggaacagaaaaagcttgctggcttcatgttgataactactttatatggagcttcattggacctgttaccttcattattctgctaaatattatcttcttggtgatcacattgtgcaaaatggtgaagcattcaaacactttgaaaccagattctagcaggttggaaaacattaagtcttgggtgcttggcgctttcgctcttctgtgtcttcttggcctcacctggtcctttgggttgctttttattaatgaggagactattgtgatggcatatctcttcactatatttaatgctttccagggagtgttcattttcatctttcactgtgctctccaaaagaaagtacgaaaagaatatggcaagtgcttcagacactcatactgctgtggaggcctcccaactgagagtccccacagttcagtgaaggcatcaaccaccagaaccagtgctcgctattcctctggcacacagagtcgtataagaagaatgtggaatgatactgtgagaaaacaatcagaatcttcttttatctcaggtgacatcaatagcacttcaacacttaatcaaggacattcactgaacaatgccagggatacaagtgccatggatactctaccgctaaatggtaattttaacaacagctactcgctgcacaagggtgactataatgacagcgtgcaagttgtggactgtggactaagtctgaatgatactgcttttgagaaaatgatcatttcagaattagtgcacaacaacttacggggcagcagcaagactcacaacctcgagctcacgctaccagtcaaacctgtgattggaggtagcagcagtgaagatgatgctattgtggcagatgcttcatctttaatgcacagcgacaacccagggctggagctccatcacaaagaactcgaggcaccacttattcctcagcggactcactcccttctgtaccaaccccagaagaaagtgaagtccgagggaactgacagctatgtctcccaactgacagcagaggctgaagatcacctacagtcccccaacagagactctctttatacaagcatgcccaatcttagagactctccctatccggagagcagccctgacatggaagaagacctctctccctccaggaggagtgagaatgaggacatttactataaaagcatgccaaatcttggagctggccatcagcttcagatgtgctaccagatcagcaggggcaatagtgatggttatataatccccattaacaaagaagggtgtattccagaaggagatgttagagaaggacaaatgcagctggttacaagtctttaatcatacagctaaggaattccaagggccacatgcgagtattaataaataaagacaccattggcctgacgcagctccctcaaactctgcttgaagagatgactcttgacctgtggttctctggtgtaaaaaagatgactgaaccttgcagttctgtgaatttttataaaacatacaaaaactttgtatatacacagagtatactaaagtgaattatttgttacaaagaaaagagatgccagccaggtattttaagattctgctgctgtttagagaaattgtgaaacaagcaaaacaaaactttccagccattttactgcagcagtctgtgaactaaatttgtaaatatggctgcaccatttttgtaggcctgcattgtattatatacaagacgtaggctttaaaatcctgtgggacaaatttactgtaccttactattcctgacaagacttggaaaagcaggagagatattctgcatcagtttgcagttcactgcaaatcttttacattaaggcaaagattgaaaacatgcttaaccactagcaatcaagccacaggccttatttcatatgtttcctcaactgtacaatgaactattctcatgaaaaatggctaaagaaattatattttgttctattgctagggtaaaataaatacatttgtgtccaactgaaatataattgtcattaaaataattttaaagagtgaagaaaatattgtgaaaagctcttggttgcacatgttatgaaatgttttttcttacactttgtcatggtaagttctactcattttcacttcttttccactgtatacagtgttctgctttgacaaagttggtctttattacttacatttaaatttcttattgccaaaagaacgtgttttatggggagaaacaaactctttgaagccagttatgtcatgccttgcacaaaagtgatgaaatctagaaaagattgtgtgtcacccctgtttattcttgaacagagggcaaagagggcactgggcacttctcacaaactttctagtgaacaaaaggtgcctattcttttttaaaaaaataaaataaaacataaatattactcttccatattccttctgcctatatttagtaattaatttattttatgataaagttctaatgaaatgtaaattgtttcagcaaaattctgcttttttttcatccctttgtgtaaacctgttaataatgagcccatcactaatatccagtgtaaagtttaacacggtttgacagtaaataaatgtgaattttttcaagtagttaacatgtgaacttttatgtatgatacataattggctttaacatgttggtccattcccaccttggtttaagtaacgtcataccaaagtccatggatatatgaaaggatacaattaagttgcctgtttgttctttatgctgaaaggaatatatgtcttccaattgcccactacatatgcacaaaatctgctggataagttttaagagggatatattctgaaagcatttttgtttgttgcattgtaccaggactaaaaaaagaaggattggaagttctgccatcaaatttgggtatcataaaaagtttttaactg

SEQ ID NO: 1584 - protein, 1403 aa, Homo sapiens; identical to SEQ ID NO: 16

SEQ ID NO: 1585 - DNA, 5924 bp, Homo sapiens
cggcgaacagacgttctttctcctccatgcagttacacaaaaggagggctacggaaactaaaagtttcggggcctctggctcggtgcgtggagaaaagagaaaacctggagacgggatatgaagatcaatgatgcagactgatggttttgatgaagctgggcatttataactagattcattaaggaatacaaagaaaatacttaaagggatcaataatggtgtcttctggttgcagaatgcgaagtctgtggtttatcattgtaatcagcttcttaccaaatacagaaggtttcagcagagcagctttaccatttgggctggtgaggcgagaattatcctgtgaaggttattctatagatctgcgatgcccgggcagtgatgtcatcatgattgagagcgctaactatggtcggacggatgacaagatttgtgatgctgacccatttcagatggagaatacagactgctacctccccgatgccttcaaaattatgactcaaaggtgcaacaatcgaacacagtgtatagtagttactgggtcagatgtgtttcctgatccatgtcctggaacatacaaataccttgaagtccaatatgaatgtgtcccttacatttttgtgtgtcctgggaccttgaaagcaattgtggactcaccatgtatatatgaagctgaacaaaaggcgggtgcttggtgcaaggaccctcttcaggctgcagataaaatttatttcatgccctggactccctatcgtaccgatactttaatagaatatgcttctttagaagatttccaaaatagtcgccaaacaacaacatataaacttccaaatcgagtagatggtactggatttgtggtgtatgatggtgctgtcttctttaacaaagaaagaacgaggaatattgtgaaatttgacttgaggactagaattaagagtggcgaggccataattaactatgccaactaccatgatacctcaccatacagatggggaggaaagactgatatcgacctagcagttgatgaaaatggtttatgggtcatttacgccactgaacagaacaatggaatgatagttattagccagctgaatccatacactcttcgatttgaagcaacgtgggagactgtatacgacaaacgtgccgcatcaaatgcttttatgatatgcggagtcctctatgtggttaggtcagtttatcaagacaatgaaagtgaaacaggcaagaactcaattgattacatttataatacccgattaaaccgaggagaatatgtagatgttcccttccccaaccagtatcagtatattgctgcagtggattacaatccaagagataaccaactttacgtgtggaacaataacttcattttacgatattctctggagtttggtccacctgatcctgcccaagtgcctaccacagctgtgacaataacttcttcagctgagctgttcaaaaccataatatcaaccacaagcactacttcacagaaaggccccatgagcacaactgtagctggatcacaggaaggaagcaaagggacaaaaccacctccagcagtttctacaaccaaaattccacctataacaaatatttttcccctgccagagagattctgtgaagcattagactccaaggggataaagtggcctcagacacaaaggggaatgatggttgaacgaccatgccctaagggaacaagaggaactgcctcatatctctgcatgatttccactggaacatggaaccctaagggccccgatcttagcaactgtacctcacactgggtgaatcagctggctcagaagatcagaagcggagaaaatgctgctagtcttgccaatgaactggctaaacataccaaagggccagtgtttgctggggatgtaagttcttcagtgagattgatggagcagttggtggacatccttgatgcacagctgcaggaactgaaacctagtgaaaaagattcagctggacggagttataacaaggcaattgttgacacagtggacaaccttctgagacccgaagctttggaatcatggaaacatatgaattcttctgaacaagcacatactgcaacaatgttactcgatacattggaagaaggagcttttgtcctagctgacaatcttttagaaccaacaagggtctcaatgcccacagaaaatattgtcctggaagttgccgtactcagtacagaaggacagatccaagactttaaatttcctctgggcatcaaaggagcaggcagctcaatccaactgtccgcaaataccgtcaaacagaacagcaggaatgggcttgcaaagttggtgttcatcatttaccggagcctgggacagttccttagtacagaaaatgcaaccattaaactgggtgctgattttattggtcgtaatagcaccattgcagtgaactctcacgtcatttcagtttcaatcaataaagagtccagccgagtatacctgactgatcctgtgctttttaccctgccacacattgatcctgacaattatttcaatgcaaactgctccttctggaactactcagagagaactatgatgggatattggtctacccagggctgcaagctggttgacactaataaaactcgaacaacgtgtgcatgcagccacctaaccaattttgcaattctcatggcccacagggaaattgcatataaagatggcgttcatgaattacttcttacagtcatcacctgggtgggaattgtcatttcccttgtttgcctggctatctgcatcttcaccttctgctttttccgtggcctacagagtgaccgaaatactattcacaagaacctttgtatcaaccttttcattgctgaatttattttcctaataggcattgataagacaaaatatgcgattgcatgcccaatatttgcaggacttctacactttttctttttggcagcttttgcttggatgtgcctagaaggtgtgcagctctacctaatgttagttgaagtttttgaaagtgaatattcaaggaaaaaatattactatgttgctggttacttgtttcctgccacagtggttggagtttcagctgctattgactataagagctatggaacagaaaaagcttgctggcttcatgttgataactactttatatggagcttcattggacctgttaccttcattattctgctaaatattatcttcttggtgatcacattgtgcaaaatggtgaagcattcaaacactttgaaaccagattctagcaggttggaaaacattaagtcttgggtgcttggcgctttcgctcttctgtgtcttcttggcctcacctggtcctttgggttgctttttattaatgaggagactattgtgatggcatatctcttcactatatttaatgctttccagggagtgttcattttcatctttcactgtgctctccaaaagaaagtacgaaaagaatatggcaagtgcttcagacactcatactgctgtggaggcctcccaactgagagtccccacagttcagtgaaggcatcaaccaccagaaccagtgctcgctattcctctggcacacaggacattcactgaacaatgccagggatacaagtgccatggatactctaccgctaaatggtaattttaacaacagctactcgctgcacaagggtgactataatgacagcgtgcaagttgtggactgtggactaagtctgaatgatactgcttttgagaaaatgatcatttcagaattagtgcacaacaacttacggggcagcagcaagactcacaacctcgagctcacgctaccagtcaaacctgtgattggaggtagcagcagtgaagatgatgctattgtggcagatgcttcatctttaatgcacagcgacaacccagggctggagctccatcacaaagaactcgaggcaccacttattcctcagcggactcactcccttctgtaccaaccccagaagaaagtgaagtccgagggaactgacagctatgtctcccaactgacagcagaggctgaagatcacctacagtcccccaacagagactctctttatacaagcatgcccaatcttagagactctccctatccggagagcagccctgacatggaagaagacctctctccctccaggaggagtgagaatgaggacatttactataaaagcatgccaaatcttggagctggccatcagcttcagatgtgctaccagatcagcaggggcaatagtgatggttatataatccccattaacaaagaagggtgtattccagaaggagatgttagagaaggacaaatgcagctggttacaagtctttaatcatacagctaaggaattccaagggccacatgcgagtattaataaataaagacaccattggcctgacgcagctccctcaaactctgcttgaagagatgactcttgacctgtggttctctggtgtaaaaaagatgactgaaccttgcagttctgtgaatttttataaaacatacaaaaactttgtatatacacagagtatactaaagtgaattatttgttacaaagaaaagagatgccagccaggtattttaagattctgctgctgtttagagaaattgtgaaacaagcaaaacaaaactttccagccattttactgcagcagtctgtgaactaaatttgtaaatatggctgcaccatttttgtaggcctgcattgtattatatacaagacgtaggctttaaaatcctgtgggacaaatttactgtaccttactattcctgacaagacttggaaaagcaggagagatattctgcatcagtttgcagttcactgcaaatcttttacattaaggcaaagattgaaaacatgcttaaccactagcaatcaagccacaggccttatttcatatgtttcctcaactgtacaatgaactattctcatgaaaaatggctaaagaaattatattttgttctattgctagggtaaaataaatacatttgtgtccaactgaaatataattgtcattaaaataattttaaagagtgaagaaaatattgtgaaaagctcttggttgcacatgttatgaaatgttttttcttacactttgtcatggtaagttctactcattttcacttcttttccactgtatacagtgttctgctttgacaaagttggtctttattacttacatttaaatttcttattgccaaaagaacgtgttttatggggagaaacaaactctttgaagccagttatgtcatgccttgcacaaaagtgatgaaatctagaaaagattgtgtgtcacccctgtttattcttgaacagagggcaaagagggcactgggcacttctcacaaactttctagtgaacaaaaggtgcctattcttttttaaaaaaataaaataaaacataaatattactcttccatattccttctgcctatatttagtaattaatttattttatgataaagttctaatgaaatgtaaattgtttcagcaaaattctgcttttttttcatccctttgtgtaaacctgttaataatgagcccatcactaatatccagtgtaaagtttaacacggtttgacagtaaataaatgtgaattttttcaagtagttaacatgtgaacttttatgtatgatacataattggctttaacatgttggtccattcccaccttggtttaagtaacgtcataccaaagtccatggatatatgaaaggatacaattaagttgcctgtttgttctttatgctgaaaggaatatatgtcttccaattgcccactacatatgcacaaaatctgctggataagttttaagagggatatattctgaaagcatttttgtttgttgcattgtaccaggactaaaaaaagaaggattggaagttctgccatcaaatttgggtatcataaaaagtttttaactg

SEQ ID NO: 1586 - protein, 1123 aa, Homo sapiens
MVSSGCRMRSLWFIIVISFLPNTEGFSRAALPFGLVRRELSCEGYSIDLRCPGSDVIMIESANYGRTDDKICDADPFQMENTDCYLPDAFKIMTQRCNNRTQCIVVTGSDVFPDPCPGTYKYLEVQYECVPYIFVCPGTLKAIVDSPCIYEAEQKAGAWCKDPLQAADKIYFMPWTPYRTDTLIEYASLEDFQNSRQTTTYKLPNRVDGTGFVVYDGAVFFNKERTRNIVKFDLRTRIKSGEAIINYANYHDTSPYRWGGKTDIDLAVDENGLWVIYATEQNNGMIVISQLNPYTLRFEATWETVYDKRAASNAFMICGVLYVVRSVYQDNESETGKNSIDYIYNTRLNRGEYVDVPFPNQYQYIAAVDYNPRDNQLYVWNNNFILRYSLEFGPPDPAQVPTTAVTITSSAELFKTIISTTSTTSQKGPMSTTVAGSQEGSKGTKPPPAVSTTKIPPITNIFPLPERFCEALDSKGIKWPQTQRGMMVERPCPKGTRGTASYLCMISTGTWNPKGPDLSNCTSHWVNQLAQKIRSGENAASLANELAKHTKGPVFAGDVSSSVRLMEQLVDILDAQLQELKPSEKDSAGRSYNKAIVDTVDNLLRPEALESWKHMNSSEQAHTATMLLDTLEEGAFVLADNLLEPTRVSMPTENIVLEVAVLSTEGQIQDFKFPLGIKGAGSSIQLSANTVKQNSRNGLAKLVFIIYRSLGQFLSTENATIKLGADFIGRNSTIAVNSHVISVSINKESSRVYLTDPVLFTLPHIDPDNYFNANCSFWNYSERTMMGYWSTQGCKLVDTNKTRTTCACSHLTNFAILMAHREIAYKDGVHELLLTVITWVGIVISLVCLAICIFTFCFFRGLQSDRNTIHKNLCINLFIAEFIFLIGIDKTKYAIACPIFAGLLHFFFLAAFAWMCLEGVQLYLMLVEVFESEYSRKKYYYVAGYLFPATVVGVSAAIDYKSYGTEKACWLHVDNYFIWSFIGPVTFIILLNIIFLVITLCKMVKHSNTLKPDSSRLENIKSWVLGAFALLCLLGLTWSFGLLFINEETIVMAYLFTIFNAFQGVFIFIFHCALQKKVRKEYGKCFRHSYCCGGLPTESPHSSVKASTTRTSARYSSGTQDIH

SEQ ID NO: 1587 - DNA, 5838 bp, Homo sapiens
cggcgaacagacgttctttctcctccatgcagttacacaaaaggagggctacggaaactaaaagtttcggggcctctggctcggtgcgtggagaaaagagaaaacctggagacgggatatgaagatcaatgatgcagactgatggttttgatgaagctgggcatttataactagattcattaaggaatacaaagaaaatacttaaagggatcaataatggtgtcttctggttgcagaatgcgaagtctgtggtttatcattgtaatcagcttcttaccaaatacagaaggtttcagcagagcagctttaccatttgggctggtgaggcgagaattatcctgtgaaggttattctatagatctgcgatgcccgggcagtgatgtcatcatgattgagagcgctaactatggtcggacggatgacaagatttgtgatgctgacccatttcagatggagaatacagactgctacctccccgatgccttcaaaattatgactcaaaggtgcaacaatcgaacacagtgtatagtagttactgggtcagatgtgtttcctgatccatgtcctggaacatacaaataccttgaagtccaatatgaatgtgtcccttacatttttgtgtgtcctgggaccttgaaagcaattgtggactcaccatgtatatatgaagctgaacaaaaggcgggtgcttggtgcaaggaccctcttcaggctgcagataaaatttatttcatgccctggactccctatcgtaccgatactttaatagaatatgcttctttagaagatttccaaaatagtcgccaaacaacaacatataaacttccaaatcgagtagatggtactggatttgtggtgtatgatggtgctgtcttctttaacaaagaaagaacgaggaatattgtgaaatttgacttgaggactagaattaagagtggcgaggccataattaactatgccaactaccatgatacctcaccatacagatggggaggaaagactgatatcgacctagcagttgatgaaaatggtttatgggtcatttacgccactgaacagaacaatggaatgatagttattagccagctgaatccatacactcttcgatttgaagcaacgtgggagactgtatacgacaaacgtgccgcatcaaatgcttttatgatatgcggagtcctctatgtggttaggtcagtttatcaagacaatgaaagtgaaacaggcaagaactcaattgattacatttataatacccgattaaaccgaggagaatatgtagatgttcccttccccaaccagtatcagtatattgctgcagtggattacaatccaagagataaccaactttacgtgtggaacaataacttcattttacgatattctctggagtttggtccacctgatcctgcccaagtgcctaccacagctgtgacaataacttcttcagctgagctgttcaaaaccataatatcaaccacaagcactacttcacagaaaggccccatgagcacaactgtagctggatcacaggaaggaagcaaagggacaaaaccacctccagcagtttctacaaccaaaattccacctataacaaatatttttcccctgccagagagattctgtgaagcattagactccaaggggataaagtggcctcagacacaaaggggaatgatggttgaacgaccatgccctaagggaacaagaggaactgcctcatatctctgcatgatttccactggaacatggaaccctaagggccccgatcttagcaactgtacctcacactgggtgaatcagctggctcagaagatcagaagcggagaaaatgctgctagtcttgccaatgaactggctaaacataccaaagggccagtgtttgctggggatgtaagttcttcagtgagattgatggagcagttggtggacatccttgatgcacagctgcaggaactgaaacctagtgaaaaagattcagctggacggagttataacaaggcaattgttgacacagtggacaaccttctgagacccgaagctttggaatcatggaaacatatgaattcttctgaacaagcacatactgcaacaatgttactcgatacattggaagaaggagcttttgtcctagctgacaatcttttagaaccaacaagggtctcaatgcccacagaaaatattgtcctggaagttgccgtactcagtacagaaggacagatccaagactttaaatttcctctgggcatcaaaggagcaggcagctcaatccaactgtccgcaaataccgtcaaacagaacagcaggaatgggcttgcaaagttggtgttcatcatttaccggagcctgggacagttccttagtacagaaaatgcaaccattaaactgggtgctgattttattggtcgtaatagcaccattgcagtgaactctcacgtcatttcagtttcaatcaataaagagtccagccgagtatacctgactgatcctgtgctttttaccctgccacacattgatcctgacaattatttcaatgcaaactgctccttctggaactactcagagagaactatgatgggatattggtctacccagggctgcaagctggttgacactaataaaactcgaacaacgtgtgcatgcagccacctaaccaattttgcaattctcatggcccacagggaaattgcatataaagatggcgttcatgaattacttcttacagtcatcacctgggtgggaattgtcatttcccttgtttgcctggctatctgcatcttcaccttctgctttttccgtggcctacagagtgaccgaaatactattcacaagaacctttgtatcaaccttttcattgctgaatttattttcctaataggcattgataagacaaaatatgcgattgcatgcccaatatttgcaggacttctacactttttctttttggcagcttttgcttggatgtgcctagaaggtgtgcagctctacctaatgttagttgaagtttttgaaagtgaatattcaaggaaaaaatattactatgttgctggttacttgtttcctgccacagtggttggagtttcagctgctattgactataagagctatggaacagaaaaagcttgctggcttcatgttgataactactttatatggagcttcattggacctgttaccttcattattctgctaaatattatcttcttggtgatcacattgtgcaaaatggtgaagcattcaaacactttgaaaccagattctagcaggttggaaaacattaagtcttgggtgcttggcgctttcgctcttctgtgtcttcttggcctcacctggtcctttgggttgctttttattaatgaggagactattgtgatggcatatctcttcactatatttaatgctttccagggagtgttcattttcatctttcactgtgctctccaaaagaaagtacgaaaagaatatggcaagtgcttcagacactcatactgctgtggaggcctcccaactgagagtccccacagttcagtgaaggcatcaaccaccagaaccagtgctcgctattcctctggcacacagagtcgtataagaagaatgtggaatgatactgtgagaaaacaatcagaatcttcttttatctcaggtgacatcaatagcacttcaacacttaatcaaggtggcataaatcttaatatattattacaggactgacatcacatggtctgagagcccatcttcaagatttatatcatttagagctactcttaggccagatagcctgagcagacagacatgatgacattcactgaacaatgccagggatacaagtgccatggatactctaccgctaaatggtaattttaacaacagctactcgctgcacaagggtgactataatgacagcgtgcaagttgtggactgtggactaagtctgaatgatactgcttttgagaaaatgatcatttcagaattagtgcacaacaacttacggggcagcagcaagactcacaacctcgagctcacgctaccagtcaaacctgtgattggaggtagcagcagtgaagatgatgctattgtggcagatgcttcatctttaatgcacagcgacaacccagggctggagctccatcacaaagaactcgaggcaccacttattcctcagcggactcactcccttctgtaccaaccccagaagaaagtgaagtccgagggaactgacagctatgtctcccaactgacagcagaggctgaagatcacctacagtcccccaacagagactctctttatacaagcatgcccaatcttagagactctccctatccggagagcagccctgacatggaagaagacctctctccctccaggaggagtgagaatgaggacatttactataaaagcatgccaaatcttggagctggccatcagcttcagatgtgctaccagatcagcaggggcaatagtgatggttatataatccccattaacaaagaagggtgtattccagaaggagatgttagagaaggacaaatgcagctggttacaagtctttaatcatacagctaaggaattccaagggccacatgcgagtattaataaataaagacaccattggcctgacgcagctccctcaaactctgcttgaagagatgactcttgacctgtggttctctggtgtaaaaaagatgactgaaccttgcagttctgtgaatttttataaaacatacaaaaactttgtatatacacagagtatactaaagtgaattatttgttacaaagaaaagagatgccagccaggtattttaagattctgctgctgtttagagaaattgtgaaacaagcaaaacaaaactttccagccattttactgcagcagtctgtgaactaaatttgtaaatatggctgcaccatttttgtaggcctgcattgtattatatacaagacgtaggctttaaaatcctgtgggacaaatttactgtaccttactattcctgacaagacttggaaaagcaggagagatattctgcatcagtttgcagttcactgcaaatcttttacattaaggcaaagattgaaaacatgcttaaccactagcaatcaagccacaggccttatttcatatgtttcctcaactgtacaatgaactattctcatgaaaaatggctaaagaaattatattttgttctattgctagggtaaaataaatacatttgtgtccaactgaaatataattgtcattaaaataattttaaagagtgaagaaaatattgtgaaaagctcttggttgcacatgttatgaaatgttttttcttacactttgtcatggtaagttctactcattttcacttcttttccactgtatacagtgttctgctttgacaaagttggtctttattacttacatttaaatttcttattgccaaaagaacgtgttttatggggagaaacaaactctttgaagccagttatgtcatgccttgcacaaaagtgatgaaatctagaaaagattgtgtgtcacccctgtttattcttgaacagagggcaaagagggcactgggcacttctcacaaactttctagtgaacaaaaggtgcctattcttttttaaaaaaataaaataaaacataaatattactcttccatattccttctgcctatatttagtaattaatttattttatgataaagttctaatgaaatgtaaattgtttcagcaaaattctgcttttttttcatccctttgtgtaaacctgttaataatgagcccatcactaatatccagtgtaaagtttaacacggtttgacagtaaataaatgtgaattttttcaagtagttaacatgtg

SEQ ID NO: 1588 - protein, 1163 aa, Homo sapiens; identical to SEQ ID NO: 1582

SEQ ID NO: 1589 - DNA, 5717 bp, Homo sapiens
cggcgaacagacgttctttctcctccatgcagttacacaaaaggagggctacggaaactaaaagtttcggggcctctggctcggtgcgtggagaaaagagaaaacctggagacgggatatgaagatcaatgatgcagactgatggttttgatgaagctgggcatttataactagattcattaaggaatacaaagaaaatacttaaagggatcaataatggtgtcttctggttgcagaatgcgaagtctgtggtttatcattgtaatcagcttcttaccaaatacagaaggtttcagcagagcagctttaccatttgggctggtgaggcgagaattatcctgtgaaggttattctatagatctgcgatgcccgggcagtgatgtcatcatgattgagagcgctaactatggtcggacggatgacaagatttgtgatgctgacccatttcagatggagaatacagactgctacctccccgatgccttcaaaattatgactcaaaggtgcaacaatcgaacacagtgtatagtagttactgggtcagatgtgtttcctgatccatgtcctggaacatacaaataccttgaagtccaatatgaatgtgtcccttacatttttgtgtgtcctgggaccttgaaagcaattgtggactcaccatgtatatatgaagctgaacaaaaggcgggtgcttggtgcaaggaccctcttcaggctgcagataaaatttatttcatgccctggactccctatcgtaccgatactttaatagaatatgcttctttagaagatttccaaaatagtcgccaaacaacaacatataaacttccaaatcgagtagatggtactggatttgtggtgtatgatggtgctgtcttctttaacaaagaaagaacgaggaatattgtgaaatttgacttgaggactagaattaagagtggcgaggccataattaactatgccaactaccatgatacctcaccatacagatggggaggaaagactgatatcgacctagcagttgatgaaaatggtttatgggtcatttacgccactgaacagaacaatggaatgatagttattagccagctgaatccatacactcttcgatttgaagcaacgtgggagactgtatacgacaaacgtgccgcatcaaatgcttttatgatatgcggagtcctctatgtggttaggtcagtttatcaagacaatgaaagtgaaacaggcaagaactcaattgattacatttataatacccgattaaaccgaggagaatatgtagatgttcccttccccaaccagtatcagtatattgctgcagtggattacaatccaagagataaccaactttacgtgtggaacaataacttcattttacgatattctctggagtttggtccacctgatcctgcccaagtgcctaccacagctgtgacaataacttcttcagctgagctgttcaaaaccataatatcaaccacaagcactacttcacagaaaggccccatgagcacaactgtagctggatcacaggaaggaagcaaagggacaaaaccacctccagcagtttctacaaccaaaattccacctataacaaatatttttcccctgccagagagattctgtgaagcattagactccaaggggataaagtggcctcagacacaaaggggaatgatggttgaacgaccatgccctaagggaacaagaggaactgcctcatatctctgcatgatttccactggaacatggaaccctaagggccccgatcttagcaactgtacctcacactgggtgaatcagctggctcagaagatcagaagcggagaaaatgctgctagtcttgccaatgaactggctaaacataccaaagggccagtgtttgctggggatgtaagttcttcagtgagattgatggagcagttggtggacatccttgatgcacagctgcaggaactgaaacctagtgaaaaagattcagctggacggagttataacaaggcaattgttgacacagtggacaaccttctgagacccgaagctttggaatcatggaaacatatgaattcttctgaacaagcacatactgcaacaatgttactcgatacattggaagaaggagcttttgtcctagctgacaatcttttagaaccaacaagggtctcaatgcccacagaaaatattgtcctggaagttgccgtactcagtacagaaggacagatccaagactttaaatttcctctgggcatcaaaggagcaggcagctcaatccaactgtccgcaaataccgtcaaacagaacagcaggaatgggcttgcaaagttggtgttcatcatttaccggagcctgggacagttccttagtacagaaaatgcaaccattaaactgggtgctgattttattggtcgtaatagcaccattgcagtgaactctcacgtcatttcagtttcaatcaataaagagtccagccgagtatacctgactgatcctgtgctttttaccctgccacacattgatcctgacaattatttcaatgcaaactgctccttctggaactactcagagagaactatgatgggatattggtctacccagggctgcaagctggttgacactaataaaactcgaacaacgtgtgcatgcagccacctaaccaattttgcaattctcatggcccacagggaaattgcatataaagatggcgttcatgaattacttcttacagtcatcacctgggtgggaattgtcatttcccttgtttgcctggctatctgcatcttcaccttctgctttttccgtggcctacagagtgaccgaaatactattcacaagaacctttgtatcaaccttttcattgctgaatttattttcctaataggcattgataagacaaaatatgcgattgcatgcccaatatttgcaggacttctacactttttctttttggcagcttttgcttggatgtgcctagaaggtgtgcagctctacctaatgttagttgaagtttttgaaagtgaatattcaaggaaaaaatattactatgttgctggttacttgtttcctgccacagtggttggagtttcagctgctattgactataagagctatggaacagaaaaagcttgctggcttcatgttgataactactttatatggagcttcattggacctgttaccttcattattctgctaaatattatcttcttggtgatcacattgtgcaaaatggtgaagcattcaaacactttgaaaccagattctagcaggttggaaaacattaagtcttgggtgcttggcgctttcgctcttctgtgtcttcttggcctcacctggtcctttgggttgctttttattaatgaggagactattgtgatggcatatctcttcactatatttaatgctttccagggagtgttcattttcatctttcactgtgctctccaaaagaaagtacgaaaagaatatggcaagtgcttcagacactcatactgctgtggaggcctcccaactgagagtccccacagttcagtgaaggcatcaaccaccagaaccagtgctcgctattcctctggcacacagagtcgtataagaagaatgtggaatgatactgtgagaaaacaatcagaatcttcttttatctcaggtgacatcaatagcacttcaacacttaatcaaggacattcactgaacaatgccagggatacaagtgccatggatactctaccgctaaatggtaattttaacaacagctactcgctgcacaagggtgactataatgacagcgtgcaagttgtggactgtggactaagtctgaatgatactgcttttgagaaaatgatcatttcagaattagtgcacaacaacttacggggcagcagcaagactcacaacctcgagctcacgctaccagtcaaacctgtgattggaggtagcagcagtgaagatgatgctattgtggcagatgcttcatctttaatgcacagcgacaacccagggctggagctccatcacaaagaactcgaggcaccacttattcctcagcggactcactcccttctgtaccaaccccagaagaaagtgaagtccgagggaactgacagctatgtctcccaactgacagcagaggctgaagatcacctacagtcccccaacagagactctctttatacaagcatgcccaatcttagagactctccctatccggagagcagccctgacatggaagaagacctctctccctccaggaggagtgagaatgaggacatttactataaaagcatgccaaatcttggagctggccatcagcttcagatgtgctaccagatcagcaggggcaatagtgatggttatataatccccattaacaaagaagggtgtattccagaaggagatgttagagaaggacaaatgcagctggttacaagtctttaatcatacagctaaggaattccaagggccacatgcgagtattaataaataaagacaccattggcctgacgcagctccctcaaactctgcttgaagagatgactcttgacctgtggttctctggtgtaaaaaagatgactgaaccttgcagttctgtgaatttttataaaacatacaaaaactttgtatatacacagagtatactaaagtgaattatttgttacaaagaaaagagatgccagccaggtattttaagattctgctgctgtttagagaaattgtgaaacaagcaaaacaaaactttccagccattttactgcagcagtctgtgaactaaatttgtaaatatggctgcaccatttttgtaggcctgcattgtattatatacaagacgtaggctttaaaatcctgtgggacaaatttactgtaccttactattcctgacaagacttggaaaagcaggagagatattctgcatcagtttgcagttcactgcaaatcttttacattaaggcaaagattgaaaacatgcttaaccactagcaatcaagccacaggccttatttcatatgtttcctcaactgtacaatgaactattctcatgaaaaatggctaaagaaattatattttgttctattgctagggtaaaataaatacatttgtgtccaactgaaatataattgtcattaaaataattttaaagagtgaagaaaatattgtgaaaagctcttggttgcacatgttatgaaatgttttttcttacactttgtcatggtaagttctactcattttcacttcttttccactgtatacagtgttctgctttgacaaagttggtctttattacttacatttaaatttcttattgccaaaagaacgtgttttatggggagaaacaaactctttgaagccagttatgtcatgccttgcacaaaagtgatgaaatctagaaaagattgtgtgtcacccctgtttattcttgaacagagggcaaagagggcactgggcacttctcacaaactttctagtgaacaaaaggtgcctattcttttttaaaaaaataaaataaaacataaatattactcttccatattccttctgcctatatttagtaattaatttattttatgataaagttctaatgaaatgtaaattgtttcagcaaaattctgcttttttttcatccctttgtgtaaacctgttaataatgagcccatcactaatatccagtgtaaagtttaacacggtttgacagtaaataaatgtgaattttttcaagtagttaacatgtg

SEQ ID NO: 1590 - protein, 1403 aa, Homo sapiens; identical to SEQ ID NO: 16

SEQ ID NO: 1591 - DNA, 5620 bp, Homo sapiens
cggcgaacagacgttctttctcctccatgcagttacacaaaaggagggctacggaaactaaaagtttcggggcctctggctcggtgcgtggagaaaagagaaaacctggagacgggatatgaagatcaatgatgcagactgatggttttgatgaagctgggcatttataactagattcattaaggaatacaaagaaaatacttaaagggatcaataatggtgtcttctggttgcagaatgcgaagtctgtggtttatcattgtaatcagcttcttaccaaatacagaaggtttcagcagagcagctttaccatttgggctggtgaggcgagaattatcctgtgaaggttattctatagatctgcgatgcccgggcagtgatgtcatcatgattgagagcgctaactatggtcggacggatgacaagatttgtgatgctgacccatttcagatggagaatacagactgctacctccccgatgccttcaaaattatgactcaaaggtgcaacaatcgaacacagtgtatagtagttactgggtcagatgtgtttcctgatccatgtcctggaacatacaaataccttgaagtccaatatgaatgtgtcccttacatttttgtgtgtcctgggaccttgaaagcaattgtggactcaccatgtatatatgaagctgaacaaaaggcgggtgcttggtgcaaggaccctcttcaggctgcagataaaatttatttcatgccctggactccctatcgtaccgatactttaatagaatatgcttctttagaagatttccaaaatagtcgccaaacaacaacatataaacttccaaatcgagtagatggtactggatttgtggtgtatgatggtgctgtcttctttaacaaagaaagaacgaggaatattgtgaaatttgacttgaggactagaattaagagtggcgaggccataattaactatgccaactaccatgatacctcaccatacagatggggaggaaagactgatatcgacctagcagttgatgaaaatggtttatgggtcatttacgccactgaacagaacaatggaatgatagttattagccagctgaatccatacactcttcgatttgaagcaacgtgggagactgtatacgacaaacgtgccgcatcaaatgcttttatgatatgcggagtcctctatgtggttaggtcagtttatcaagacaatgaaagtgaaacaggcaagaactcaattgattacatttataatacccgattaaaccgaggagaatatgtagatgttcccttccccaaccagtatcagtatattgctgcagtggattacaatccaagagataaccaactttacgtgtggaacaataacttcattttacgatattctctggagtttggtccacctgatcctgcccaagtgcctaccacagctgtgacaataacttcttcagctgagctgttcaaaaccataatatcaaccacaagcactacttcacagaaaggccccatgagcacaactgtagctggatcacaggaaggaagcaaagggacaaaaccacctccagcagtttctacaaccaaaattccacctataacaaatatttttcccctgccagagagattctgtgaagcattagactccaaggggataaagtggcctcagacacaaaggggaatgatggttgaacgaccatgccctaagggaacaagaggaactgcctcatatctctgcatgatttccactggaacatggaaccctaagggccccgatcttagcaactgtacctcacactgggtgaatcagctggctcagaagatcagaagcggagaaaatgctgctagtcttgccaatgaactggctaaacataccaaagggccagtgtttgctggggatgtaagttcttcagtgagattgatggagcagttggtggacatccttgatgcacagctgcaggaactgaaacctagtgaaaaagattcagctggacggagttataacaaggcaattgttgacacagtggacaaccttctgagacccgaagctttggaatcatggaaacatatgaattcttctgaacaagcacatactgcaacaatgttactcgatacattggaagaaggagcttttgtcctagctgacaatcttttagaaccaacaagggtctcaatgcccacagaaaatattgtcctggaagttgccgtactcagtacagaaggacagatccaagactttaaatttcctctgggcatcaaaggagcaggcagctcaatccaactgtccgcaaataccgtcaaacagaacagcaggaatgggcttgcaaagttggtgttcatcatttaccggagcctgggacagttccttagtacagaaaatgcaaccattaaactgggtgctgattttattggtcgtaatagcaccattgcagtgaactctcacgtcatttcagtttcaatcaataaagagtccagccgagtatacctgactgatcctgtgctttttaccctgccacacattgatcctgacaattatttcaatgcaaactgctccttctggaactactcagagagaactatgatgggatattggtctacccagggctgcaagctggttgacactaataaaactcgaacaacgtgtgcatgcagccacctaaccaattttgcaattctcatggcccacagggaaattgcatataaagatggcgttcatgaattacttcttacagtcatcacctgggtgggaattgtcatttcccttgtttgcctggctatctgcatcttcaccttctgctttttccgtggcctacagagtgaccgaaatactattcacaagaacctttgtatcaaccttttcattgctgaatttattttcctaataggcattgataagacaaaatatgcgattgcatgcccaatatttgcaggacttctacactttttctttttggcagcttttgcttggatgtgcctagaaggtgtgcagctctacctaatgttagttgaagtttttgaaagtgaatattcaaggaaaaaatattactatgttgctggttacttgtttcctgccacagtggttggagtttcagctgctattgactataagagctatggaacagaaaaagcttgctggcttcatgttgataactactttatatggagcttcattggacctgttaccttcattattctgctaaatattatcttcttggtgatcacattgtgcaaaatggtgaagcattcaaacactttgaaaccagattctagcaggttggaaaacattaagtcttgggtgcttggcgctttcgctcttctgtgtcttcttggcctcacctggtcctttgggttgctttttattaatgaggagactattgtgatggcatatctcttcactatatttaatgctttccagggagtgttcattttcatctttcactgtgctctccaaaagaaagtacgaaaagaatatggcaagtgcttcagacactcatactgctgtggaggcctcccaactgagagtccccacagttcagtgaaggcatcaaccaccagaaccagtgctcgctattcctctggcacacaggacattcactgaacaatgccagggatacaagtgccatggatactctaccgctaaatggtaattttaacaacagctactcgctgcacaagggtgactataatgacagcgtgcaagttgtggactgtggactaagtctgaatgatactgcttttgagaaaatgatcatttcagaattagtgcacaacaacttacggggcagcagcaagactcacaacctcgagctcacgctaccagtcaaacctgtgattggaggtagcagcagtgaagatgatgctattgtggcagatgcttcatctttaatgcacagcgacaacccagggctggagctccatcacaaagaactcgaggcaccacttattcctcagcggactcactcccttctgtaccaaccccagaagaaagtgaagtccgagggaactgacagctatgtctcccaactgacagcagaggctgaagatcacctacagtcccccaacagagactctctttatacaagcatgcccaatcttagagactctccctatccggagagcagccctgacatggaagaagacctctctccctccaggaggagtgagaatgaggacatttactataaaagcatgccaaatcttggagctggccatcagcttcagatgtgctaccagatcagcaggggcaatagtgatggttatataatccccattaacaaagaagggtgtattccagaaggagatgttagagaaggacaaatgcagctggttacaagtctttaatcatacagctaaggaattccaagggccacatgcgagtattaataaataaagacaccattggcctgacgcagctccctcaaactctgcttgaagagatgactcttgacctgtggttctctggtgtaaaaaagatgactgaaccttgcagttctgtgaatttttataaaacatacaaaaactttgtatatacacagagtatactaaagtgaattatttgttacaaagaaaagagatgccagccaggtattttaagattctgctgctgtttagagaaattgtgaaacaagcaaaacaaaactttccagccattttactgcagcagtctgtgaactaaatttgtaaatatggctgcaccatttttgtaggcctgcattgtattatatacaagacgtaggctttaaaatcctgtgggacaaatttactgtaccttactattcctgacaagacttggaaaagcaggagagatattctgcatcagtttgcagttcactgcaaatcttttacattaaggcaaagattgaaaacatgcttaaccactagcaatcaagccacaggccttatttcatatgtttcctcaactgtacaatgaactattctcatgaaaaatggctaaagaaattatattttgttctattgctagggtaaaataaatacatttgtgtccaactgaaatataattgtcattaaaataattttaaagagtgaagaaaatattgtgaaaagctcttggttgcacatgttatgaaatgttttttcttacactttgtcatggtaagttctactcattttcacttcttttccactgtatacagtgttctgctttgacaaagttggtctttattacttacatttaaatttcttattgccaaaagaacgtgttttatggggagaaacaaactctttgaagccagttatgtcatgccttgcacaaaagtgatgaaatctagaaaagattgtgtgtcacccctgtttattcttgaacagagggcaaagagggcactgggcacttctcacaaactttctagtgaacaaaaggtgcctattcttttttaaaaaaataaaataaaacataaatattactcttccatattccttctgcctatatttagtaattaatttattttatgataaagttctaatgaaatgtaaattgtttcagcaaaattctgcttttttttcatccctttgtgtaaacctgttaataatgagcccatcactaatatccagtgtaaagtttaacacggtttgacagtaaataaatgtgaattttttcaagtagttaacatgtg

SEQ ID NO: 1592 - protein, 1123 aa, Homo sapiens; identical to SEQ ID NO: 1586

SEQ ID NO: 1593 - DNA, 2034 bp, Homo sapiens
gcgcggcccccacgccagacggccctccctcggggcgcgctcgcagacggagatatgaagatcaatgatgcagactgatggttttgatgaagctgggcatttataactagattcattaaggaatacaaagaaaatacttaaagggatcaataatggtgtcttctggttgcagaatgcgaagtctgtggtttatcattgtaatcagcttcttaccaaatacagaaggtttcagcagagcagctttaccatttgggctggtgaggcgagaattatcctgtgaaggttattctatagatctgcgatgcccgggcagtgatgtcatcatgattgagagcgctaactatggtcggacggatgacaagatttgtgatgctgacccatttcagatggagaatacagactgctacctccccgatgccttcaaaattatgactcaaaggggttgcaactatttacagttgggaatgcaggaaagcctggcacttttcaagtgttagctttcaaatacaactttgtcctgaacgacattaaaaagttttgtacaaaagaaatagagtttctgtggaaaggaacagagacagtaatgataactccccctcttctgtttcaggacattcactgaacaatgccagggatacaagtgccatggatactctaccgctaaatggtaattttaacaacagctactcgctgcacaagggtgactataatgacagcgtgcaagttgtggactgtggactaagtctgaatgatactgcttttgagaaaatgatcatttcagaattagtgcacaacaacttacggggcagcagcaagactcacaacctcgagctcacgctaccagtcaaacctgtgattggaggtagcagcagtgaagatgatgctattgtggcagatgcttcatctttaatgcacagcgacaacccagggctggagctccatcacaaagaactcgaggcaccacttattcctcagcggactcactcccttctgtaccaaccccagaagaaagtgaagtccgagggaactgacagctatgtctcccaactgacagcagaggctgaagatcacctacagtcccccaacagagactctctttatacaagcatgcccaatcttagagactctccctatccggagagcagccctgacatggaagaagacctctctccctccaggaggagtgagaatgaggacatttactataaaagcatgccaaatcttggagctggccatcagcttcagatgtgctaccagatcagcaggggcaatagtgatggttatataatccccattaacaaagaagggtgtattccagaaggagatgttagagaaggacaaatgcagctggttacaagtctttaatcatacagctaaggaattccaagggccacatgcgagtattaataaataaagacaccattggcctgacgcagctccctcaaactctgcttgaagagatgactcttgacctgtggttctctggtgtaaaaaagatgactgaaccttgcagttctgtgaatttttataaaacatacaaaaactttgtatatacacagagtatactaaagtgaattatttgttacaaagaaaagagatgccagccaggtattttaagattctgctgctgtttagagaaattgtgaaacaagcaaaacaaaactttccagccattttactgcagcagtctgtgaactaaatttgtaaatatggctgcaccatttttgtaggcctgcattgtattatatacaagacgtaggctttaaaatcctgtgggacaaatttactgtaccttactattcctgacaagacttggaaaagcaggagagatattctgcatcagtttgcagttcactgcaaatcttttacattaaggcaaagattgaaaacatgcttaaccactagcaatcaagccacaggccttatttcatatgtttcctcaactgtacaatgaactattctcatgaaaaatggctaaagaaattatattttgttctattgctagggtaaaataaatacatttgtgtccaactg

SEQ ID NO: 1594 - protein, 114 aa, Homo sapiens
MVSSGCRMRSLWFIIVISFLPNTEGFSRAALPFGLVRRELSCEGYSIDLRCPGSDVIMIESANYGRTDDKICDADPFQMENTDCYLPDAFKIMTQRGCNYLQLGMQESLALFKC

SEQ ID NO: 1595 - DNA, 2654 bp, Homo sapiens
gcgcggcccccacgccagacggccctccctcggggcgcgctcgcagacggagatatgaagatcaatgatgcagactgatggttttgatgaagctgggcatttataactagattcattaaggaatacaaagaaaatacttaaagggatcaataatggtgtcttctggttgcagaatgcgaagtctgtggtttatcattgtaatcagcttcttaccaaatacagaaggtttcagcagagcagctttaccatttgggctggtgaggcgagaattatcctgtgaaggttattctatagatctgcgatgcccgggcagtgatgtcatcatgattgagagcgctaactatggtcggacggatgacaagatttgtgatgctgacccatttcagatggagaatacagactgctacctccccgatgccttcaaaattatgactcaaaggggttgcaactatttacagttgggaatgcaggaaagcctggcacttttcaagtgttagctttcaaatacaactttgtcctgaacgacattaaaaagttttgtacaaaagaaatagagtttctgtggaaaggaacagagacagtaatgataactccccctcttctgtttcaggacattcactgaacaatgccagggatacaagtgccatggatactctaccgctaaatggtaattttaacaacagctactcgctgcacaagggtgactataatgacagcgtgcaagttgtggactgtggactaagtctgaatgatactgcttttgagaaaatgatcatttcagaattagtgcacaacaacttacggggcagcagcaagactcacaacctcgagctcacgctaccagtcaaacctgtgattggaggtagcagcagtgaagatgatgctattgtggcagatgcttcatctttaatgcacagcgacaacccagggctggagctccatcacaaagaactcgaggcaccacttattcctcagcggactcactcccttctgtaccaaccccagaagaaagtgaagtccgagggaactgacagctatgtctcccaactgacagcagaggctgaagatcacctacagtcccccaacagagactctctttatacaagcatgcccaatcttagagactctccctatccggagagcagccctgacatggaagaagacctctctccctccaggaggagtgagaatgaggacatttactataaaagcatgccaaatcttggagctggccatcagcttcagatgtgctaccagatcagcaggggcaatagtgatggttatataatccccattaacaaagaagggtgtattccagaaggagatgttagagaaggacaaatgcagctggttacaagtctttaatcatacagctaaggaattccaagggccacatgcgagtattaataaataaagacaccattggcctgacgcagctccctcaaactctgcttgaagagatgactcttgacctgtggttctctggtgtaaaaaagatgactgaaccttgcagttctgtgaatttttataaaacatacaaaaactttgtatatacacagagtatactaaagtgaattatttgttacaaagaaaagagatgccagccaggtattttaagattctgctgctgtttagagaaattgtgaaacaagcaaaacaaaactttccagccattttactgcagcagtctgtgaactaaatttgtaaatatggctgcaccatttttgtaggcctgcattgtattatatacaagacgtaggctttaaaatcctgtgggacaaatttactgtaccttactattcctgacaagacttggaaaagcaggagagatattctgcatcagtttgcagttcactgcaaatcttttacattaaggcaaagattgaaaacatgcttaaccactagcaatcaagccacaggccttatttcatatgtttcctcaactgtacaatgaactattctcatgaaaaatggctaaagaaattatattttgttctattgctagggtaaaataaatacatttgtgtccaactgaaatataattgtcattaaaataattttaaagagtgaagaaaatattgtgaaaagctcttggttgcacatgttatgaaatgttttttcttacactttgtcatggtaagttctactcattttcacttcttttccactgtatacagtgttctgctttgacaaagttggtctttattacttacatttaaatttcttattgccaaaagaacgtgttttatggggagaaacaaactctttgaagccagttatgtcatgccttgcacaaaagtgatgaaatctagaaaagattgtgtgtcacccctgtttattcttgaacagagggcaaagagggcactgggcacttctcacaaactttctagtgaacaaaaggtgcctattcttttttaaaaaaataaaataaaacataaatattactcttccatattccttctgcctatatttagtaattaatttattttatgataaagttctaatgaaatgtaaattgtttcagcaaaattctgcttttttttcatccctttgtgtaaacctgttaataatgagcccatcactaatatccagtgtaaagtttaacacggtttgacagtaaataaatgtgaattttttcaagtagttaacatgtg

SEQ ID NO: 1596 - protein, 114 aa, Homo sapiens; identical to SEQ ID NO: 1594

SEQ ID NO: 1597 - DNA, 2958 bp, Homo sapiens
gcgcggcccccacgccagacggccctccctcggggcgcgctcgcagacggagatatgaagatcaatgatgcagactgatggttttgatgaagctgggcatttataactagattcattaaggaatacaaagaaaatacttaaagggatcaataatggtgtcttctggttgcagaatgcgaagtctgtggtttatcattgtaatcagcttcttaccaaatacagaaggtttcagcagagcagctttaccatttgggctggtgaggcgagaattatcctgtgaaggttattctatagatctgcgatgcccgggcagtgatgtcatcatgattgagagcgctaactatggtcggacggatgacaagatttgtgatgctgacccatttcagatggagaatacagactgctacctccccgatgccttcaaaattatgactcaaaggggttgcaactatttacagttgggaatgcaggaaagcctggcacttttcaagtgttagctttcaaatacaactttgtcctgaacgacattaaaaagttttgtacaaaagaaatagagtttctgtggaaaggaacagagacagtaatgataactccccctcttctgtttcaggacattcactgaacaatgccagggatacaagtgccatggatactctaccgctaaatggtaattttaacaacagctactcgctgcacaagggtgactataatgacagcgtgcaagttgtggactgtggactaagtctgaatgatactgcttttgagaaaatgatcatttcagaattagtgcacaacaacttacggggcagcagcaagactcacaacctcgagctcacgctaccagtcaaacctgtgattggaggtagcagcagtgaagatgatgctattgtggcagatgcttcatctttaatgcacagcgacaacccagggctggagctccatcacaaagaactcgaggcaccacttattcctcagcggactcactcccttctgtaccaaccccagaagaaagtgaagtccgagggaactgacagctatgtctcccaactgacagcagaggctgaagatcacctacagtcccccaacagagactctctttatacaagcatgcccaatcttagagactctccctatccggagagcagccctgacatggaagaagacctctctccctccaggaggagtgagaatgaggacatttactataaaagcatgccaaatcttggagctggccatcagcttcagatgtgctaccagatcagcaggggcaatagtgatggttatataatccccattaacaaagaagggtgtattccagaaggagatgttagagaaggacaaatgcagctggttacaagtctttaatcatacagctaaggaattccaagggccacatgcgagtattaataaataaagacaccattggcctgacgcagctccctcaaactctgcttgaagagatgactcttgacctgtggttctctggtgtaaaaaagatgactgaaccttgcagttctgtgaatttttataaaacatacaaaaactttgtatatacacagagtatactaaagtgaattatttgttacaaagaaaagagatgccagccaggtattttaagattctgctgctgtttagagaaattgtgaaacaagcaaaacaaaactttccagccattttactgcagcagtctgtgaactaaatttgtaaatatggctgcaccatttttgtaggcctgcattgtattatatacaagacgtaggctttaaaatcctgtgggacaaatttactgtaccttactattcctgacaagacttggaaaagcaggagagatattctgcatcagtttgcagttcactgcaaatcttttacattaaggcaaagattgaaaacatgcttaaccactagcaatcaagccacaggccttatttcatatgtttcctcaactgtacaatgaactattctcatgaaaaatggctaaagaaattatattttgttctattgctagggtaaaataaatacatttgtgtccaactgaaatataattgtcattaaaataattttaaagagtgaagaaaatattgtgaaaagctcttggttgcacatgttatgaaatgttttttcttacactttgtcatggtaagttctactcattttcacttcttttccactgtatacagtgttctgctttgacaaagttggtctttattacttacatttaaatttcttattgccaaaagaacgtgttttatggggagaaacaaactctttgaagccagttatgtcatgccttgcacaaaagtgatgaaatctagaaaagattgtgtgtcacccctgtttattcttgaacagagggcaaagagggcactgggcacttctcacaaactttctagtgaacaaaaggtgcctattcttttttaaaaaaataaaataaaacataaatattactcttccatattccttctgcctatatttagtaattaatttattttatgataaagttctaatgaaatgtaaattgtttcagcaaaattctgcttttttttcatccctttgtgtaaacctgttaataatgagcccatcactaatatccagtgtaaagtttaacacggtttgacagtaaataaatgtgaattttttcaagtagttaacatgtgaacttttatgtatgatacataattggctttaacatgttggtccattcccaccttggtttaagtaacgtcataccaaagtccatggatatatgaaaggatacaattaagttgcctgtttgttctttatgctgaaaggaatatatgtcttccaattgcccactacatatgcacaaaatctgctggataagttttaagagggatatattctgaaagcatttttgtttgttgcattgtaccaggactaaaaaaagaaggattggaagttctgccatcaaatttgggtatcataaaaagtttttaactg

SEQ ID NO: 1598 - protein, 114 aa, Homo sapiens; identical to SEQ ID NO: 1594

SEQ ID NO: 1599 - DNA, 547 bp, Homo sapiens
atataataacaggatatagagtatgtctacatgttatatcacattttaaagactctactagccagtctagtggacagagatacttttctgattactatttcagtaattttaattgaacttgattttgcaagttcaatttattttctccacggataagttttagtggaactttaattcttttcggttgtcttcactgttcatttaattagagagagagaagcaagtgtgttatattaatcccttggtcttgtgattattcaatgcaggtacgaaaagaatatggcaagtgcttcagacactcatactgctgtggaggcctcccaactgagagtccccacagttcagtgaaggcatcaaccaccagaaccagtgctcgctattcctctggcacacagagtcgtataagaagaatgtggaatgatactgtgagaaaacaatcagaatcttcttttatctcaggtgacatcaatagcacttcaacacttaatcaaggtcagttatcaggaaaatttgagttactaccatttattaaagtacatataagttc

SEQ ID NO: 1600 - protein, 94 aa, Homo sapiens
MQVRKEYGKCFRHSYCCGGLPTESPHSSVKASTTRTSARYSSGTQSRIRRMWNDTVRKQSESSFISGDINSTSTLNQGQLSGKFELLPFIKVHI

SEQ ID NO: 1601 - DNA, 1685 bp, Homo sapiens
gtataagaagaatgtggaatgatactgtgagaaaacaatcagaatcttcttttatctcaggtgacatcaatagcacttcaacacttaatcaaggaatgactggcaattacctactaacaaaccctcttcttcgaccccacggcactaacaacccctataacacattgctcgctgaaacagttgtatgtaatgccccttcagctcctgtatttaactcaccagctactcttaggccagatagcctgagcagacagacatgatgacattcactgaacaatgccagggatacaagtgccatggatactctaccgctaaatggtaattttaacaacagctactcgctgcacaagggtgactataatgacagcgtgcaagttgtggactgtggactaagtctgaatgatactgcttttgagaaaatgatcatttcagaattagtgcacaacaacttacggggcagcagcaagactcacaacctcgagctcacgctaccagtcaaacctgtgattggaggtagcagcagtgaagatgatgctattgtggcagatgcttcatctttaatgcacagcgacaacccagggctggagctccatcacaaagaactcgaggcaccacttattcctcagcggactcactcccttctgtaccaaccccagaagaaagtgaagtccgagggaactgacagctatgtctcccaactgacagcagaggctgaagatcacctacagtcccccaacagagactctctttatacaagcatgcccaatcttagagactctccctatccggagagcagccctgacatggaagaagacctctctccctccaggaggagtgagaatgaggacatttactataaaagcatgccaaatcttggagctggccatcagcttcagatgtgctaccagatcagcaggggcaatagtgatggttatataatccccattaacaaagaagggtgtattccagaaggagatgttagagaaggacaaatgcagctggttacaagtctttaatcatacagctaaggaattccaagggccacatgcgagtattaataaataaagacaccattggcctgacgcagctccctcaaactctgcttgaagagatgactcttgacctgtggttctctggtgtaaaaaagatgactgaaccttgcagttctgtgaatttttataaaacatacaaaaactttgtatatacacagagtatactaaagtgaattatttgttacaaagaaaagagatgccagccaggtattttaagattctgctgctgtttagagaaattgtgaaacaagcaaaacaaaactttccagccattttactgcagcagtctgtgaactaaatttgtaaatatggctgcaccatttttgtaggcctgcattgtattatatacaagacgtaggctttaaaatcctgtgggacaaatttactgtaccttactattcctgacaagacttggaaaagcaggagagatattctgcatcagtttgcagttcactgcaaatcttttacattaaggcaaagattgaaaacatgcttaaccactagcaatcaagccacaggccttatttcatatgtttcctcaactgtacaatgaactattctcatgaaaaatggctaaagaaattatattttgttctattgctagggtaaaataaatacatttgtgtccaactg

SEQ ID NO: 1602 - protein, 82 aa, Homo sapiens
MWNDTVRKQSESSFISGDINSTSTLNQGMTGNYLLTNPLLRPHGTNNPYNTLLAETVVCNAPSAPVFNSPATLRPDSLSRQT

SEQ ID NO: 1603 - DNA, 2305 bp, Homo sapiens
gtataagaagaatgtggaatgatactgtgagaaaacaatcagaatcttcttttatctcaggtgacatcaatagcacttcaacacttaatcaaggaatgactggcaattacctactaacaaaccctcttcttcgaccccacggcactaacaacccctataacacattgctcgctgaaacagttgtatgtaatgccccttcagctcctgtatttaactcaccagctactcttaggccagatagcctgagcagacagacatgatgacattcactgaacaatgccagggatacaagtgccatggatactctaccgctaaatggtaattttaacaacagctactcgctgcacaagggtgactataatgacagcgtgcaagttgtggactgtggactaagtctgaatgatactgcttttgagaaaatgatcatttcagaattagtgcacaacaacttacggggcagcagcaagactcacaacctcgagctcacgctaccagtcaaacctgtgattggaggtagcagcagtgaagatgatgctattgtggcagatgcttcatctttaatgcacagcgacaacccagggctggagctccatcacaaagaactcgaggcaccacttattcctcagcggactcactcccttctgtaccaaccccagaagaaagtgaagtccgagggaactgacagctatgtctcccaactgacagcagaggctgaagatcacctacagtcccccaacagagactctctttatacaagcatgcccaatcttagagactctccctatccggagagcagccctgacatggaagaagacctctctccctccaggaggagtgagaatgaggacatttactataaaagcatgccaaatcttggagctggccatcagcttcagatgtgctaccagatcagcaggggcaatagtgatggttatataatccccattaacaaagaagggtgtattccagaaggagatgttagagaaggacaaatgcagctggttacaagtctttaatcatacagctaaggaattccaagggccacatgcgagtattaataaataaagacaccattggcctgacgcagctccctcaaactctgcttgaagagatgactcttgacctgtggttctctggtgtaaaaaagatgactgaaccttgcagttctgtgaatttttataaaacatacaaaaactttgtatatacacagagtatactaaagtgaattatttgttacaaagaaaagagatgccagccaggtattttaagattctgctgctgtttagagaaattgtgaaacaagcaaaacaaaactttccagccattttactgcagcagtctgtgaactaaatttgtaaatatggctgcaccatttttgtaggcctgcattgtattatatacaagacgtaggctttaaaatcctgtgggacaaatttactgtaccttactattcctgacaagacttggaaaagcaggagagatattctgcatcagtttgcagttcactgcaaatcttttacattaaggcaaagattgaaaacatgcttaaccactagcaatcaagccacaggccttatttcatatgtttcctcaactgtacaatgaactattctcatgaaaaatggctaaagaaattatattttgttctattgctagggtaaaataaatacatttgtgtccaactgaaatataattgtcattaaaataattttaaagagtgaagaaaatattgtgaaaagctcttggttgcacatgttatgaaatgttttttcttacactttgtcatggtaagttctactcattttcacttcttttccactgtatacagtgttctgctttgacaaagttggtctttattacttacatttaaatttcttattgccaaaagaacgtgttttatggggagaaacaaactctttgaagccagttatgtcatgccttgcacaaaagtgatgaaatctagaaaagattgtgtgtcacccctgtttattcttgaacagagggcaaagagggcactgggcacttctcacaaactttctagtgaacaaaaggtgcctattcttttttaaaaaaataaaataaaacataaatattactcttccatattccttctgcctatatttagtaattaatttattttatgataaagttctaatgaaatgtaaattgtttcagcaaaattctgcttttttttcatccctttgtgtaaacctgttaataatgagcccatcactaatatccagtgtaaagtttaacacggtttgacagtaaataaatgtgaattttttcaagtagttaacatgtg

SEQ ID NO: 1604 - protein, 82 aa, Homo sapiens; identical to SEQ ID NO: 1602

SEQ ID NO: 1605 - DNA, 2609 bp, Homo sapiens
gtataagaagaatgtggaatgatactgtgagaaaacaatcagaatcttcttttatctcaggtgacatcaatagcacttcaacacttaatcaaggaatgactggcaattacctactaacaaaccctcttcttcgaccccacggcactaacaacccctataacacattgctcgctgaaacagttgtatgtaatgccccttcagctcctgtatttaactcaccagctactcttaggccagatagcctgagcagacagacatgatgacattcactgaacaatgccagggatacaagtgccatggatactctaccgctaaatggtaattttaacaacagctactcgctgcacaagggtgactataatgacagcgtgcaagttgtggactgtggactaagtctgaatgatactgcttttgagaaaatgatcatttcagaattagtgcacaacaacttacggggcagcagcaagactcacaacctcgagctcacgctaccagtcaaacctgtgattggaggtagcagcagtgaagatgatgctattgtggcagatgcttcatctttaatgcacagcgacaacccagggctggagctccatcacaaagaactcgaggcaccacttattcctcagcggactcactcccttctgtaccaaccccagaagaaagtgaagtccgagggaactgacagctatgtctcccaactgacagcagaggctgaagatcacctacagtcccccaacagagactctctttatacaagcatgcccaatcttagagactctccctatccggagagcagccctgacatggaagaagacctctctccctccaggaggagtgagaatgaggacatttactataaaagcatgccaaatcttggagctggccatcagcttcagatgtgctaccagatcagcaggggcaatagtgatggttatataatccccattaacaaagaagggtgtattccagaaggagatgttagagaaggacaaatgcagctggttacaagtctttaatcatacagctaaggaattccaagggccacatgcgagtattaataaataaagacaccattggcctgacgcagctccctcaaactctgcttgaagagatgactcttgacctgtggttctctggtgtaaaaaagatgactgaaccttgcagttctgtgaatttttataaaacatacaaaaactttgtatatacacagagtatactaaagtgaattatttgttacaaagaaaagagatgccagccaggtattttaagattctgctgctgtttagagaaattgtgaaacaagcaaaacaaaactttccagccattttactgcagcagtctgtgaactaaatttgtaaatatggctgcaccatttttgtaggcctgcattgtattatatacaagacgtaggctttaaaatcctgtgggacaaatttactgtaccttactattcctgacaagacttggaaaagcaggagagatattctgcatcagtttgcagttcactgcaaatcttttacattaaggcaaagattgaaaacatgcttaaccactagcaatcaagccacaggccttatttcatatgtttcctcaactgtacaatgaactattctcatgaaaaatggctaaagaaattatattttgttctattgctagggtaaaataaatacatttgtgtccaactgaaatataattgtcattaaaataattttaaagagtgaagaaaatattgtgaaaagctcttggttgcacatgttatgaaatgttttttcttacactttgtcatggtaagttctactcattttcacttcttttccactgtatacagtgttctgctttgacaaagttggtctttattacttacatttaaatttcttattgccaaaagaacgtgttttatggggagaaacaaactctttgaagccagttatgtcatgccttgcacaaaagtgatgaaatctagaaaagattgtgtgtcacccctgtttattcttgaacagagggcaaagagggcactgggcacttctcacaaactttctagtgaacaaaaggtgcctattcttttttaaaaaaataaaataaaacataaatattactcttccatattccttctgcctatatttagtaattaatttattttatgataaagttctaatgaaatgtaaattgtttcagcaaaattctgcttttttttcatccctttgtgtaaacctgttaataatgagcccatcactaatatccagtgtaaagtttaacacggtttgacagtaaataaatgtgaattttttcaagtagttaacatgtgaacttttatgtatgatacataattggctttaacatgttggtccattcccaccttggtttaagtaacgtcataccaaagtccatggatatatgaaaggatacaattaagttgcctgtttgttctttatgctgaaaggaatatatgtcttccaattgcccactacatatgcacaaaatctgctggataagttttaagagggatatattctgaaagcatttttgtttgttgcattgtaccaggactaaaaaaagaaggattggaagttctgccatcaaatttgggtatcataaaaagtttttaactg

SEQ ID NO: 1606 - protein, 82 aa, Homo sapiens; identical to SEQ ID NO: 1602

SEQ ID NO: 1607 - DNA, 1542 bp, Homo sapiens
aattacctactaacaaaccctcttcttcgaccccacggcactaacaacccctataacacattgctcgctgaaacagttgtatgtaatgccccttcagctcctgtatttaactcaccaggacattcactgaacaatgccagggatacaagtgccatggatactctaccgctaaatggtaattttaacaacagctactcgctgcacaagggtgactataatgacagcgtgcaagttgtggactgtggactaagtctgaatgatactgcttttgagaaaatgatcatttcagaattagtgcacaacaacttacggggcagcagcaagactcacaacctcgagctcacgctaccagtcaaacctgtgattggaggtagcagcagtgaagatgatgctattgtggcagatgcttcatctttaatgcacagcgacaacccagggctggagctccatcacaaagaactcgaggcaccacttattcctcagcggactcactcccttctgtaccaaccccagaagaaagtgaagtccgagggaactgacagctatgtctcccaactgacagcagaggctgaagatcacctacagtcccccaacagagactctctttatacaagcatgcccaatcttagagactctccctatccggagagcagccctgacatggaagaagacctctctccctccaggaggagtgagaatgaggacatttactataaaagcatgccaaatcttggagctggccatcagcttcagatgtgctaccagatcagcaggggcaatagtgatggttatataatccccattaacaaagaagggtgtattccagaaggagatgttagagaaggacaaatgcagctggttacaagtctttaatcatacagctaaggaattccaagggccacatgcgagtattaataaataaagacaccattggcctgacgcagctccctcaaactctgcttgaagagatgactcttgacctgtggttctctggtgtaaaaaagatgactgaaccttgcagttctgtgaatttttataaaacatacaaaaactttgtatatacacagagtatactaaagtgaattatttgttacaaagaaaagagatgccagccaggtattttaagattctgctgctgtttagagaaattgtgaaacaagcaaaacaaaactttccagccattttactgcagcagtctgtgaactaaatttgtaaatatggctgcaccatttttgtaggcctgcattgtattatatacaagacgtaggctttaaaatcctgtgggacaaatttactgtaccttactattcctgacaagacttggaaaagcaggagagatattctgcatcagtttgcagttcactgcaaatcttttacattaaggcaaagattgaaaacatgcttaaccactagcaatcaagccacaggccttatttcatatgtttcctcaactgtacaatgaactattctcatgaaaaatggctaaagaaattatattttgttctattgctagggtaaaataaatacatttgtgtccaactg

SEQ ID NO: 1608 - protein, 239 aa, Homo sapiens [sequence omitted]

SEQ ID NO: 1609 - DNA, 1459 bp, Homo sapiens
cagtgaacctctacagaggaaacaaatgctagcaagacattcactgaacaatgccagggatacaagtgccatggatactctaccgctaaatggtaattttaacaacagctactcgctgcacaagggtgactataatgacagcgtgcaagttgtggactgtggactaagtctgaatgatactgcttttgagaaaatgatcatttcagaattagtgcacaacaacttacggggcagcagcaagactcacaacctcgagctcacgctaccagtcaaacctgtgattggaggtagcagcagtgaagatgatgctattgtggcagatgcttcatctttaatgcacagcgacaacccagggctggagctccatcacaaagaactcgaggcaccacttattcctcagcggactcactcccttctgtaccaaccccagaagaaagtgaagtccgagggaactgacagctatgtctcccaactgacagcagaggctgaagatcacctacagtcccccaacagagactctctttatacaagcatgcccaatcttagagactctccctatccggagagcagccctgacatggaagaagacctctctccctccaggaggagtgagaatgaggacatttactataaaagcatgccaaatcttggagctggccatcagcttcagatgtgctaccagatcagcaggggcaatagtgatggttatataatccccattaacaaagaagggtgtattccagaaggagatgttagagaaggacaaatgcagctggttacaagtctttaatcatacagctaaggaattccaagggccacatgcgagtattaataaataaagacaccattggcctgacgcagctccctcaaactctgcttgaagagatgactcttgacctgtggttctctggtgtaaaaaagatgactgaaccttgcagttctgtgaatttttataaaacatacaaaaactttgtatatacacagagtatactaaagtgaattatttgttacaaagaaaagagatgccagccaggtattttaagattctgctgctgtttagagaaattgtgaaacaagcaaaacaaaactttccagccattttactgcagcagtctgtgaactaaatttgtaaatatggctgcaccatttttgtaggcctgcattgtattatatacaagacgtaggctttaaaatcctgtgggacaaatttactgtaccttactattcctgacaagacttggaaaagcaggagagatattctgcatcagtttgcagttcactgcaaatcttttacattaaggcaaagattgaaaacatgcttaaccactagcaatcaagccacaggccttatttcatatgtttcctcaactgtacaatgaactattctcatgaaaaatggctaaagaaattatattttgttctattgctagggtaaaataaatacatttgtgtccaactg

SEQ ID NO: 1610 - protein, 254 aa, Homo sapiens [sequence omitted]

SEQ ID NO: 1611 - DNA, 2079 bp, Homo sapiens
cagtgaacctctacagaggaaacaaatgctagcaagacattcactgaacaatgccagggatacaagtgccatggatactctaccgctaaatggtaattttaacaacagctactcgctgcacaagggtgactataatgacagcgtgcaagttgtggactgtggactaagtctgaatgatactgcttttgagaaaatgatcatttcagaattagtgcacaacaacttacggggcagcagcaagactcacaacctcgagctcacgctaccagtcaaacctgtgattggaggtagcagcagtgaagatgatgctattgtggcagatgcttcatctttaatgcacagcgacaacccagggctggagctccatcacaaagaactcgaggcaccacttattcctcagcggactcactcccttctgtaccaaccccagaagaaagtgaagtccgagggaactgacagctatgtctcccaactgacagcagaggctgaagatcacctacagtcccccaacagagactctctttatacaagcatgcccaatcttagagactctccctatccggagagcagccctgacatggaagaagacctctctccctccaggaggagtgagaatgaggacatttactataaaagcatgccaaatcttggagctggccatcagcttcagatgtgctaccagatcagcaggggcaatagtgatggttatataatccccattaacaaagaagggtgtattccagaaggagatgttagagaaggacaaatgcagctggttacaagtctttaatcatacagctaaggaattccaagggccacatgcgagtattaataaataaagacaccattggcctgacgcagctccctcaaactctgcttgaagagatgactcttgacctgtggttctctggtgtaaaaaagatgactgaaccttgcagttctgtgaatttttataaaacatacaaaaactttgtatatacacagagtatactaaagtgaattatttgttacaaagaaaagagatgccagccaggtattttaagattctgctgctgtttagagaaattgtgaaacaagcaaaacaaaactttccagccattttactgcagcagtctgtgaactaaatttgtaaatatggctgcaccatttttgtaggcctgcattgtattatatacaagacgtaggctttaaaatcctgtgggacaaatttactgtaccttactattcctgacaagacttggaaaagcaggagagatattctgcatcagtttgcagttcactgcaaatcttttacattaaggcaaagattgaaaacatgcttaaccactagcaatcaagccacaggccttatttcatatgtttcctcaactgtacaatgaactattctcatgaaaaatggctaaagaaattatattttgttctattgctagggtaaaataaatacatttgtgtccaactgaaatataattgtcattaaaataattttaaagagtgaagaaaatattgtgaaaagctcttggttgcacatgttatgaaatgttttttcttacactttgtcatggtaagttctactcattttcacttcttttccactgtatacagtgttctgctttgacaaagttggtctttattacttacatttaaatttcttattgccaaaagaacgtgttttatggggagaaacaaactctttgaagccagttatgtcatgccttgcacaaaagtgatgaaatctagaaaagattgtgtgtcacccctgtttattcttgaacagagggcaaagagggcactgggcacttctcacaaactttctagtgaacaaaaggtgcctattcttttttaaaaaaataaaataaaacataaatattactcttccatattccttctgcctatatttagtaattaatttattttatgataaagttctaatgaaatgtaaattgtttcagcaaaattctgcttttttttcatccctttgtgtaaacctgttaataatgagcccatcactaatatccagtgtaaagtttaacacggtttgacagtaaataaatgtgaattttttcaagtagttaacatgtg

SEQ ID NO: 1612 - protein, 254 aa, Homo sapiens [sequence omitted]

SEQ ID NO: 1613 - DNA, 2383 bp, Homo sapiens
cagtgaacctctacagaggaaacaaatgctagcaagacattcactgaacaatgccagggatacaagtgccatggatactctaccgctaaatggtaattttaacaacagctactcgctgcacaagggtgactataatgacagcgtgcaagttgtggactgtggactaagtctgaatgatactgcttttgagaaaatgatcatttcagaattagtgcacaacaacttacggggcagcagcaagactcacaacctcgagctcacgctaccagtcaaacctgtgattggaggtagcagcagtgaagatgatgctattgtggcagatgcttcatctttaatgcacagcgacaacccagggctggagctccatcacaaagaactcgaggcaccacttattcctcagcggactcactcccttctgtaccaaccccagaagaaagtgaagtccgagggaactgacagctatgtctcccaactgacagcagaggctgaagatcacctacagtcccccaacagagactctctttatacaagcatgcccaatcttagagactctccctatccggagagcagccctgacatggaagaagacctctctccctccaggaggagtgagaatgaggacatttactataaaagcatgccaaatcttggagctggccatcagcttcagatgtgctaccagatcagcaggggcaatagtgatggttatataatccccattaacaaagaagggtgtattccagaaggagatgttagagaaggacaaatgcagctggttacaagtctttaatcatacagctaaggaattccaagggccacatgcgagtattaataaataaagacaccattggcctgacgcagctccctcaaactctgcttgaagagatgactcttgacctgtggttctctggtgtaaaaaagatgactgaaccttgcagttctgtgaatttttataaaacatacaaaaactttgtatatacacagagtatactaaagtgaattatttgttacaaagaaaagagatgccagccaggtattttaagattctgctgctgtttagagaaattgtgaaacaagcaaaacaaaactttccagccattttactgcagcagtctgtgaactaaatttgtaaatatggctgcaccatttttgtaggcctgcattgtattatatacaagacgtaggctttaaaatcctgtgggacaaatttactgtaccttactattcctgacaagacttggaaaagcaggagagatattctgcatcagtttgcagttcactgcaaatcttttacattaaggcaaagattgaaaacatgcttaaccactagcaatcaagccacaggccttatttcatatgtttcctcaactgtacaatgaactattctcatgaaaaatggctaaagaaattatattttgttctattgctagggtaaaataaatacatttgtgtccaactgaaatataattgtcattaaaataattttaaagagtgaagaaaatattgtgaaaagctcttggttgcacatgttatgaaatgttttttcttacactttgtcatggtaagttctactcattttcacttcttttccactgtatacagtgttctgctttgacaaagttggtctttattacttacatttaaatttcttattgccaaaagaacgtgttttatggggagaaacaaactctttgaagccagttatgtcatgccttgcacaaaagtgatgaaatctagaaaagattgtgtgtcacccctgtttattcttgaacagagggcaaagagggcactgggcacttctcacaaactttctagtgaacaaaaggtgcctattcttttttaaaaaaataaaataaaacataaatattactcttccatattccttctgcctatatttagtaattaatttattttatgataaagttctaatgaaatgtaaattgtttcagcaaaattctgcttttttttcatccctttgtgtaaacctgttaataatgagcccatcactaatatccagtgtaaagtttaacacggtttgacagtaaataaatgtgaattttttcaagtagttaacatgtgaacttttatgtatgatacataattggctttaacatgttggtccattcccaccttggtttaagtaacgtcataccaaagtccatggatatatgaaaggatacaattaagttgcctgtttgttctttatgctgaaaggaatatatgtcttccaattgcccactacatatgcacaaaatctgctggataagttttaagagggatatattctgaaagcatttttgtttgttgcattgtaccaggactaaaaaaagaaggattggaagttctgccatcaaatttgggtatcataaaaagtttttaactg

SEQ ID NO: 1614 - protein, 254 aa, Homo sapiens [sequence omitted]

SEQ ID NO: 1615 - DNA, 1218 bp, Homo sapiens
agaaatagatgttttctgtttgtatcataagcatttatagaaaattattctaaagcttaatggtttgctataattctcaaatactaccactagcttataaatcacttttatgtggacacacacatgcctattgaatttaaaaaggaatgagatttaaaaattaagtgcatatatataatatacatatatatatatatatatatatatatatattttttttttttttttttttgtgacagagtgagactccatctcctaacagtaaaaaaaaaggaaagataccacatttttaaccaaaatgtactttatacatattactgatgccttatacaacgtatgggaccaatgggaactcctggaagttatccaagttcatttcaaggcactatggccactgagttttcaaggccagcataacatatctctgtcagagggcattaataagctgtaagtgcaccgtgtaattaggctaattaaatgtactacaagcatttttcaaatattagcaatagaccactcctcagctcttaataagtcttctctggagtcttccttttcctgatggcattacttttactgagtgttcagtttctcagaagccttcagaagctagtttgatttttaaatcctgttgtttttactagtgaaaatgttctgaattaaaacattgtgaaatgctgttaggtatactggcatttaacattatggatcacaatgaaataagaaacaacaaaaacaggtaacaatacagttgagctcaccaaaaccttacctgctgtggggaaagaatactgccccatgaatctttcacacgtttctctattatacacttatcaaagctgtaagaccaaaatctcttagaaatctttaaaaggcacagttaagcaagccaatgttgtgtgggcataagagactagtgatgaatgatcaattgatgaatagttttctaaatgtgtttttcgcaagcatttttaaatcacatgttagacgtaagcttttttaaaagcattgtggaaatcacagcaacatggctttcttgtttgattttattaggcaaaaacgatggatggtttgatattctcttagaaaggctgacagctactatatagaaccactcaggaacaataatgataggtatcaacgatactgattagatgaaaaattcatttatgtttttctgctgaatatcaatcttaataaatagatggcttttaaacc

SEQ ID NO: 1616 - protein, 52 aa, Homo sapiens [sequence omitted]

SEQ ID NO: 1617 - DNA, 1673 bp, Homo sapiens
actttgcttctcaaaaaaatatgtattttatttacagtttcgacttcacagatactcaattattaatcagtatttttaggtgaaacagaaaaccataagagaaaccctaggtatccaaaaataggagattaatactgcttaaaattttcctatttcaacttaacaaaataaatatctttcttcaataaggtgttgttcaaagtgttttaatagccatcatcctgaattttttttagttggttattttccaatacaggcaacataacttctttaaatttaaccaggaatttaaaacttccattttaacaatataacattttcttggtgtctttctgtgtaagagtagtaacatttataccttctcgttgcttgtggttgttctaacaataaattatatggatttctttggaagttgattgtgaagaaaatgactaagaaaacttttttttttcttttaggttgatggaaatcacaatcttctgacaaagctttctctggaagaggaaaactgtcttattcagctgaagtgtgaaaaccttcaacaaaaattagaacagatggacgcagaaaataaagagcttgagaagaagctggcaaaccaagaagaatgtcttaagcacagcaatcttaagtttaaagagaaatctgcagagtatacagcattggccagacaactggaagctgctttagaagaaggaagacaaaaggttgctgaagaaatagagaaaatgtcatctagagagagtgctttacaaattaaaatattagatctggaaactgagcttagaaagaaaaatgaagaacaaaatcaacttgtttgcaaaatgaacagtaaagcacaacatcaggaagtgtgtttgaaagaagtacaaaatagtcttgagaagtcggaaaatcaaaatgagagtattaagaattatttacagtttcttaaaacttcttatgtaacaatgtttgaataaattgtcaaatttattttctctaagtagtagatttttattatgagtctaaaatgtgattgggtaaaaaaataaatatactaccagttacattttatgatttatgagtggtagtattagaggtttttatgtaaagatttttgaaacataatttatctaactgaaactttaaaataggatagttgttactattcctgtttgctggataattcttatttatctttggtttaatttcttttaaaattaaattggttgttagaatatttttctcacacatagacatggaagtcagattcattctttgtgatgtttgtagccaccattcaagtgaatttgtagtaagtcttggtcaatatgattttaaataatatatataattgttttatattatgatatataaatgtaaaatattctgaattttaatttttaataatggtgtaattacatactttctaaagctactaaatgtctcaatatactacacttaatattgtttcaagtatatgctgagttgccattataatttctgttaggttttaagtatacaattttaaatcatcgctattaagtaccaactgctaatgacagatgaaaacgtggtcatgcattatttctttataaagaatagatattcaggctgtcttcaatttgtactctcttttattcgttttatactaatgattatctgatattattattattttagacattcta

SEQ ID NO: 1618 - protein, 134 aa, Homo sapiens [sequence omitted]

SEQ ID NO: 1619 - DNA, 3097 bp, Homo sapiens
atggcgtcagaagctcagggaggctctgtgactgtcagctataggcgctgcccgccgtccctaacccggaccaatcggcagcctgctgcgggcctgacgggagggccgactcagagcacaagaaggattgccacggtttccattgcagcagccgtggcgcctctgaccctttttttatatcgcggcgacggcgggctgtcgtcacgacgacgtgcggacgcagcggcgggggcctttcagcttatgtggagaagtcgctgtgaagccacctataaatccatttactgaatttatggagaaggctgtaaatgatggaagtcattcagaagaactcttttgccatcttaaaactatatcagagaaagaagatttaccacggtgtaccagtgaaagtcatctcagctgcctgaagcaggacattctaaatgaaaagactgaattggaagcaacacttaaggaagcggagttggtaactcattctgtagaattgcttttgccactatttaaggacaccattgaaaagattaattttgaaaatgcgaatctttctgcattgaatttgaagatttctgaacagaaggaaatattaataaaagaattagacaccttcaaaagtgtaaaactagctttagaacatcttcttagaaagagagactacaaacaaacaggagacaatttatccagcatgttgctagaaaatctaactgataatgaaagtgaaaatactaatcttaagaagaaggtatttgaaaaggaggcccatatccaagaactttcttgtttgtttcagagtgaaaaggcaaatactttgaaagcaaaccgtttttcccaatcagtaaaagtagtacatgaacgactacagatccaaattcataaaagggaagccgagaacgataagttgaaagaatatgtaaagagcttagaaaccaagatagccaagtggaacctgcaatcaagaatgaataagaatgaggctatagtgatgaaagaagcaagtaggcaaaaaactgtagctttaaaaaaggcatctaaagtttacaaacaaaggcttgaccattttacaggagctattgaaaagcttacttcccaaattagagatcaggaagccaagttgtctgaaacaatttcagcttccaatgcctggaaaagtcattatgagaaaattgtgatagaaaaaaccgaattggaagtacagattgaaacaatgaaaaagcaaatcattaatcttttggaagatctgaagaaaatggaagaccatggaaaaaattcatgtgaagaaattcttagaaaagttcactcaattgaatatgaaaatgaaactctgaatcttgagaatacaaaattaaaggtactatgtggaaagactcgattggtttcaaatgcaggacttgaaattgccagtcctgttggctgtggtcattcagaattcccatgtagaattactgagtcaaagaatatgaacattttgattgttcttgatatgctttgctacatttcttctgaaaagactacacttgctgctttgaaggatgaagttgtatctgttgaaaatgaactctcagaattgcaagaagtagaaaaaaaacagaaaacccttattgaaatgtataaaactcaggtacaaaagttgcaagaagcagctgaaatagtaaaaagcagatgtgaaaatttgctacataaaaataaccaaataacaaaaaccaaaaataaaaatgtagagaagatgagaggccagatggagtctcatctgaaggagttagagcgtgtctgcgattccttgacggcggcggaacggaggcttcacgagtgtcaggagagtctgcagtgctgcaaggggaagtgtgcagaccaggaacacaccattagggagcttcagggccaggttgatggaaatcacaatcttctgacaaagctttctctggaagaggaaaactgtcttattcagctgaagtgtgaaaaccttcaacaaaaattagaacagatggacgcagaaaataaagagcttgagaagaagctggcaaaccaagaagaatgtcttaagcacagcaatcttaagtttaaagagaaatctgcagagtatacagcattggccagacaactggaagctgctttagaagaaggaagacaaaaggttgctgaagaaatagagaaaatgtcatctagagagagtgctttacaaattaaaatattagatctggaaactgagcttagaaagaaaaatgaagaacaaaatcaacttgtttgcaaaatgaacagtaaagcacaacatcaggaagtgtgtttgaaagaagtacaaaatagtcttgagaagtcggaaaatcaaaatgagagtattaagaattatttacagtttcttaaaacttcttatgtaacaatgtttgaataaattgtcaaatttattttctctaagtagtagatttttattatgagtctaaaatgtgattgggtaaaaaaataaatatactaccagttacattttatgatttatgagtggtagtattagaggtttttatgtaaagatttttgaaacataatttatctaactgaaactttaaaataggatagttgttactattcctgtttgctggataattcttatttatctttggtttaatttcttttaaaattaaattggttgttagaatatttttctcacacatagacatggaagtcagattcattctttgtgatgtttgtagccaccattcaagtgaatttgtagtaagtcttggtcaatatgattttaaataatatatataattgttttatattatgatatataaatgtaaaatattctgaattttaatttttaataatggtgtaattacatactttctaaagctactaaatgtctcaatatactacacttaatattgtttcaagtatatgctgagttgccattataatttctgttaggttttaagtatacaattttaaatcatcgctattaagtaccaactgctaatgacagatgaaaacgtggtcatgcattatttctttataaagaatagatattcaggctgtcttcaatttgtactctcttttattcgttttatactaatgattatctgatattattattattttagacattcta

SEQ ID NO: 1620 - protein, 697 aa, Homo sapiens
MEKAVNDGSHSEELFCHLKTISEKEDLPRCTSESHLSCLKQDILNEKTELEATLKEAELVTHSVELLLPLFKDTIEKINFENANLSALNLKISEQKEILIKELDTFKSVKLALEHLLRKRDYKQTGDNLSSMLLENLTDNESENTNLKKKVFEKEAHIQELSCLFQSEKANTLKANRFSQSVKVVHERLQIQIHKREAENDKLKEYVKSLETKIAKWNLQSRMNKNEAIVMKEASRQKTVALKKASKVYKQRLDHFTGAIEKLTSQIRDQEAKLSETISASNAWKSHYEKIVIEKTELEVQIETMKKQIINLLEDLKKMEDHGKNSCEEILRKVHSIEYENETLNLENTKLKVLCGKTRLVSNAGLEIASPVGCGHSEFPCRITESKNMNILIVLDMLCYISSEKTTLAALKDEVVSVENELSELQEVEKKQKTLIEMYKTQVQKLQEAAEIVKSRCENLLHKNNQITKTKNKNVEKMRGQMESHLKELERVCDSLTAAERRLHECQESLQCCKGKCADQEHTIRELQGQVDGNHNLLTKLSLEEENCLIQLKCENLQQKLEQMDAENKELEKKLANQEECLKHSNLKFKEKSAEYTALARQLEAALEEGRQKVAEEIEKMSSRESALQIKILDLETELRKKNEEQNQLVCKMNSKAQHQEVCLKEVQNSLEKSENQNESIKNYLQFLKTSYVTMFE

SEQ ID NO: 1621 - DNA, 983 bp, Homo sapiens
actttgcttctcaaaaaaatatgtattttatttacagtttcgacttcacagatactcaattattaatcagtatttttaggtgaaacagaaaaccataagagaaaccctaggtatccaaaaataggagattaatactgcttaaaattttcctatttcaacttaacaaaataaatatctttcttcaataaggtgttgttcaaagtgttttaatagccatcatcctgaattttttttagttggttattttccaatacaggcaacataacttctttaaatttaaccaggaatttaaaacttccattttaacaatataacattttcttggtgtctttctgtgtaagagtagtaacatttataccttctcgttgcttgtggttgttctaacaataaattatatggatttctttggaagttgattgtgaagaaaatgactaagaaaacttttttttttcttttaggttgatggaaatcacaatcttctgacaaagctttctctggaagaggaaaactgtcttattcagctgaagtgtgaaaaccttcaacaaaaattagaacagatggacgcagaaaataaagagcttgagaagaagctggcaaaccaagaagaatgtcttaagcacagcaatcttaagtttaaagagaaatctgcagagtatacagcattggccagacaactggaagctgctttagaagaaggaagacaaaaggttgctgaagaaatagagaaaatgtcatctagagagagtgctttacaaattaaaatattagatctggaaactgagcttagaaagaaaaatgaagaacaaaatcaacttgtttgcaaaatgaacagtaaagcacaacatcaggaagtgtgtttgaaagaagtacaaaatagtcttgagaagtcggaaaatcaaaatgagagtattaagaattatttacagtttcttaaaacttcttatgtaacaatgtttgaataaattgtcaaatttattttctct

SEQ ID NO: 1622 - protein, 134 aa, Homo sapiens [sequence omitted]

SEQ ID NO: 1623 - DNA, 2407 bp, Homo sapiens
atggcgtcagaagctcagggaggctctgtgactgtcagctataggcgctgcccgccgtccctaacccggaccaatcggcagcctgctgcgggcctgacgggagggccgactcagagcacaagaaggattgccacggtttccattgcagcagccgtggcgcctctgaccctttttttatatcgcggcgacggcgggctgtcgtcacgacgacgtgcggacgcagcggcgggggcctttcagcttatgtggagaagtcgctgtgaagccacctataaatccatttactgaatttatggagaaggctgtaaatgatggaagtcattcagaagaactcttttgccatcttaaaactatatcagagaaagaagatttaccacggtgtaccagtgaaagtcatctcagctgcctgaagcaggacattctaaatgaaaagactgaattggaagcaacacttaaggaagcggagttggtaactcattctgtagaattgcttttgccactatttaaggacaccattgaaaagattaattttgaaaatgcgaatctttctgcattgaatttgaagatttctgaacagaaggaaatattaataaaagaattagacaccttcaaaagtgtaaaactagctttagaacatcttcttagaaagagagactacaaacaaacaggagacaatttatccagcatgttgctagaaaatctaactgataatgaaagtgaaaatactaatcttaagaagaaggtatttgaaaaggaggcccatatccaagaactttcttgtttgtttcagagtgaaaaggcaaatactttgaaagcaaaccgtttttcccaatcagtaaaagtagtacatgaacgactacagatccaaattcataaaagggaagccgagaacgataagttgaaagaatatgtaaagagcttagaaaccaagatagccaagtggaacctgcaatcaagaatgaataagaatgaggctatagtgatgaaagaagcaagtaggcaaaaaactgtagctttaaaaaaggcatctaaagtttacaaacaaaggcttgaccattttacaggagctattgaaaagcttacttcccaaattagagatcaggaagccaagttgtctgaaacaatttcagcttccaatgcctggaaaagtcattatgagaaaattgtgatagaaaaaaccgaattggaagtacagattgaaacaatgaaaaagcaaatcattaatcttttggaagatctgaagaaaatggaagaccatggaaaaaattcatgtgaagaaattcttagaaaagttcactcaattgaatatgaaaatgaaactctgaatcttgagaatacaaaattaaaggtactatgtggaaagactcgattggtttcaaatgcaggacttgaaattgccagtcctgttggctgtggtcattcagaattcccatgtagaattactgagtcaaagaatatgaacattttgattgttcttgatatgctttgctacatttcttctgaaaagactacacttgctgctttgaaggatgaagttgtatctgttgaaaatgaactctcagaattgcaagaagtagaaaaaaaacagaaaacccttattgaaatgtataaaactcaggtacaaaagttgcaagaagcagctgaaatagtaaaaagcagatgtgaaaatttgctacataaaaataaccaaataacaaaaaccaaaaataaaaatgtagagaagatgagaggccagatggagtctcatctgaaggagttagagcgtgtctgcgattccttgacggcggcggaacggaggcttcacgagtgtcaggagagtctgcagtgctgcaaggggaagtgtgcagaccaggaacacaccattagggagcttcagggccaggttgatggaaatcacaatcttctgacaaagctttctctggaagaggaaaactgtcttattcagctgaagtgtgaaaaccttcaacaaaaattagaacagatggacgcagaaaataaagagcttgagaagaagctggcaaaccaagaagaatgtcttaagcacagcaatcttaagtttaaagagaaatctgcagagtatacagcattggccagacaactggaagctgctttagaagaaggaagacaaaaggttgctgaagaaatagagaaaatgtcatctagagagagtgctttacaaattaaaatattagatctggaaactgagcttagaaagaaaaatgaagaacaaaatcaacttgtttgcaaaatgaacagtaaagcacaacatcaggaagtgtgtttgaaagaagtacaaaatagtcttgagaagtcggaaaatcaaaatgagagtattaagaattatttacagtttcttaaaacttcttatgtaacaatgtttgaataaattgtcaaatttattttctct

SEQ ID NO: 1624 - protein, 697 aa, Homo sapiens; identical to SEQ ID NO: 1620

SEQ ID NO: 1625 - DNA, 1621 bp, Homo sapiens
ggggtggggccgccgttgccagagaagccactagccggttactagctgcgcttttgttccacttgagcgggcactcttctgcggcaagcaggtctaggaattcgcctggttcccacctcgcgtcccttgccttccttcctagtctacccactgtagtgccccctgcgtcccgctccctcctagccgactcagagcacaagaaggattgccacggtttccattgcagcagccgtggcgcctctgaccctttttttatatcgcggcgacggcgggctgtcgtcacgacgacgtgcggacgcagcggcgggggcctttcagcttatgtggagaagtcgctgtgaagccacctataaatccatttactgaatttatggagaaggctgtaaatgatggaagtcattcagaagaactcttttgccatcttaaaactatatcagagaaagaagatttaccacggtgtaccagtgaaagtcatctcagctgcctgaagcaggacattctaaatgaaaagactgaattggaagcaacacttaaggaagcggagttggtaactcattctgtagaattgcttttgccactatttaaggacaccattgaaaagattaattttgaaaatgcgaatctttctgcattgaatttgaagatttctgaacagaaggaaatattaataaaagaattagacaccttcaaaagtgtaaaactagctttagaacatcttcttagaaagagagactacaaacaaacaggagacaatttatccagcatgttgctagaaaatctaactgataatgaaagtgaaaatactaatcttaagaagaaggtatttgaaaaggaggcccatatccaagaactttcttgtttgtttcagagtgaaaaggcaaatactttgaaagcaaaccgtttttcccaatcagtaaaagtagtacatgaacgactacagatccaaattcataaaagggaagccgagaacgataagttgaaagaatatgtaaagagcttagaaaccaagatagccaagtggaacctgcaatcaagaatgaataagaatgaggctatagtgatgaaagaagcaagtaggcaaaaaactgtagctttaaaaaaggcatctaaagtttacaaacaaaggcttgaccattttacaggagctattgaaaagcttacttcccaaattagagatcaggaagccaagttgtctgaaacaatttcagcttccaatgcctggaaaagtcattatgagaaaattgtgatagaaaaaaccgaattggaagtacagattgaaacaatgaaaaagcaaatcattaatcttttggaagatctgaagaaaatggaagaccatggaaaaaattcatgtgaagaaattcttagaaaagttcactcaattgaatatgaaaatgaaactctgaatcttgagaatacaaaattaaagactacacttgctgctttgaaggatgaagttgtatctgttgaaaatgaactctcagaattgcaagaagtagaaaaaaaacagaaaacccttattgaaatgtataaaactcaggtacaaaagttgcaagaagcagctgaaatagtaaaaagcagatgtgaaaatttgctacataaaaataaccaaataacaaaaacc

SEQ ID NO: 1626 - protein, 416 aa, Homo sapiens
MEKAVNDGSHSEELFCHLKTISEKEDLPRCTSESHLSCLKQDILNEKTELEATLKEAELVTHSVELLLPLFKDTIEKINFENANLSALNLKISEQKEILIKELDTFKSVKLALEHLLRKRDYKQTGDNLSSMLLENLTDNESENTNLKKKVFEKEAHIQELSCLFQSEKANTLKANRFSQSVKVVHERLQIQIHKREAENDKLKEYVKSLETKIAKWNLQSRMNKNEAIVMKEASRQKTVALKKASKVYKQRLDHFTGAIEKLTSQIRDQEAKLSETISASNAWKSHYEKIVIEKTELEVQIETMKKQIINLLEDLKKMEDHGKNSCEEILRKVHSIEYENETLNLENTKLKTTLAALKDEVVSVENELSELQEVEKKQKTLIEMYKTQVQKLQEAAEIVKSRCENLLHKNNQITK

SEQ ID NO: 1627 - DNA, 485 bp, Homo sapiens
ggggtggggccgccgttgccagagaagccactagccggttactagctgcgcttttgttccacttgagcgggcactcttctgcggcaagcaggtctaggaattcgcctggttcccacctcgcgtcccttgccttccttcctagtctacccactgtagtgccccctgcgtcccgctccctcctagccgactcagagcacaagaaggattgccacggtttccattgcagcagccgtggcgcctctgaccctttttttatatcgcggcgacggcgggctgtcgtcacgacgacgtgcggacgcagcggcgggggcctttcagcttatgtggagaagtcgctgtgaagccacctataaatccatttactgaatttatggagaaggctgtaaatgatggaagtcattcagaagaatttttaggaagccaagttgtctgaaacaatttcagcttccaatgcctggaaaagtcattatgagaaaattgtgata

SEQ ID NO: 1628 - protein, 112 aa, Homo sapiens
GGAAVAREATSRLLAALLFHLSGHSSAASRSRNSPGSHLASLAFLPSLPTVVPPASRSLLADSEHKKDCHGFHCSSRGASDPFFISRRRRAVVTTTCGRSGGGLSAYVEKSL

SEQ ID NO: 1629 - DNA, 1247 bp, Homo sapiens
ggggtggggccgccgttgccagagaagccactagccggttactagctgcgcttttgttccacttgagcgggcactcttctgcggcaagcaggtctaggaattcgcctggttcccacctcgcgtcccttgccttccttcctagtctacccactgtagtgccccctgcgtcccgctccctcctagccgactcagagcacaagaaggattgccacggtttccattgcagcagccgtggcgcctctgaccctttttttatatcgcggcgacggcgggctgtcgtcacgacgacgtgcggacgcagcggcggggggcctgtaatcccagcactttgggaggatgaggcaggtggatcacttgaggtcaggagttcaagatcagcctggccaacatggtgaaaccccatctctactgaaaaaatgcaaaaattagccagatgtggtagcgtgtgcctgttgtcccagctacttggaaggctgtggtagaagaatcacttgaacctgggaggcgaaggtcacagtgagccgagataatgccactgcactcctgggtgacagagcctgggtgacagagcgagactccatctcaaaaaagaaaaagacaaaaaaaatgaaaacctcatctgttaagaatttgtaaaataaagctatttaagataaatgaaaatataatatgtgatatcagaaatgtagttaatgaatgtgaaatcactgtcatttggtatattactatatagcaaatacttgtcatacttctttagagtggggaatacacttgttatttacatgaaatattgccccccgtcaaatggcaatcttagtatataccattactgtcagtatggatagcttagtccagcttctggttgaatttgttatgaatgaaaataatattttatcatctataatcacacttgactttctgcccatggtttttaataagggacaggtgtcgtttatagatagaatgttcttaggctcattactttaagccagttgtgcttaagaacacacagatttttgacatagcctctaagatgccatcagttgttaatgagccgttatgttttacaaagaaagagaaaagctgccaattaaagagtttccatatcacttggaattttatttataaatattgaaaatgctccttcaaacttaactatacgtacatctttaatccaaataacttttgtgattacgtacaagtaaaatataagtaaaataaagtattcttaaaatttgcttacactc

SEQ ID NO: 1630 - protein, 60 aa, Homo sapiens [sequence omitted]

SEQ ID NO: 1631 - DNA, 1004 bp, Homo sapiens
ggggtggggccgccgttgccagagaagccactagccggttactagctgcgcttttgttccacttgagcgggcactcttctgcggcaagcaggtctaggaattcgcctggttcccacctcgcgtcccttgccttccttcctagtctacccactgtagtgccccctgcgtcccgctccctcctagccgactcagagcacaagaaggattgccacggtttccattgcagcagccgtggcgcctctgaccctttttttatatcgcggcgacggcgggctgtcgtcacgacgacgtgcggacgcagcggcgggggcctttcagcttatgtggagaagtcgctgtgaagccacctataaatccatttactgaatttatggagaaggctgtaaatgatggaagtcattcagaagaactcttttgccatcttaaaactatatcagagaaagaagatttaccacggtgtaccagtgaaagtcatctcagctggtattctcatcagtatcaggggaaatctaaatttccgattctaggatttcctgttttgtctataatataaattatttgaatcaaatacagcattcttttaagagtatcttttccaaatctagtatttatttattaaaatatatttaatctgattacaagtgtactcatctagcagaattcaactagtttttttgaatcttaatgaaagcaattaaaaatgaaaacctggccgggcgcaatggatcatgcctgtaatcccagcactttgggaggatgaggcaggtggatcacttgaggtcaggagttcaagatcagcctggccaacatggtgaaaccccatctctactgaaaaaatgcaaaaattagccagatgtggtagcgtgtgcctgttgtcccagctacttggaaggctgtggtagaagaatcacttgaacctgggaggcgaaggtcacagtgagccgagataatgccactgcactcctgggtgacagagcctgggtgacagagcgagactccatctc

SEQ ID NO: 1632 - protein, 60 aa, Homo sapiens
MEKAVNDGSHSEELFCHLKTISEKEDLPRCTSESHLSWYSHQYQGKSKFPILGFPVLSII

SEQ ID NO: 1633 - DNA, 310 bp, Homo sapiens
gcgtttaccgcgggagcccttagcggtctggagctttcagcttatgtggagaagtcgctgtgaagccacctataaatccatttactgaatttatggagaaggctgtaaatgatggaagtcattcagaagaactcttttgccatcttaaaactatatcagagaaagaagatttaccacggtgtaccagtgaaagtcatctcagctggtattctcatcagtatcaggggaaatctaaatttccgattctaggatttcctgttttgtctataatataaattatttgaatcaaatacagcattcttttaagagt

SEQ ID NO: 1634 - protein, 60 aa, Homo sapiens; identical to SEQ ID NO: 1632

SEQ ID NO: 1635 - DNA, 588 bp, Homo sapiens
ggggtggggccgccgttgccagagaagccactagccggttactagctgcgcttttgttccacttgagcgggcactcttctgcggcaagcaggtctaggaattcgcctggttcccacctcgcgtcccttgccttccttcctagtctacccactgtagtgccccctgcgtcccgctccctcctagccgactcagagcacaagaaggattgccacggtttccattgcagcagccgtggcgcctctgaccctttttttatatcgcggcgacggcgggctgtcgtcacgacgacgtgcggacgcagcggcgggggcctttcagcttatgtggagaagtcgctgtgaagccacctataaatccatttactgaatttatggagaaggctgtaaatgatggaagtcattcagaagaactcttttgccatcttaaaactatatcagagaaagaagatttaccacggtgtaccagtgaaagtcatctcagctggtattctcatcagtatcaggggaaatctaaatttccgattctaggatttcctgttttgtctataatataaattatttgaatcaaatacagcattcttttaagagt

SEQ ID NO: 1636 - protein, 60 aa, Homo sapiens; identical to SEQ ID NO: 1632

SEQ ID NO: 1637 - DNA, 3955 bp, Homo sapiens
tcccagatggatccaccccagacttttcaaagaagacacctccttcatcttgtgttctaaaaccttgcaagttcaggaagaaaccatctgcatccatattgaaaacctgacacaatgtatgcagcaggctcagtgtgagtgaactggaggcttctctacaacatgacccaaaggagcattgcaggtcctatttgcaacctgaagtttgtgactctcctggttgccttaagttcagaactcccattcctgggagctggagtacagcttcaagacaatgggtataatggattgctcattgcaattaatcctcaggtacctgagaatcagaacctcatctcaaacattaaggaaatgataactgaagcttcattttacctatttaatgctaccaagagaagagtatttttcagaaatataaagattttaatacctgccacatggaaagctaataataacagcaaaataaaacaagaatcatatgaaaaggcaaatgtcatagtgactgactggtatggggcacatggagatgatccatacaccctacaatacagagggtgtggaaaagagggaaaatacattcatttcacacctaatttcctactgaatgataacttaacagctggctacggatcacgaggccgagtgtttgtccatgaatgggcccacctccgttggggtgtgttcgatgagtataacaatgacaaacctttctacataaatgggcaaaatcaaattaaagtgacaaggtgttcatctgacatcacaggcatttttgtgtgtgaaaaaggtccttgcccccaagaaaactgtattattagtaagctttttaaagaaggatgcacctttatctacaatagcacccaaaatgcaactgcatcaataatgttcatgcaaagtttatcttctgtggttgaattttgtaatgcaagtacccacaaccaagaagcaccaaacctacagaaccagatgtgcagcctcagaagtgcatgggatgtaatcacagactctgctgactttcaccacagctttcccatgaatgggactgagcttccacctcctcccacattctcgcttgtacaggctggtgacaaagtggtctgtttagtgctggatgtgtccagcaagatggcagaggctgacagactccttcaactacaacaagccgcagaattttatttgatgcagattgttgaaattcataccttcgtgggcattgccagtttcgacagcaaaggagagatcagagcccagctacaccaaattaacagcaatgatgatcgaaagttgctggtttcatatctgcccaccactgtatcagctaaaacagacatcagcatttgttcagggcttaagaaaggatttgaggtggttgaaaaactgaatggaaaagcttatggctctgtgatgatattagtgaccagcggagatgataagcttcttggcaattgcttacccactgtgctcagcagtggttcaacaattcactccattgccctgggttcatctgcagccccaaatctggaggaattatcacgtcttacaggaggtttaaagttctttgttccagatatatcaaactccaatagcatgattgatgctttcagtagaatttcctctggaactggagacattttccagcaacatattcagcttgaaagtacaggtgaaaatgtcaaacctcaccatcaattgaaaaacacagtgactgtggataatactgtgggcaacgacactatgtttctagttacgtggcaggccagtggtcctcctgagattatattatttgatcctgatggacgaaaatactacacaaataattttatcaccaatctaacttttcggacagctagtctttggattccaggaacagctaagcctgggcactggacttacaccctgaacaatacccatcattctctgcaagccctgaaagtgacagtgacctctcgcgcctccaactcagctgtgcccccagccactgtggaagcctttgtggaaagagacagcctccattttcctcatcctgtgatgatttatgccaatgtgaaacagggattttatcccattcttaatgccactgtcactgccacagttgagccagagactggagatcctgttacgctgagactccttgatgatggagcaggtgctgatgttataaaaaatgatggaatttactcgaggtattttttctcctttgctgcaaatggtagatatagcttgaaagtgcatgtcaatcactctcccagcataagcaccccagcccactctattccagggagtcatgctatgtatgtaccaggttacacagcaaacggtaatattcagatgaatgctccaaggaaatcagtaggcagaaatgaggaggagcgaaagtggggctttagccgagtcagctcaggaggctccttttcagtgctgggagttccagctggcccccaccctgatgtgtttccaccatgcaaaattattgacctggaagctgtaaaagtagaagaggaattgaccctatcttggacagcacctggagaagactttgatcagggccaggctacaagctatgaaataagaatgagtaaaagtctacagaatatccaagatgactttaacaatgctattttagtaaatacatcaaagcgaaatcctcagcaagctggcatcagggagatatttacgttctcaccccaaatttccacgaatggacctgaacatcagccaaatggagaaacacatgaaagccacagaatttatgttgcaatacgagcaatggataggaactccttacagtctgctgtatctaacattgcccaggcgcctctgtttattccccccaattctgatcctgtacctgccagagattatcttatattgaaaggagttttaacagcaatgggtttgataggaatcatttgccttattatagttgtgacacatcatactttaagcaggaaaaagagagcagacaagaaagagaatggaacaaaattattataaataaatatccaaagtgtcttccttcttagatataagacccatggccttcgactacaaaaacatactaacaaagtcaaattaacatcaaaactgtattaaaatgcattgagtttttgtacaatacagataagatttttacatggtagatcaacaaattctttttgggggtagattagaaaacccttacactttggctatgaacaaataataaaaattattctttaaagtaatgtctttaaaggcaaagggaagggtaaagtcggaccagtgtcaaggaaagtttgttttattgaggtggaaaaatagccccaagcagagaaaaggagggtaggtctgcattataactgtctgtgtgaagcaatcatttagttactttgattaatttttcttttctccttatctgtgcagaacaggttgcttgtttacaactgaagatcatgctatattttatatatgaagcccctaatgcaaagctctttacctcttgctattttgttatatatattacagatgaaatctcactgctaatgctcagagatcttttttcactgtaagaggtaacctttaacaatatgggtattacctttgtctcttcataccggttttatgacaaaggtctattgaatttatttgtttgtaagtttctactcccatcaaagcagctttctaagttattgccttggttattatggatgatagttatagcccttataatgccttaactaaggaagaaaagatgttattctgagtttgttttaatacatatatgaacatatagttttattcaattaaaccaaagaagaggtcagcagggagatactaacctttggaaatgattagctggctctgttttttggttaaataagagtctttaatcctttctccatcaagagttacttaccaagggcaggggaagggggatatagaggtcacaaggaaataaaaatcatctttcatcttt

SEQ ID NO: 1638 - protein, 943 aa, Homo sapiens; identical to SEQ ID NO: 22

SEQ ID NO: 1639 - DNA, 4022 bp, Homo sapiens
tcccagatggatccaccccagacttttcaaagaagacacctccttcatcttgtgttctaaaaccttgcaagttcaggaagaaaccatctgcatccatattgaaaacctgacacaatgtatgcagcaggctcagtgtgagtgaactggaggcttctctacaacatgacccaaaggagcattgcaggtcctatttgcaacctgaagtttgtgactctcctggttgccttaagttcagaactcccattcctgggagctggagtacagcttcaagacaatgggtataatggattgctcattgcaattaatcctcaggtacctgagaatcagaacctcatctcaaacattaaggaaatgataactgaagcttcattttacctatttaatgctaccaagagaagagtatttttcagaaatataaagattttaatacctgccacatggaaagctaataataacagcaaaataaaacaagaatcatatgaaaaggcaaatgtcatagtgactgactggtatggggcacatggagatgatccatacaccctacaatacagagggtgtggaaaagagggaaaatacattcatttcacacctaatttcctactgaatgataacttaacagctggctacggatcacgaggccgagtgtttgtccatgaatgggcccacctccgttggggtgtgttcgatgagtataacaatgacaaacctttctacataaatgggcaaaatcaaattaaagtgacaaggtgttcatctgacatcacaggcatttttgtgtgtgaaaaaggtccttgcccccaagaaaactgtattattagtaagctttttaaagaaggatgcacctttatctacaatagcacccaaaatgcaactgcatcaataatgttcatgcaaagtttatcttctgtggttgaattttgtaatgcaagtacccacaaccaagaagcaccaaacctacagaaccagatgtgcagcctcagaagtgcatgggatgtaatcacagactctgctgactttcaccacagctttcccatgaatgggactgagcttccacctcctcccacattctcgcttgtacaggctggtgacaaagtggtctgtttagtgctggatgtgtccagcaagatggcagaggctgacagactccttcaactacaacaagccgcagaattttatttgatgcagattgttgaaattcataccttcgtgggcattgccagtttcgacagcaaaggagagatcagagcccagctacaccaaattaacagcaatgatgatcgaaagttgctggtttcatatctgcccaccactgtatcagctaaaacagacatcagcatttgttcagggcttaagaaaggatttgaggtggttgaaaaactgaatggaaaagcttatggctctgtgatgatattagtgaccagcggagatgataagcttcttggcaattgcttacccactgtgctcagcagtggttcaacaattcactccattgccctgggttcatctgcagccccaaatctggaggaattatcacgtcttacaggaggtttaaagttctttgttccagatatatcaaactccaatagcatgattgatgctttcagtagaatttcctctggaactggagacattttccagcaacatattcagcttgaaagtacaggtgaaaatgtcaaacctcaccatcaattgaaaaacacagtgactgtggataatactgtgggcaacgacactatgtttctagttacgtggcaggccagtggtcctcctgagattatattatttgatcctgatggacgaaaatactacacaaataattttatcaccaatctaacttttcggacagctagtctttggattccaggaacagctaagcctgggcactggacttacaccctgaacaatacccatcattctctgcaagccctgaaagtgacagtgacctctcgcgcctccaactcagctgtgcccccagccactgtggaagcctttgtggaaagagacagcctccattttcctcatcctgtgatgatttatgccaatgtgaaacagggattttatcccattcttaatgccactgtcactgccacagttgagccagagactggagatcctgttacgctgagactccttgatgatggagcaggtgctgatgttataaaaaatgatggaatttactcgaggtattttttctcctttgctgcaaatggtagatatagcttgaaagtgcatgtcaatcactctcccagcataagcaccccagcccactctattccagggagtcatgctatgtatgtaccaggttacacagcaaacggtaatattcagatgaatgctccaaggaaatcagtaggcagaaatgaggaggagcgaaagtggggctttagccgagtcagctcaggaggctccttttcagtgctgggagttccagctggcccccaccctgatgtgtttccaccatgcaaaattattgacctggaagctgtaaaagtagaagaggaattgaccctatcttggacagcacctggagaagactttgatcagggccaggctacaagctatgaaataagaatgagtaaaagtctacagaatatccaagatgactttaacaatgctattttagtaaatacatcaaagcgaaatcctcagcaagctggcatcagggagatatttacgttctcaccccaaatttccacgaatggacctgaacatcagccaaatggagaaacacatgaaagccacagaatttatgttgcaatacgagcaatggataggaactccttacagtctgctgtatctaacattgcccaggcgcctctgtttattccccccaattctgatcctgtacctgccagagattatcttatattgaaaggagttttaacagcaatgggtttgataggaatcatttgccttattatagttgtgacacatcatactttaagcaggaaaaagagagcagacaagaaagagaatggaacaaaattattataaataaatatccaaagtgtcttccttcttagatataagacccatggccttcgactacaaaaacatactaacaaagtcaaattaacatcaaaactgtattaaaatgcattgagtttttgtacaatacagataagatttttacatggtagatcaacaaattctttttgggggtagattagaaaacccttacactttggctatgaacaaataataaaaattattctttaaagtaatgtctttaaaggcaaagggaagggtaaagtcggaccagtgtcaaggaaagtttgttttattgaggtggaaaaatagccccaagcagagaaaaggagggtaggtctgcattataactgtctgtgtgaagcaatcatttagttactttgattaatttttcttttctccttatctgtgcagaacaggttgcttgtttacaactgaagatcatgctatattttatatatgaagcccctaatgcaaagctctttacctcttgctattttgttatatatattacagatgaaatctcactgctaatgctcagagatcttttttcactgtaagaggtaacctttaacaatatgggtattacctttgtctcttcataccggttttatgacaaaggtctattgaatttatttgtttgtaagtttctactcccatcaaagcagctttctaagttattgccttggttattatggatgatagttatagcccttataatgccttaactaaggaagaaaagatgttattctgagtttgttttaatacatatatgaacatatagttttattcaattaaaccaaagaagaggtcagcagggagatactaacctttggaaatgattagctggctctgttttttggttaaataagagtctttaatcctttctccatcaagagttacttaccaagggcaggggaagggggatatagaggtcacaaggaaataaaaatcatctttcatctttaattttactccttcctcttatttttttaaaagattatcgaacaataaaatcatttgcctttttaatt

SEQ ID NO: 1640 - protein, 943 aa, Homo sapiens; identical to SEQ ID NO: 22

SEQ ID NO: 1641 - DNA, 2144 bp, Homo sapiens
agtaatcagattggactgttaaaatagcaaatgaaaatcagaagggaggtgcagtgacagcgaacccactttttccctttggaccccagttatgaagaaaaaattggaaactgaacttgtgacctataagatgaccctagacccaagaggctgggttgaagagagggcacagctcagttctagcacagccaatgccttttacgtgtgtaatttggtcccaagaagacccagcctgcaagcctagtggaatcagaatagagaaaagttctcattctgcacatacagcattcagagcctcgtcatcatacattatagatggtatagcatccagccaggtgctgatgttataaaaaatgatggaatttactcgaggtattttttctcctttgctgcaaatggtagatatagcttgaaagtgcatgtcaatcactctcccagcataagcaccccagcccactctattccagggagtcatgctatgtatgtaccaggttacacagcaaacggtaatattcagatgaatgctccaaggaaatcagtaggcagaaatgaggaggagcgaaagtggggctttagccgagtcagctcaggaggctccttttcagtgctgggagttccagctggcccccaccctgatgtgtttccaccatgcaaaattattgacctggaagctgtaaaagtagaagaggaattgaccctatcttggacagcacctggagaagactttgatcagggccaggctacaagctatgaaataagaatgagtaaaagtctacagaatatccaagatgactttaacaatgctattttagtaaatacatcaaagcgaaatcctcagcaagctggcatcagggagatatttacgttctcaccccaaatttccacgaatggacctgaacatcagccaaatggagaaacacatgaaagccacagaatttatgttgcaatacgagcaatggataggaactccttacagtctgctgtatctaacattgcccaggcgcctctgtttattccccccaattctgatcctgtacctgccagagattatcttatattgaaaggagttttaacagcaatgggtttgataggaatcatttgccttattatagttgtgacacatcatactttaagcaggaaaaagagagcagacaagaaagagaatggaacaaaattattataaataaatatccaaagtgtcttccttcttagatataagacccatggccttcgactacaaaaacatactaacaaagtcaaattaacatcaaaactgtattaaaatgcattgagtttttgtacaatacagataagatttttacatggtagatcaacaaattctttttgggggtagattagaaaacccttacactttggctatgaacaaataataaaaattattctttaaagtaatgtctttaaaggcaaagggaagggtaaagtcggaccagtgtcaaggaaagtttgttttattgaggtggaaaaatagccccaagcagagaaaaggagggtaggtctgcattataactgtctgtgtgaagcaatcatttagttactttgattaatttttcttttctccttatctgtgcagaacaggttgcttgtttacaactgaagatcatgctatattttatatatgaagcccctaatgcaaagctctttacctcttgctattttgttatatatattacagatgaaatctcactgctaatgctcagagatcttttttcactgtaagaggtaacctttaacaatatgggtattacctttgtctcttcataccggttttatgacaaaggtctattgaatttatttgtttgtaagtttctactcccatcaaagcagctttctaagttattgccttggttattatggatgatagttatagcccttataatgccttaactaaggaagaaaagatgttattctgagtttgttttaatacatatatgaacatatagttttattcaattaaaccaaagaagaggtcagcagggagatactaacctttggaaatgattagctggctctgttttttggttaaataagagtctttaatcctttctccatcaagagttacttaccaagggcaggggaagggggatatagaggtcacaaggaaataaaaatcatctttcatcttt

SEQ ID NO: 1642 - protein, 234 aa, Homo sapiens [sequence omitted]

SEQ ID NO: 1643 - DNA, 2209 bp, Homo sapiens
agtaatcagattggactgttaaaatagcaaatgaaaatcagaagggaggtgcagtgacagcgaacccactttttccctttggaccccagttatgaagaaaaaattggaaactgaacttgtgacctataagatgaccctagacccaagaggctgggttgaagagagggcacagctcagttctagcacagccaatgccttttacgtgtgtaatttggtcccaagaagacccagcctgcaagcctagtggaatcagaatagagaaaagttctcattctgcacatacagcattcagagcctcgtcatcatacattatagatggtatagcatccagccaggtgctgatgttataaaaaatgatggaatttactcgaggtattttttctcctttgctgcaaatggtagatatagcttgaaagtgcatgtcaatcactctcccagcataagcaccccagcccactctattccagggagtcatgctatgtatgtaccaggttacacagcaaacggtaatattcagatgaatgctccaaggaaatcagtaggcagaaatgaggaggagcgaaagtggggctttagccgagtcagctcaggaggctccttttcagtgctgggagttccagctggcccccaccctgatgtgtttccaccatgcaaaattattgacctggaagctgtaaaagtagaagaggaattgaccctatcttggacagcacctggagaagactttgatcagggccaggctacaagctatgaaataagaatgagtaaaagtctacagaatatccaagatgactttaacaatgctattttagtaaatacatcaaagcgaaatcctcagcaagctggcatcagggagatatttacgttctcaccccaaatttccacgaatggacctgaacatcagccaaatggagaaacacatgaaagccacagaatttatgttgcaatacgagcaatggataggaactccttacagtctgctgtatctaacattgcccaggcgcctctgtttattccccccaattctgatcctgtacctgccagagattatcttatattgaaaggagttttaacagcaatgggtttgataggaatcatttgccttattatagttgtgacacatcatactttaagcaggaaaaagagagcagacaagaaagagaatggaacaaaattattataaataaatatccaaagtgtcttccttcttagatataagacccatggccttcgactacaaaaacatactaacaaagtcaaattaacatcaaaactgtattaaaatgcattgagtttttgtacaatacagataagatttttacatggtagatcaacaaattctttttgggggtagattagaaaacccttacactttggctatgaacaaataataaaaattattctttaaagtaatgtctttaaaggcaaagggaagggtaaagtcggaccagtgtcaaggaaagtttgttttattgaggtggaaaaatagccccaagcagagaaaaggagggtaggtctgcattataactgtctgtgtgaagcaatcatttagttactttgattaatttttcttttctccttatctgtgcagaacaggttgcttgtttacaactgaagatcatgctatattttatatatgaagcccctaatgcaaagctctttacctcttgctattttgttatatatattacagatgaaatctcactgctaatgctcagagatcttttttcactgtaagaggtaacctttaacaatatgggtattacctttgtctcttcataccggttttatgacaaaggtctattgaatttatttgtttgtaagtttctactcccatcaaagcagctttctaagttattgccttggttattatggatgatagttatagcccttataatgccttaactaaggaagaaaagatgttattctgagtttgttttaatacatatatgaacatatagttttattcaattaaaccaaagaagaggtcagcagggagatactaacctttggaaatgattagctggctctgttttttggttaaataagagtctttaatcctttctccatcaagagttacttaccaagggcaggggaagggggatatagaggtcacaaggaaataaaaatcatctttcatctttaattttactccttcctcttatttttttaaaagattatcgaacaataaaatcatttgcctttttaa

SEQ ID NO: 1644 - protein, 234 aa, Homo sapiens [sequence omitted]

SEQ ID NO: 1645 - DNA, 3340 bp, Homo sapiens
tgctaatgcttttggtacaaatggatgtggaatataattgaatattttcttgtttaaggggagcatgaagaggtgttgaggttatgtcaagcatctggcacagctgaaggcagatggaaatatttacaagtacgcaatttgagactaagatattgttatcattctcctattgaagacaagagcaatagtaaaacacatcaggtcagggggttaaagacctgtgataaaccacttccgataagttggaaacgtgtgtctatattttcatatctgtatatatataatggtaaagaaagacaccttcgtaacccgcattttccaaagagagaaatcacagggagatgtacagcaatggggccatttaagagttctgtgttcatcttgattcttcaccttctagaaggggccctgagtaattcactcattcagctgaacaacaatggctatgaaggcattgtcgttgcaatcgaccccaatgtgccagaagatgaaacactcattcaacaaataaaggacatggtgacccaggcatctctgtatctgcttgaagctacaggaaagcgattttatttcaaaaatgttgccattttgattcctgaaacatggaagacaaaggctgactatgtgagaccaaaacttgagacctacaaaaatgctgatgttctggttgctgagtctactcctccaggtaatgatgaaccctacactgagcagatgggcaactgtggagagaagggtgaaaggatccacctcactcctgatttcattgcaggaaaaaagttagctgaatatggaccacaaggtagggcatttgtccatgagtgggctcatctacgatggggagtatttgacgagtacaataatgatgagaaattctacttatccaatggaagaatacaagcagtaagatgttcagcaggtattactggtacaaatgtagtaaagaagtgtcagggaggcagctgttacaccaaaagatgcacattcaataaagtaacaggactctatgaaaaaggatgtgagtttgttctccaatcccgccagacggagaaggcttctataatgtttgcacaacatgttgattctatagttgaattctgtacagaacaaaaccacaacaaagaagctccaaacaagcaaaatcaaaaatgcaatctccgaagcacatgggaagtgatccgtgattctgaggactttaagaaaaccactcctatgacaacacagccaccaaatcccaccttctcattgctgcagattggacaaagaattgtgtgtttagtccttgacaaatctggaagcatggcgactggtaaccgcctcaatcgactgaatcaagcaggccagcttttcctgctgcagacagttgagctggggtcctgggttgggatggtgacatttgacagtgctgcccatgtacaaaatgaactcatacagataaacagtggcagtgacagggacacactcgccaaaagattacctgcagcagcttcaggagggacgtccatctgcagcgggcttcgatcggcatttactgtgattaggaagaaatatccaactgatggatctgaaattgtgctgctgacggatggggaagacaacactataagtgggtgctttaacgaggtcaaacaaagtggtgccatcatccacacagtcgctttggggccctctgcagctcaagaactagaggagctgtccaaaatgacaggaggtttacagacatatgcttcagatcaagttcagaacaatggcctcattgatgcttttggggccctttcatcaggaaatggagctgtctctcagcgctccatccagcttgagagtaagggattaaccctccagaacagccagtggatgaatggcacagtgatcgtggacagcaccgtgggaaaggacactttgtttcttatcacctggacaatgcagcctccccaaatccttctctgggatcccagtggacagaagcaaggtggctttgtagtggacaaaaacaccaaaatggcctacctccaaatcccaggcattgctaaggttggcacttggaaatacagtctgcaagcaagctcacaaaccttgaccctgactgtcacgtcccgtgcgtccaatgctaccctgcctccaattacagtgacttccaaaacgaacaaggacaccagcaaattccccagccctctggtagtttatgcaaatattcgccaaggagcctccccaattctcagggccagtgtcacagccctgattgaatcagtgaatggaaaaacagttaccttggaactactggataatggagcaggtgctgatgctactaaggatgacggtgtctactcaaggtatttcacaacttatgacacgaatggtagatacagtgtaaaagtgcgggctctgggaggagttaacgcagccagacggagagtgataccccagcagagtggagcactgtacatacctggctggattgagaatgatgaaatacaatggaatccaccaagacctgaaattaataaggatgatgttcaacacaagcaagtgtgtttcagcagaacatcctcgggaggctcatttgtggcttctgatgtcccaaatgctcccatacctgatctcttcccacctggccaaatcaccgacctgaaggcggaaattcacgggggcagtctcattaatctgacttggacagctcctggggatgattatgaccatggaacagctcacaagtatatcattcgaataagtacaagtattcttgatctcagagacaagttcaatgaatctcttcaagtgaatactactgctctcatcccaaaggaagccaactctgaggaagtctttttgtttaaaccagaaaacattacttttgaaaatggcacagatcttttcattgctattcaggctgttgataaggtcgatctgaaatcagaaatatccaacattgcacgagtatctttgtttattcctccacagactccgccagagacacctagtcctgatgaaacgtctgctccttgtcctaatattcatatcaacagcaccattcctggcattcacattttaaaaattatgtggaagtggataggagaactgcagctgtcaatagcctagggctgaatttttgtcagataaataaaataaatcattcatccttttttttgattataaaattttctaaaatgtattttagacttcctgtagggggcgatatactaaatgtatatagtacatttatactaaatgtattcctgtagggggcgatatactaaatgtattttagacttcctgtagggggcgataaaataaaatgctaaacaactgggtatacatgcataaaaactatccattcaaaccc

SEQ ID NO: 1646 - protein, 914 aa, Homo sapiens
MGPFKSSVFILILHLLEGALSNSLIQLNNNGYEGIVVAIDPNVPEDETLIQQIKDMVTQASLYLLEATGKRFYFKNVAILIPETWKTKADYVRPKLETYKNADVLVAESTPPGNDEPYTEQMGNCGEKGERIHLTPDFIAGKKLAEYGPQGRAFVHEWAHLRWGVFDEYNNDEKFYLSNGRIQAVRCSAGITGTNVVKKCQGGSCYTKRCTFNKVTGLYEKGCEFVLQSRQTEKASIMFAQHVDSIVEFCTEQNHNKEAPNKQNQKCNLRSTWEVIRDSEDFKKTTPMTTQPPNPTFSLLQIGQRIVCLVLDKSGSMATGNRLNRLNQAGQLFLLQTVELGSWVGMVTFDSAAHVQNELIQINSGSDRDTLAKRLPAAASGGTSICSGLRSAFTVIRKKYPTDGSEIVLLTDGEDNTISGCFNEVKQSGAIIHTVALGPSAAQELEELSKMTGGLQTYASDQVQNNGLIDAFGALSSGNGAVSQRSIQLESKGLTLQNSQWMNGTVIVDSTVGKDTLFLITWTMQPPQILLWDPSGQKQGGFVVDKNTKMAYLQIPGIAKVGTWKYSLQASSQTLTLTVTSRASNATLPPITVTSKTNKDTSKFPSPLVVYANIRQGASPILRASVTALIESVNGKTVTLELLDNGAGADATKDDGVYSRYFTTYDTNGRYSVKVRALGGVNAARRRVIPQQSGALYIPGWIENDEIQWNPPRPEINKDDVQHKQVCFSRTSSGGSFVASDVPNAPIPDLFPPGQITDLKAEIHGGSLINLTWTAPGDDYDHGTAHKYIIRISTSILDLRDKFNESLQVNTTALIPKEANSEEVFLFKPENITFENGTDLFIAIQAVDKVDLKSEISNIARVSLFIPPQTPPETPSPDETSAPCPNIHINSTIPGIHILKIMWKWIGELQLSIA

SEQ ID NO: 1647 - DNA, 2663 bp, Homo sapiens
acccgcattttccaaagagagaaatcacagggagatgtacagcaatggggccatttaagagttctgtgttcatcttgattcttcaccttctagaaggggccctgagtaattcactcattcagctgaacaacaatggctatgaaggcattgtcgttgcaatcgaccccaatgtgccagaagatgaaacactcattcaacaaataaaggacatggtgacccaggcatctctgtatctgcttgaagctacaggaaagcgatccacctcactcctgatttcattgcaggaaaaaagttagctgaatatggaccacaaggtagggcatttgtccatgagtgggctcatctacgatggggagtatttgacgagtacaataatgatgagaaattctacttatccaatggaagaatacaagcagtaagatgttcagcaggtattactggtacaaatgtagtaaagaagtgtcagggaggcagctgttacaccaaaagatgcacattcaataaagtaacaggactctatgaaaaaggatgtgagtttgttctccaatcccgccagacggagaaggcttctataatgtttgcacaacatgttgattctatagttgaattctgtacagaacaaaaccacaacaaagaagctccaaacaagcaaaatcaaaaatgcaatctccgaagcacatgggaagtgatccgtgattctgaggactttaagaaaaccactcctatgacaacacagccaccaaatcccaccttctcattgctgcagattggacaaagaattgtgtgtttagtccttgacaaatctggaagcatggcgactggtaaccgcctcaatcgactgaatcaagcaggccagcttttcctgctgcagacagttgagctggggtcctgggttgggatggtgacatttgacagtgctgcccatgtacaaaatgaactcatacagataaacagtggcagtgacagggacacactcgccaaaagattacctgcagcagcttcaggagggacgtccatctgcagcgggcttcgatcggcatttactgtgattaggaagaaatatccaactgatggatctgaaattgtgctgctgacggatggggaagacaacactataagtgggtgctttaacgaggtcaaacaaagtggtgccatcatccacacagtcgctttggggccctctgcagctcaagaactagaggagctgtccaaaatgacaggaggtttacagacatatgcttcagatcaagttcagaacaatggcctcattgatgcttttggggccctttcatcaggaaatggagctgtctctcagcgctccatccagcttgagagtaagggattaaccctccagaacagccagtggatgaatggcacagtgatcgtggacagcaccgtgggaaaggacactttgtttcttatcacctggacaatgcagcctccccaaatccttctctgggatcccagtggacagaagcaaggtggctttgtagtggacaaaaacaccaaaatggcctacctccaaatcccaggcattgctaaggttggcacttggaaatacagtctgcaagcaagctcacaaaccttgaccctgactgtcacgtcccgtgcgtccaatgctaccctgcctccaattacagtgacttccaaaacgaacaaggacaccagcaaattccccagccctctggtagtttatgcaaatattcgccaaggagcctccccaattctcagggccagtgtcacagccctgattgaatcagtgaatggaaaaacagttaccttggaactactggataatggagcaggtgctgatgctactaaggatgacggtgtctactcaaggtatttcacaacttatgacacgaatggtagatacagtgtaaaagtgcgggctctgggaggagttaacgcagccagacggagagtgataccccagcagagtggagcactgtacatacctggctggattgagaatgatgaaatacaatggaatccaccaagacctgaaattaataaggatgatgttcaacacaagcaagtgtgtttcagcagaacatcctcgggaggctcatttgtggcttctgatgtcccaaatgctcccatacctgatctcttcccacctggccaaatcaccgacctgaaggcggaaattcacgggggcagtctcattaatctgacttggacagctcctggggatgattatgaccatggaacagctcacaagtatatcattcgaataagtacaagtattcttgatctcagagacaagttcaatgaatctcttcaagtgaatactactgctctcatcccaaaggaagccaactctgaggaagtctttttgtttaaaccagaaaacattacttttgaaaatggcacagatcttttcattgctattcaggctgttgataaggtcgatctgaaatcagaaatatccaacattgcacgagtatctttgtttattcctccacagactccgccagagacacctagtcctgatgaaacgtctgctccttgtcctaatattcatatcaacagcaccattcctggcattcacattttaaaaattatgtggaagtggataggagaactgcagctgtcaatagcctagggctgaatttttgtcagataaataaaataaatcattcatccttttttttgattat

SEQ ID NO: 1648 - protein, 677 aa, Homo sapiens
MFAQHVDSIVEFCTEQNHNKEAPNKQNQKCNLRSTWEVIRDSEDFKKTTPMTTQPPNPTFSLLQIGQRIVCLVLDKSGSMATGNRLNRLNQAGQLFLLQTVELGSWVGMVTFDSAAHVQNELIQINSGSDRDTLAKRLPAAASGGTSICSGLRSAFTVIRKKYPTDGSEIVLLTDGEDNTISGCFNEVKQSGAIIHTVALGPSAAQELEELSKMTGGLQTYASDQVQNNGLIDAFGALSSGNGAVSQRSIQLESKGLTLQNSQWMNGTVIVDSTVGKDTLFLITWTMQPPQILLWDPSGQKQGGFVVDKNTKMAYLQIPGIAKVGTWKYSLQASSQTLTLTVTSRASNATLPPITVTSKTNKDTSKFPSPLVVYANIRQGASPILRASVTALIESVNGKTVTLELLDNGAGADATKDDGVYSRYFTTYDTNGRYSVKVRALGGVNAARRRVIPQQSGALYIPGWIENDEIQWNPPRPEINKDDVQHKQVCFSRTSSGGSFVASDVPNAPIPDLFPPGQITDLKAEIHGGSLINLTWTAPGDDYDHGTAHKYIIRISTSILDLRDKFNESLQVNTTALIPKEANSEEVFLFKPENITFENGTDLFIAIQAVDKVDLKSEISNIARVSLFIPPQTPPETPSPDETSAPCPNIHINSTIPGIHILKIMWKWIGELQLSIA

SEQ ID NO: 1649 - DNA, 2804 bp, Homo sapiens
agcaatggggccatttaagagttctgtgttcatcttgattcttcaccttctagaaggggccctgagtaattcactcattcagctgaacaacaatggctatgaaggcattgtcgttgcaatcgaccccaatgtgccagaagatgaaacactcattcaacaaataaaggacatggtgacccaggcatctctgtatctgcttgaagctacaggaaagcgattttatttcaaaaatgttgccattttgattcctgaaacatggaagacaaaggctgactatgtgagaccaaaacttgagacctacaaaaatgctgatgttctggttgctgagtctactcctccaggtaatgatgaaccctacactgagcagatgggcaactgtggagagaagggtgaaaggatccacctcactcctgatttcattgcaggaaaaaagttagctgaatatggaccacaaggtagggcatttgtccatgagtgggctcatctacgatggggagtatttgacgagtacaataatgatgagaaattctacttatccaatggaagaatacaagcagtaagatgttcagcaggtattactggtacaaatgtagtaaagaagtgtcagggaggcagctgttacaccaaaagatgcacattcaataaagtaacaggactctatgaaaaaggatgtgagtttgttctccaatcccgccagacggagaaggcttctataatgtttgcacaacatgttgattctatagttgaattctgtacagaacaaaaccacaacaaagaagctccaaacaagcaaaatcaaaaatgcaatctccgaagcacatgggaagtgatccgtgattctgaggactttaagaaaaccactcctatgacaacacagccaccaaatcccaccttctcattgctgcagattggacaaagaattgtgtgtttagtccttgacaaatctggaagcatggcgactggtaaccgcctcaatcgactgaatcaagcaggccagcttttcctgctgcagacagttgagctggggtcctgggttgggatggtgacatttgacagtgctgcccatgtacaaaatgaactcatacagataaacagtggcagtgacagggacacactcgccaaaagattacctgcagcagcttcaggagggacgtccatctgcagcgggcttcgatcggcatttactgtgattaggaagaaatatccaactgatggatctgaaattgtgctgctgacggatggggaagacaacactataagtgggtgctttaacgaggtcaaacaaagtggtgccatcatccacacagtcgctttggggccctctgcagctcaagaactagaggagctgtccaaaatgacaggaggtttacagacatatgcttcagatcaagttcagaacaatggcctcattgatgcttttggggccctttcatcaggaaatggagctgtctctcagcgctccatccagcttgagagtaagggattaaccctccagaacagccagtggatgaatggcacagtgatcgtggacagcaccgtgggaaaggacactttgtttcttatcacctggacaatgcagcctccccaaatccttctctgggatcccagtggacagaagcaaggtggctttgtagtggacaaaaacaccaaaatggcctacctccaaatcccaggcattgctaaggttggcacttggaaatacagtctgcaagcaagctcacaaaccttgaccctgactgtcacgtcccgtgcgtccaatgctaccctgcctccaattacagtgacttccaaaacgaacaaggacaccagcaaattccccagccctctggtagtttatgcaaatattcgccaaggagcctccccaattctcagggccagtgtcacagccctgattgaatcagtgaatggaaaaacagttaccttggaactactggataatggagcaggtgctgatgctactaaggatgacggtgtctactcaaggtatttcacaacttatgacacgaatggtagatacagtgtaaaagtgcgggctctgggaggagttaacgcagccagacggagagtgataccccagcagagtggagcactgtacatacctggctggattgagaatgatgaaatacaatggaatccaccaagacctgaaattaataaggatgatgttcaacacaagcaagtgtgtttcagcagaacatcctcgggaggctcatttgtggcttctgatgtcccaaatgctcccatacctgatctcttcccacctggccaaatcaccgacctgaaggcggaaattcacgggggcagtctcattaatctgacttggacagctcctggggatgattatgaccatggaacagctcacaagtatatcattcgaataagtacaagtattcttgatctcagagacaagttcaatgaatctcttcaagtgaatactactgctctcatcccaaaggaagccaactctgaggaagtctttttgtttaaaccagaaaacattacttttgaaaatggcacagatcttttcattgctattcaggctgttgataaggtcgatctgaaatcagaaatatccaacattgcacgagtatctttgtttattcctccacagactccgccagagacacctagtcctgatgaaacgtctgctccttgtcctaatattcatatcaacagcaccattcctggcattcacattttaaaaattatgtggaagtggataggagaactgcagctgtcaatagcctagggctgaatttttgtcagataaataaaataaatcattcatccttttttttgattat

SEQ ID NO: 1650 - protein, 914 aa, Homo sapiens; identical to SEQ ID NO: 1646

SEQ ID NO: 1651 - DNA, 2113 bp, Homo sapiens
cgcgatcgcggcggaccccaccgtcatcgcgcgccgtgagtcacactccacagccaatccctggccacatccgggctcgcccccgccccgcccccttgttcccgcaagcccggaactgcccaaatcccgcccctcccctcccaaaaaaacacccctcatccagtctcttccagcctagagatcctggcctacccctccgccaaagcgcgcactgagtgcaaaccccagagtcaatccctgtcccggctccgccccccgcgtccgaatcccgcccagccgggccctcaagcccagtcgggactcgagcctagggaggcgaggttcccgcaccggatagcatgtttttggcccagaggagcctctgctctcttagcggtagagcaaaattcctgaagacaatttcttcttccaaaatcctcggattctctacttctgctaaaatgtcactgaaattcacaaatgcaaaacggattgaaggacttgatagtaatgtgtggattgaatttaccaaattggctgcagacccttctgttgtgaatcttggccaaggctttccagatatatcccctcctacatatgtaaaagaagaattatcaaagattgcagcaatcgatagcctgaatcagtatacacgaggctttggccatccatcacttgtgaaagctctgtcctatctgtatgaaaagctttatcaaaagcaaattgattcaaataaagaaatccttgtgacagtaggagcatatggatctctttttaacaccattcaagcattaattgatgagggagatgaagtcatactaatagtgcctttctatgactgctatgagcccatggtgagaatggctggagcaacacctgtttttattcccctgagatctaaacctgtttatggaaaaagatggtctagttctgactggacattagatcctcaagaactggaaagtaaatttaattccaaaaccaaagctattatactaaatactccacataacccacttggcaaggtgtataacagagaggaactgcaagtaattgctgacctttgcatcaaatatgacacactctgcatcagcgatgaggtttatgaatggcttgtatattctggaaataagcacttaaaaatagctacttttccaggtatgtgggagagaacaataacaataggaagtgctggaaagactttcagtgtaactggctggaagcttggctggtccattggtccaaatcatttgataaaacatttacagacagttcaacaaaacacgatttatacttgtgcaactcctttacaggaagccttggctcaagctttctggattgacatcaagcgcatggatgacccagaatgttactttaattctttgccaaaagagttagaagtaaaaagagatcggatggtacgtttacttgaaagtgttggcctaaaacccatagttcctgatggaggatacttcatcatcgctgatgtgtctttgctagatccagacctctctgatatgaagaataatgagccttatgactataagtttgtgaaatggatgactaaacataagaaactatcagccatccccgtttcagcattctgtaactcagagactaaatcacagtttgagaagtttgtgcgtttttgcttcattaaaaaagacagcacactggatgctgctgaagaaatcatcaaggcatggagtgtacagaagtcttgatttgtgcagaatggattaatgtttctgttagatgacctagtatggaattgttacttagtgctgccacctgctggatgttaaaaggtatttcagtacaactggaatttaaatatttccattgtttttccaaagcagttaacccaactcctaacaacattttcgggggatctgaccttttttttccagttgaaatgtattaacacaccttccacaatcattttataagagtcagcataacatagtggataagaaatgtgagatgtttaacctctcagtaactcggttctctcattataaaataggaataaaatcagtacctgtttcatatgaaggtcgtttctgagaattaaatggactaatgtatgcaaaaagcctggcaaacaataaacactcatctgactttagccggt

SEQ ID NO: 1652 - protein, 454 aa, Homo sapiens; identical to SEQ ID NO: 26

SEQ ID NO: 1653 - DNA, 321 bp, Homo sapiens
ccagtctcttccagcctagagatcctggcctacccctccgccaaagcgcgcactgagtgcaaaccccagagtcaatccctgtcccggctccgccccccgcgtccgaatcccgcccagccgggccctcaagcccagtcgggactcgagcctagggaggcgaggttcccgcaccggatagaaaatgtcactgaaattcacaaatgcaaaacggattgaaggacttgatagtaatgtgtggattgaatttaccaaattggctgcagacccttctgttgtgaatcttggccaaggctttccagatatatcccctcctacatatgt

SEQ ID NO: 1654 - protein, 45 aa, Homo sapiens
MSLKFTNAKRIEGLDSNVWIEFTKLAADPSVVNLGQGFPDISPPT

SEQ ID NO: 1655 - DNA, 4798 bp, Homo sapiens
cacccctcatccagtctcttccagcctagagatcctggcctacccctccgccaaagcgcgcactgagtgcaaaccccagagtcaatccctgtcccggctccgccccccgcgtccgaatcccgcccagccgggccctcaagcccagtcgggactcgagcctagggaggcgaggttcccgcaccggataggaacattctgttgttttcctctgccatctagtggcaaaagaaagtaattttcctggttttttgaatggatagccataccttaaaaagcatccagattgcgcagtagtgctagcggcttcgcggttcagtcctcctaactgacagccgccactggtgctgagctgctaggaagcccctgtcggcgagcttgttggagcttgaacccactgtcacccctccgactcaccggcaaaaaaaaaaatggttgaagcagatcgcccaggaaagctcttcattggtgggcttaatacggaaacaaatgagaaagctcttgaaacagtatttggcaaatatggacgaatagtggaagtactcttgataaaagaccgtgaaaccaacaaatcaagaggatttgcttttgtcacctttgaaagcccagcagacgctaaggatgcagccagagacatgaatggaaagtcattagatggaaaagccatcaaggtggaacaagccaccaaaccatcatttgaaagaggtagacatggaccgcccccacctccaagaagtagaggtcctccaagaggttttggagctggaagaggaggaagtggaggaaccaggggacctccttcacgaggaggacacatggatgatggtggatattccatgaattttaacatgagttcttccaggggaccactcccagtaaaaagaggaccaccaccaagaagtgggggtccttctcctaagagatctgcaccttcaggactagttcgcagcagcagtggaatgggaggaagagctcctctatcacgtggaagagatagttatggaggtccacctcgaagggaaccgctcccctctcgtagagatgtttatttgtccccaagagatgatgggtattctactaaagacagctattcaagcagagattacccaagttctcgtgatacaagagattatgcaccaccaccacgagattatacttaccgtgattatggtcattccagttcacgtgatgactatccatcaagaggctatggcgatagagatggatatggtcgtgatcgtgactattcagatcatccaagtggaggttcctacagagattcatatgagagttatggtaactcacgtagtgctccacttacacgagggcccccgccatcttatggtggaagcagtcgctatgatgattatagcagctcacgtgatggatatggtggaagtcgagacagttactcaagcagccgaagtgatctctactcaagttgtgacagggttggcagacaagaaagagggcttcccccttctgtagaaagggggtacccttcttcacgtgattcctacagcagttcaagccgcggagcaccaagaggtgctggccctggaggaagccgatctgatagagggggaggcagaagcagatactagaaacaaacaaaactttggaccaaaatcccagttcaaagaaacaaaaaaaagagtggaaactattctatcataactacccaaggactactaaaaggaaaaattgtgttaccttttttaaattccctgttaagtcccttccgtaatttttatgttcttgtgaggaaaaaagtaaaacatgtttaattttatttgactttatgacattgcttttcaacaagcaaatgttaaatgtgttaagccttgtagtactagtgttgtaactttccaagtaaaggtgtccctaaagaccacttcctatctggtttttcccagtaaatgaggcaagcaattctaagatcttccacaaaacatctagccaactaaaatggagagatgaatcattctgcctatacaaacaagctagctattagagggtggttggagtatgctactcataagatttcagggtgttttctaactgaaatctcactgttctcagtatgcaaaacctgaaatcagatgcctatgtaaggaaagtgctattcacccagtaaacccaaaaaaagcaaatggataatgctggccattttgcctttctgacatttccttgggaatctgcaagaacctcccctttcccctcccacaataagaccatttaagtgtgtgctaaacaactacggaatactaaataaaaagtttggccaaaaccaaccatgaagctgcaaaggtgcttgctcttactctttcaaatttttgcaactctaatgtctcacttttaaaggaacagcttgattgcaaaggagaaaatagataagcaatgaatttatctccaacttcctaaaggcttatgacttctaaaaagtgaatctatcagcattccacatcagatttaaagcatcaaatgcctgtgaaacagcaaagatggttgaagattgtgctcattatgtttgtggagtgctgattgattcacagtagataacgctggcagtaagagaaatcaaatgctaagagttgttgaagcagaaggcggctgattgttggtaagtcagtgcagttgcataagcagtgctgtcagaattggtttggtgcaggcaatagattttgccttcaagggttcctgtggatctcaggaaggcatcagtgttgattaacactcataactagggagtgagtggtagttacttaagtaattgaccaaatggaaaaggggaagtaattaaggaaattggtaagtggaggtagtcaggaggttctcgtggtcctttacacagattttacagctttgggtttcattttgtttagctaaagtcatggggacaactcttcaatttagaacttaagatgaattataaaaatgatggatataagtggtagctctatctggtgaagtgtcttgtcagtaagtgaaacatttttttgtggtggcttatccacaaacagtttagttgtagaataaaacttatgagtgacatctggaaagtaacaaccatgctaagatggcaaacacactggaaacaattgggccacttggctttcttttgctgtattgttttataagcctgctttacctccccgtcttggaaacaagttttagtttattgctttggagactagagccaatagtgtaatgttctcaaaggaaacagacttgagttgttggattagaggaactaactcaacttctaattttttttgttgtaattatggcactgtcatgttttaacatttgcaactagggatagtaagtacaacatttttaactctcatttggcagactactactaatcacagaccacaagggtaatgaccaaatttatgtggttgttacacttccatagttgtcttagccgaatccttccatattcttatgattacttgggttaaagcttctgtgaggaccttttggctcttaagatatcctaaatatttaaaatatttagatatcctaaatataggatatagagtttgtaccaaatatgaatgaatattgttcaaagcaaggagtatgttaaaatgaccagacacctgtttgataaatagtttactgaactagcagacgtgtggaaaaagaatcagatcttgattcttctgggtttatactggttgtaaaacagaatgatattagaaaatgttttccttgtttaagtggtagttgaacatagaacttgggtattatagatcacttttcactttttggaatgttttgtattgaaacttaatacaactttaacatggcaaaaaaaaaaaaaatccaaaatctatgagataattttgttaaagttggcttgcttgggcgggtgcttggtccagagggagaaaagaaggcatgatttcagaatactctggcagctttttaaattcagctttatcaagttacagtaaactgtatctgtttagaattacaactcaatggttattttgacagatgtatatgccatgaagccactgtcaccatcaacatgcagaacacttccatcgcccccaaaagattcctcaagttcctttgcagtccatccctcacgctgctgatttgtctttgtcaccatatattagtttgctttgtggtggtgtttagtattttatataaatgggattgtgtagcatgtacttttttgtttatggtttctttcacacacaatgactttgaaattcaccaggttgcagtgtatcagtagcttattccttttattgctgagtagtgtcccattatgtgaatatgccattatttgtttttctactcacctgttgatggaccttgggattgtttccagtttggggctactgtgaataaaactgttaggaacatttgtgtacaagccactgtgtagacataggttttcctttctcttgggtaaatacctaccagtaaaatggttgggttgcatggcagatttatgtttaataaagtaactgccaaactgtttgttttccaaaggggctatacccttttatattcccaccagggttgtatagagttccaactgccaacactcagttttcagccattctgatgggaatctagtggtatctcattgtggttttattttcatttccccgggtgactaatgctggtaagcatcttttaaggtactttttggccagttgtatattttctgtgaagtggctgtcaaatcttttgcccacttttaattggattgtttgtcttattgagttgtaaaagttctttatatatactgtattaaagtcctttgtaagac

SEQ ID NO: 1656 - protein, 390 aa, Homo sapiens; identical to SEQ ID NO: 1295

SEQ ID NO: 1657 - DNA, 4445 bp, Homo sapiens
gtctcttccagcctagagatcctggcctacccctccgccaaagcgcgcactgagtgcaaaccccagagtcaatccctgtcccggctccgccccccgcgtccgaatcccgcccagccgggccctcaagcccagtcgggactcgagcctagggaggcgaggttcccgcaccggatagcatgtttttggcccagaggagcctctgctctcttagcggtagagcaaaattcctgaagacaatttcttcttccaaaatcctcggattctctacttctgctgaacattctgttgttttcctctgccatctagtggcaaaagaaagtaattttcctggttttttgaatggatagccataccttaaaaagcatccagattgcgcagtagtgctagcggcttcgcggttcagtcctcctaactgacagccgccactggtgctgagctgctaggaagcccctgtcggcgagcttgttggagcttgaacccactgtcacccctccgactcaccggcaaaaaaaaaaatggttgaagcagatcgcccaggaaagctcttcattggtgggcttaatacggaaacaaatgagaaagctcttgaaacagtatttggcaaatatggacgaatagtggaagtactcttgataaaagaccgtgaaaccaacaaatcaagaggatttgcttttgtcacctttgaaagcccagcagacgctaaggatgcagccagagacatgaatggaaagtcattagatggaaaagccatcaaggtggaacaagccaccaaaccatcatttgaaagaggtagacatggaccgcccccacctccaagaagtagaggtcctccaagaggttttggagctggaagaggaggaagtggaggaaccaggggacctccttcacgaggaggacacatggatgatggtggatattccatgaattttaacatgagttcttccaggggaccactcccagtaaaaagaggaccaccaccaagaagtgggggtccttctcctaagagatctgcaccttcaggactagttcgcagcagcagtggaatgggaggaagagctcctctatcacgtggaagagatagttatggaggtccacctcgaagggaaccgctcccctctcgtagagatgtttatttgtccccaagagatgatgggtattctactaaagacagctattcaagcagagattacccaagttctcgtgatacaagagattatgcaccaccaccacgagattatacttaccgtgattatggtcattccagttcacgtgatgactatccatcaagaggctatggcgatagagatggatatggtcgtgatcgtgactattcagatcatccaagtggaggttcctacagagattcatatgagagttatggtaactcacgtagtgctccacttacacgagggcccccgccatcttatggtggaagcagtcgctatgatgattatagcagctcacgtgatggatatggtggaagtcgagacagttactcaagcagccgaagtgatctctactcaagttgtgacagggttggcagacaagaaagagggcttcccccttctgtagaaagggggtacccttcttcacgtgattcctacagcagttcaagccgcggagcaccaagaggtgctggccctggaggaagccgatctgatagagggggaggcagaagcagatactagaaacaaacaaaactttggaccaaaatcccagttcaaagaaacaaaaaaaagagtggaaactattctatcataactacccaaggactactaaaaggaaaaattgtgttaccttttttaaattccctgttaagtcccttccgtaatttttatgttcttgtgaggaaaaaagtaaaacatgtttaattttatttgactttatgacattgcttttcaacaagcaaatgttaaatgtgttaagccttgtagtactagtgttgtaactttccaagtaaaggtgtccctaaagaccacttcctatctggtttttcccagtaaatgaggcaagcaattctaagatcttccacaaaacatctagccaactaaaatggagagatgaatcattctgcctatacaaacaagctagctattagagggtggttggagtatgctactcataagatttcagggtgttttctaactgaaatctcactgttctcagtatgcaaaacctgaaatcagatgcctatgtaaggaaagtgctattcacccagtaaacccaaaaaaagcaaatggataatgctggccattttgcctttctgacatttccttgggaatctgcaagaacctcccctttcccctcccacaataagaccatttaagtgtgtgctaaacaactacggaatactaaataaaaagtttggccaaaaccaaccatgaagctgcaaaggtgcttgctcttactctttcaaatttttgcaactctaatgtctcacttttaaaggaacagcttgattgcaaaggagaaaatagataagcaatgaatttatctccaacttcctaaaggcttatgacttctaaaaagtgaatctatcagcattccacatcagatttaaagcatcaaatgcctgtgaaacagcaaagatggttgaagattgtgctcattatgtttgtggagtgctgattgattcacagtagataacgctggcagtaagagaaatcaaatgctaagagttgttgaagcagaaggcggctgattgttggtaagtcagtgcagttgcataagcagtgctgtcagaattggtttggtgcaggcaatagattttgccttcaagggttcctgtggatctcaggaaggcatcagtgttgattaacactcataactagggagtgagtggtagttacttaagtaattgaccaaatggaaaaggggaagtaattaaggaaattggtaagtggaggtagtcaggaggttctcgtggtcctttacacagattttacagctttgggtttcattttgtttagctaaagtcatggggacaactcttcaatttagaacttaagatgaattataaaaatgatggatataagtggtagctctatctggtgaagtgtcttgtcagtaagtgaaacatttttttgtggtggcttatccacaaacagtttagttgtagaataaaacttatgagtgacatctggaaagtaacaaccatgctaagatggcaaacacactggaaacaattgggccacttggctttcttttgctgtattgttttataagcctgctttacctccccgtcttggaaacaagttttagtttattgctttggagactagagccaatagtgtaatgttctcaaaggaaacagacttgagttgttggattagaggaactaactcaacttctaattttttttgttgtaattatggcactgtcatgttttaacatttgcaactagggatagtaagtacaacatttttaactctcatttggcagactactactaatcacagaccacaagggtaatgaccaaatttatgtggttgttacacttccatagttgtcttagccgaatccttccatattcttatgattacttgggttaaagcttctgtgaggaccttttggctcttaagatatcctaaatatttaaaatatttagatatcctaaatataggatatagagtttgtaccaaatatgaatgaatattgttcaaagcaaggagtatgttaaaatgaccagacacctgtttgataaatagtttactgaactagcagacgtgtggaaaaagaatcagatcttgattcttctgggtttatactggttgtaaaacagaatgatattagaaaatgttttccttgtttaagtggtagttgaacatagaacttgggtattatagatcacttttcactttttggaatgttttgtattgaaacttaatacaactttaacatggcaaaaaaaaaaaaaatccaaaatctatgagataattttgttaaagttggcttgcttgggcgggtgcttggtccagagggagaaaagaaggcatgatttcagaatactctggcagctttttaaattcagctttatcaagttacagtaaactgtatctgtttagaattacaactcaatggttattttgacagatgtatatgccatgaagccactgtcaccatcaacatgcagaacacttccatcgcccccaaaagattcctcaagttcctttgcagtccatccctcacgctgctgatttgtctttgtcaccatatattagtttgctttgtggtggtgtttagtattttatataaatgggattgtgtagcatgtacttttttgtttatggtttctttcacacacaatgactttgaaattcaccaggttgcagtgtatcagtagcttattccttttattgctgagtagtgtcccattatgtgaatatgccattatttgtttttctactcacctgttgatggaccttgggattgtttccagtttgggg

SEQ ID NO: 1658 - protein, 56 aa, Homo sapiens
MFLAQRSLCSLSGRAKFLKTISSSKILGFSTSAEHSVVFLCHLVAKESNFPGFLNG

SEQ ID NO: 1659 - DNA, 259 bp, Homo sapiens
agggaggcgaggttcccgcaccggatagcatgtttttggcccagaggagcctctgctctcttagcggtagagcaaaattcctgaagacaatttcttcttccaaaatcctcggattctctacttctgctatgtatatgccatgaagccactgtcaccatcaacatgcagaacacttccatcgcccccaaaagattcctcaagttcctttgcagtccatccctcacgctgctgatttgtctttgtcaccatatattagttt

SEQ ID NO: 1660 - protein, 37 aa, Homo sapiens
MFLAQRSLCSLSGRAKFLKTISSSKILGFSTSAMYMP

SEQ ID NO: 1661 - DNA, 3165 bp, Homo sapiens
attacaaaggttgcttaacttctaattatttgatcactgaggaaaatccagaaagctacacaacactgaaggggtgaaataaaagtccagcgatccagcgaaagaaaagagaagtgacagaaacaactttacctggactgaagataaaagcacagacaagagaacaatgccctggacatggctccagagatccacatgacaggcccaatgtgcctcattgagaacactaatggggaactggtggcgaatccagaagctctgaaaatcctgtctgccattacacagcctgtggtggtggtggcaattgtgggcctctaccgcacaggaaaatcctacctgatgaacaagctagctgggaagaataagggcttctctctgggctccacagtgaaatctcacaccaaaggaatctggatgtggtgtgtgcctcaccccaaaaagccagaacacaccttagtcctgcttgacactgagggcctgggagatgtaaagaagggtgacaaccagaatgactcctggatcttcaccctggccgtcctcctgagcagcactctcgtgtacaatagcatgggaaccatcaaccagcaggctatggaccaactgtagtatccttttgtgacccagaacagcaccaaggtcagaggggacacctgtattcataaaccagctgcctgactgtgaatcctgatgaatcaagctcaaaaggagaaaacaaaaaataatgcaagtacagaggagagatcccatctatgtgacagagctgacacatcgaatccgatcaaaatcctcacctgatgagaatgagaatgaggattcagctgactttgtgagcttcttcccagattttgtgtggacactgagagatttctccctggacttggaagcagatggacaacccctcacaccagatgagtacctggagtattccctgaagctaacgcaaggtaccagtcaaaaagataaaaattttaatctgccccgactctgtatccggaagttcttcccaaagaaaaaatgttttgtcttcgatctgcccattcaccgcaggaagcttgcccagcttgagaaactacaagatgaagagctggaccctgaatttgtgcaacaagtagcagacttctgttcctacatctttagcaattccaaaactaaaactctttcaggaggcatcaaggtcaatgggcctcgtctagagagcctagtgctgacctatatcaatgctatcagcagaggggatctgccctgcatggagaacgcagtcctggccttggcccagatagagaactcagccgcagtgcaaaaggctattgcccactatgaccagcagatgggccagaaggtgcagctgcccgcagaaaccctccaggagctgctggacctgcacagggttagtgagagggaggccactgaagtctatatgaagaactctttcaaggatgtggaccatctgtttcaaaagaaattagcggcccagctagacaaaaagcgggatgacttttgtaaacagaatcaagaagcatcatcagatcgttgctcagctttacttcaggtcattttcagtcctctagaagaagaagtgaaggcgggaatttattcgaaaccagggggctattgtctctttattcagaagctacaagacctggagaaaaagtactatgaggaaccaaggaaggggatacaggctgaagagattctgcagacatacttgaaatccaaggagtctgtgaccgatgcaattctacagacagaccagattctcacagaaaaggaaaaggagattgaagtggaatgtgtaaaagctgaatctgcacaggcttcagcaaaaatggtggaggaaatgcaaataaagtatcagcagatgatggaagagaaagagaagagttatcaagaacatgtgaaacaattgactgagaagatggagagggagagggcccagttgctggaagagcaagagaagaccctcactagtaaacttcaggaacaggcccgagtactaaaggagagatgccaaggtgaaagtacccaacttcaaaatgagatacaaaagctacagaagaccctgaaaaaaaaaaccaagagatatatgtcgcataagctaaagatctaaacaacagagcttttctgtcatcctaacccaaggcataactgaaacaattttagaatttggaacaagtgtcactatatttgataataattagatcttgcatcataacactaaaagtttacaagaacatgcagttcaatgatcaaaatcatgttttttccttaaaaagattgtaaattgtgcaacaaagatgcatttacctctgtaccaacagaggagggatcatgagttgccaccactcagaagtttattcttccagacgaccagtggatactgaggaaagtcttaggtaaaaatcttgggacatatttgggcactggtttggccaagtgtacaatgggtcccaatatcagaaacaaccatcctagcttcctagggaagacagtgtacagttctccattatatcaaggctacaaggtctatgagcaataatgtgatttctggacattgcccatggataattctcactgatggatctcaagctaaagcaaaccatcttatacagagatctagaatcttatattttccataggaaggtaaagaaatcattagcaagagtaggaattgaatcataaacaaattggctaatgaagaaatcttttctttcttgttcaattcatctagattataaccttaatgtgacacctgagacctttagacagttgaccctgaattaaatagtcacatggtaacaattatgcactgtgtaattttagtaatgtataacatgcaatgatgcactttaactgaagatagagactatgttagaaaattgaactaatttaattatttgattgttttaatcctaaagcataagttagtcttttcctgattcttaaaggtcatacttgaaatcctgccaattttccccaaagggaatatggaatttttttgactttcttttgagcaataaaataattgtcttgccattacttagtatatgtagacttcatcccaattgtcaaacatcctaggtaagtggttgacatttcttacagcaattacagattatttttgaactagaaataaactaaactagaaataaaataagtttcactagt

SEQ ID NO: 1662 - protein, 461 aa, Homo sapiens
MQVQRRDPIYVTELTHRIRSKSSPDENENEDSADFVSFFPDFVWTLRDFSLDLEADGQPLTPDEYLEYSLKLTQGTSQKDKNFNLPRLCIRKFFPKKKCFVFDLPIHRRKLAQLEKLQDEELDPEFVQQVADFCSYIFSNSKTKTLSGGIKVNGPRLESLVLTYINAISRGDLPCMENAVLALAQIENSAAVQKAIAHYDQQMGQKVQLPAETLQELLDLHRVSEREATEVYMKNSFKDVDHLFQKKLAAQLDKKRDDFCKQNQEASSDRCSALLQVIFSPLEEEVKAGIYSKPGGYCLFIQKLQDLEKKYYEEPRKGIQAEEILQTYLKSKESVTDAILQTDQILTEKEKEIEVECVKAESAQASAKMVEEMQIKYQQMMEEKEKSYQEHVKQLTEKMERERAQLLEEQEKTLTSKLQEQARVLKERCQGESTQLQNEIQKLQKTLKKKTKRYMSHKLKI

SEQ ID NO: 1663 - DNA, 2540 bp, Homo sapiens
gctctgaagccattacaaaggttgcttaacttctaattatttgatcactgaggaaaatccagaaagctacacaacactgaaggggtgaaataaaagtccagcgatccagcgaaagaaaagagaagtgacagaaacaactttacctggactgaagataaaagcacagacaagagaacaatgccctggacatggctccagagatccacatgacaggcccaatgtgcctcattgagaacactaatggggaactggtggcgaatccagaagctctgaaaatcctgtctgccattacacagcctgtggtggtggtggcaattgtgggcctctaccgcacaggaaaatcctacctgatgaacaagctagctgggaagaataagggcttctctctgggctccacagtgaaatctcacaccaaaggaatctggatgtggtgtgtgcctcaccccaaaaagccagaacacaccttagtcctgcttgacactgagggcctgggagatgtaaagaagggtgacaaccagaatgactcctggatcttcaccctggccgtcctcctgagcagcactctcgtgtacaatagcatgggaaccatcaaccagcaggctatggaccaactgtactatgtgacagagctgacacatcgaatccgatcaaaatcctcacctgatgagaatgagaatgaggattcagctgactttgtgagcttcttcccagattttgtgtggacactgagagatttctccctggacttggaagcagatggacaacccctcacaccagatgagtacctggagtattccctgaagctaacgcaaggtaccagtcaaaaagataaaaattttaatctgccccgactctgtatccggaagttcttcccaaagaaaaaatgttttgtcttcgatctgcccattcaccgcaggaagcttgcccagcttgagaaactacaagatgaagagctggaccctgaatttgtgcaacaagtagcagacttctgttcctacatctttagcaattccaaaactaaaactctttcaggaggcatcaaggtcaatgggcctcgctgaagagattctgcagacatacttgaaatccaaggagtctgtgaccgatgcaattctacagacagaccagattctcacagaaaaggaaaaggagattgaagtggaatgtgtaaaagctgaatctgcacaggcttcagcaaaaatggtggaggaaatgcaaataaagtatcagcagatgatggaagagaaagagaagagttatcaagaacatgtgaaacaattgactgagaagatggagagggagagggcccagttgctggaagagcaagagaagaccctcactagtaaacttcaggaacaggcccgagtactaaaggagagatgccaaggtgaaagtacccaacttcaaaatgagatacaaaagctacagaagaccctgaaaaaaaaaaccaagagatatatgtcgcataagctaaagatctaaacaacagagcttttctgtcatcctaacccaaggcataactgaaacaattttagaatttggaacaagtgtcactatatttgataataattagatcttgcatcataacactaaaagtttacaagaacatgcagttcaatgatcaaaatcatgttttttccttaaaaagattgtaaattgtgcaacaaagatgcatttacctctgtaccaacagaggagggatcatgagttgccaccactcagaagtttattcttccagacgaccagtggatactgaggaaagtcttaggtaaaaatcttgggacatatttgggcactggtttggccaagtgtacaatgggtcccaatatcagaaacaaccatcctagcttcctagggaagacagtgtacagttctccattatatcaaggctacaaggtctatgagcaataatgtgatttctggacattgcccatggataattctcactgatggatctcaagctaaagcaaaccatcttatacagagatctagaatcttatattttccataggaaggtaaagaaatcattagcaagagtaggaattgaatcataaacaaattggctaatgaagaaatcttttctttcttgttcaattcatctagattataaccttaatgtgacacctgagacctttagacagttgaccctgaattaaatagtcacatggtaacaattatgcactgtgtaattttagtaatgtataacatgcaatgatgcactttaactgaagatagagactatgttagaaaattgaactaatttaattatttgattgttttaatcctaaagcataagttagtcttttcctgattcttaaaggtcatacttgaaatcctgccaattttccccaaagggaatatggaatttttttgactttcttttgagcaataaaataattgtcttgccattacttagtatatgtagacttcatcccaattgtcaaacatcctaggtaagtggttgacatttcttacagcaattacagattatttttgaactagaaataaactaaactagaaataaaataagtttcactagt

SEQ ID NO: 1664 - protein, 290 aa, Homo sapiens
MAPEIHMTGPMCLIENTNGELVANPEALKILSAITQPVVVVAIVGLYRTGKSYLMNKLAGKNKGFSLGSTVKSHTKGIWMWCVPHPKKPEHTLVLLDTEGLGDVKKGDNQNDSWIFTLAVLLSSTLVYNSMGTINQQAMDQLYYVTELTHRIRSKSSPDENENEDSADFVSFFPDFVWTLRDFSLDLEADGQPLTPDEYLEYSLKLTQGTSQKDKNFNLPRLCIRKFFPKKKCFVFDLPIHRRKLAQLEKLQDEELDPEFVQQVADFCSYIFSNSKTKTLSGGIKVNGPR

SEQ ID NO: 1665 - DNA, 2950 bp, Homo sapiens
cagtttcattaggctctgaagccattacaaaggttgcttaacttctaattatttgatcactgaggaaaatccagaaagctacacaacactgaaggggtgaaataaaagtccagcgatccagcgaaagaaaagagaagtgacagaaacaactttacctggactgaagataaaagcacagacaagagaacaatgccctggacatggctccagagatccacatgacaggcccaatgtgcctcattgagaacactaatggggaactggtggcgaatccagaagctctgaaaatcctgtctgccattacacagcctgtggtggtggtggcaattgtgggcctctaccgcacaggaaaatcctacctgatgaacaagctagctgggaagaataagggcttctctctgggctccacagtgaaatctcacaccaaaggaatctggatgtggtgtgtgcctcaccccaaaaagccagaacacaccttagtcctgcttgacactgagggcctgggagatgtaaagaagggtgacaaccagaatgactcctggatcttcaccctggccgtcctcctgagcagcactctcgtgtacaatagcatgggaaccatcaaccagcaggctatggaccaactgtactatgtgacagagctgacacatcgaatccgatcaaaatcctcacctgatgagaatgagaatgaggattcagctgactttgtgagcttcttcccagattttgtgtggacactgagagatttctccctggacttggaagcagatggacaacccctcacaccagatgagtacctggagtattccctgaagctaacgcaaggtaacagagaccttgcccagcttgagaaactacaagatgaagagctggaccctgaatttgtgcaacaagtagcagacttctgttcctacatctttagcaattccaaaactaaaactctttcaggaggcatcaaggtcaatgggcctcgtctagagagcctagtgctgacctatatcaatgctatcagcagaggggatctgccctgcatggagaacgcagtcctggccttggcccagatagagaactcagccgcagtgcaaaaggctattgcccactatgaccagcagatgggccagaaggtgcagctgcccgcagaaaccctccaggagctgctggacctgcacagggttagtgagagggaggccactgaagtctatatgaagaactctttcaaggatgtggaccatctgtttcaaaagaaattagcggcccagctagacaaaaagcgggatgacttttgtaaacagaatcaagaagcatcatcagatcgttgctcagctttacttcaggtcattttcagtcctctagaagaagaagtgaaggcgggaatttattcgaaaccagggggctattgtctctttattcagaagctacaagacctggagaaaaagtactatgaggaaccaaggaaggggatacaggctgaagagattctgcagacatacttgaaatccaaggagtctgtgaccgatgcaattctacagacagaccagattctcacagaaaaggaaaaggagattgaagtggaatgtgtaaaagctgaatctgcacaggcttcagcaaaaatggtggaggaaatgcaaataaagtatcagcagatgatggaagagaaagagaagagttatcaagaacatgtgaaacaattgactgagaagatggagagggagagggcccagttgctggaagagcaagagaagaccctcactagtaaacttcaggaacaggcccgagtactaaaggagagatgccaaggtgaaagtacccaacttcaaaatgagatacaaaagctacagaagaccctgaaaaaaaaaaccaagagatatatgtcgcataagctaaagatctaaacaacagagcttttctgtcatcctaacccaaggcataactgaaacaattttagaatttggaacaagtgtcactatatttgataataattagatcttgcatcataacactaaaagtttacaagaacatgcagttcaatgatcaaaatcatgttttttccttaaaaagattgtaaattgtgcaacaaagatgcatttacctctgtaccaacagaggagggatcatgagttgccaccactcagaagtttattcttccagacgaccagtggatactgaggaaagtcttaggtaaaaatcttgggacatatttgggcactggtttggccaagtgtacaatgggtcccaatatcagaaacaaccatcctagcttcctagggaagacagtgtacagttctccattatatcaaggctacaaggtctatgagcaataatgtgatttctggacattgcccatggataattctcactgatggatctcaagctaaagcaaaccatcttatacagagatctagaatcttatattttccataggaaggtaaagaaatcattagcaagagtaggaattgaatcataaacaaattggctaatgaagaaatcttttctttcttgttcaattcatctagattataaccttaatgtgacacctgagacctttagacagttgaccctgaattaaatagtcacatggtaacaattatgcactgtgtaattttagtaatgtataacatgcaatgatgcactttaactgaagatagagactatgttagaaaattgaactaatttaattatttgattgttttaatcctaaagcataagttagtcttttcctgattcttaaaggtcatacttgaaatcctgccaattttccccaaagggaatatggaatttttttgactttcttttgagcaataaaataattgtcttgccattacttagtatatgtagacttcatcccaattgtcaaacatcctaggtaagtggttgacatttcttacagcaattacagattatttttgaactagaaataaactaaactagaaataaaataagtttcactagt

SEQ ID NO: 1666 - protein, 563 aa, Homo sapiens [sequence omitted]

SEQ ID NO: 1667 - DNA, 1928 bp, Homo sapiens
gcagacttctgttcctacatctttagcaattccaaaactaaaactctttcaggaggcatcaaggtcaatgggcctcgtctagagagcctagtgctgacctatatcaatgctatcagcagaggggatctgccctgcatggagaacgcagtcctggccttggcccagatagagaactcagccgcagtgcaaaaggctattgcccactatgaccagcagatgggccagaaggtgcagctgcccgcagaaaccctccaggagctgctggacctgcacagggttagtgagagggaggccactgaagtctatatgaagaactctttcaaggatgtggaccatctgtttcaaaagaaattagcggcccagctagacaaaaagcgggatgacttttgtaaacagaatcaagaagcatcatcagatcgttgctcagctttacttcaggtcattttcagtcctctagaagaagaagtgaaggcgggaatttattcgaaaccagggggctattgtctctttattcagaagctacaagacctggagaaaaagtactatgaggaaccaaggaaggggatacaggctgaagagattctgcagacatacttgaaatccaaggagtctgtgaccgatgcaattctacagacagaccagattctcacagaaaaggaaaaggagattgaagtggaatgtgtaaaagctgaatctgcacaggcttcagcaaaaatggtggaggaaatgcaaataaagtatcagcagatgatggaagagaaagagaagagttatcaagaacatgtgaaacaattgactgagaagatggagagggagagggcccagttgctggaagagcaagagaagaccctcactagtaaacttcaggaacaggcccgagtactaaaggagagatgccaaggtgaaagtacccaacttcaaaatgagatacaaaagctacagaagaccctgaaaaaaaaaaccaagagatatatgtcgcataagctaaagatctaaacaacagagcttttctgtcatcctaacccaaggcataactgaaacaattttagaatttggaacaagtgtcactatatttgataataattagatcttgcatcataacactaaaagtttacaagaacatgcagttcaatgatcaaaatcatgttttttccttaaaaagattgtaaattgtgcaacaaagatgcatttacctctgtaccaacagaggagggatcatgagttgccaccactcagaagtttattcttccagacgaccagtggatactgaggaaagtcttaggtaaaaatcttgggacatatttgggcactggtttggccaagtgtacaatgggtcccaatatcagaaacaaccatcctagcttcctagggaagacagtgtacagttctccattatatcaaggctacaaggtctatgagcaataatgtgatttctggacattgcccatggataattctcactgatggatctcaagctaaagcaaaccatcttatacagagatctagaatcttatattttccataggaaggtaaagaaatcattagcaagagtaggaattgaatcataaacaaattggctaatgaagaaatcttttctttcttgttcaattcatctagattataaccttaatgtgacacctgagacctttagacagttgaccctgaattaaatagtcacatggtaacaattatgcactgtgtaattttagtaatgtataacatgcaatgatgcactttaactgaagatagagactatgttagaaaattgaactaatttaattatttgattgttttaatcctaaagcataagttagtcttttcctgattcttaaaggtcatacttgaaatcctgccaattttccccaaagggaatatggaatttttttgactttcttttgagcaataaaataattgtcttgccattactt

SEQ ID NO: 1668 - protein, 286 aa, Homo sapiens [sequence omitted]

SEQ ID NO: 1669 - DNA, 3039 bp, Homo sapiens
attacaaaggttgcttaacttctaattatttgatcactgaggaaaatccagaaagctacacaacactgaaggggtgaaataaaagtccagcgatccagcgaaagaaaagagaagtgacagaaacaactttacctggactgaagataaaagcacagacaagagaacaatgccctggacatggctccagagatccacatgacaggcccaatgtgcctcattgagaacactaatggggaactggtggcgaatccagaagctctgaaaatcctgtctgccattacacagcctgtggtggtggtggcaattgtgggcctctaccgcacaggaaaatcctacctgatgaacaagctagctgggaagaataagggcttctctctgggctccacagtgaaatctcacaccaaaggaatctggatgtggtgtgtgcctcaccccaaaaagccagaacacaccttagtcctgcttgacactgagggcctgggagatgtaaagaagggtgacaaccagaatgactcctggatcttcaccctggccgtcctcctgagcagcactctcgtgtacaatagcatgggaaccatcaaccagcaggctatggaccaactgtagtatccttttgtgacccagaacagcaccaaggtcagaggggacacctgtattcataaaccagctgcctgactgtgaatcctgatgaatcaagctcaaaaggagaaaacaaaaaataatgcaagtacagaggagagatcccatctatgtgacagagctgacacatcgaatccgatcaaaatcctcacctgatgagaatgagaatgaggattcagctgactttgtgagcttcttcccagattttgtgtggacactgagagatttctccctggacttggaagcagatggacaacccctcacaccagatgagtacctggagtattccctgaagctaacgcaaggtaccagtcaaaaagataaaaattttaatctgccccgactctgtatccggaagttcttcccaaagaaaaaatgttttgtcttcgatctgcccattcaccgcaggaagcttgcccagcttgagaaactacaagatgaagagctggaccctgaatttgtgcaacaagtagcagacttctgttcctacatctttagcaattccaaaactaaaactctttcaggaggcatcaaggtcaatgggcctcgtctagagagcctagtgctgacctatatcaatgctatcagcagaggggatctgccctgcatggagaacgcagtcctggccttggcccagatagagaactcagccgcagtgcaaaaggctattgcccactatgaccagcagatgggccagaaggtgcagctgcccgcagaaaccctccaggagctgctggacctgcacagggttagtgagagggaggccactgaagtctatatgaagaactctttcaaggatgtggaccatctgtttcaaaagaaattagcggcccagctagacaaaaagcgggatgacttttgtaaacagaatcaagaagcatcatcagatcgttgctcagctttacttcaggtcattttcagtcctctagaagaagaagtgaaggcgggaatttattcgaaaccagggggctattgtctctttattcagaagctacaagacctggagaaaaagtactatgaggaaccaaggaaggggatacaggctgaagagattctgcagacatacttgaaatccaaggagtctgtgaccgatgcaattctacagacagaccagattctcacagaaaaggaaaaggagattgaagtggaatgtgtaaaagctgaatctgcacaggcttcagcaaaaatggtggaggaaatgcaaataaagtatcagcagatgatggaagagaaagagaagagttatcaagaacatgtgaaacaattgactgagaagatggagagggagagggcccagttgctggaagagcaagagaagaccctcactagtaaacttcaggaacaggcccgagtactaaaggagagatgccaaggtgaaagtacccaacttcaaaatgagatacaaaagctacagaagaccctgaaaaaaaaaaccaagagatatatgtcgcataagctaaagatctaaacaacagagcttttctgtcatcctaacccaaggcataactgaaacaattttagaatttggaacaagtgtcactatatttgataataattagatcttgcatcataacactaaaagtttacaagaacatgcagttcaatgatcaaaatcatgttttttccttaaaaagattgtaaattgtgcaacaaagatgcatttacctctgtaccaacagaggagggatcatgagttgccaccactcagaagtttattcttccagacgaccagtggatactgaggaaagtcttaggtaaaaatcttgggacatatttgggcactggtttggccaagtgtacaatgggtcccaatatcagaaacaaccatcctagcttcctagggaagacagtgtacagttctccattatatcaaggctacaaggtctatgagcaataatgtgatttctggacattgcccatggataattctcactgatggatctcaagctaaagcaaaccatcttatacagagatctagaatcttatattttccataggaaggtaaagaaatcattagcaagagtaggaattgaatcataaacaaattggctaatgaagaaatcttttctttcttgttcaattcatctagattataaccttaatgtgacacctgagacctttagacagttgaccctgaattaaatagtcacatggtaacaattatgcactgtgtaattttagtaatgtataacatgcaatgatgcactttaactgaagatagagactatgttagaaaattgaactaatttaattatttgattgttttaatcctaaagcataagttagtcttttcctgattcttaaaggtcatacttgaaatcctgccaattttccccaaagggaatatggaatttttttgactttcttttgagcaataaaataattgtcttgccattactt

SEQ ID NO: 1670 - protein, 461 aa, Homo sapiens; identical to SEQ ID NO: 1662

SEQ ID NO: 1671 - DNA, 507 bp, Homo sapiens
cctccctgcatccccacagttctctccctctcttcctccctctatctgaatcactctgatttgctctctcaaggagggcttcattctccagtcagctcagcccatatggaaccacagcatcaaatttagagccctcaatttgaaaaggacagggaatcttatttcccagtatctgtatcatcctcctaaataagactctgctaagtagggtcatctgattggccagcttggagcatgtatctggccctgtgatagggaatcttgaccaccaggcacaccagggccaagaggaagaattctcagaagaaaagatggtgggcagaagaacaggaaaacctgcttacagccatttcctacttctcactctgtgttctctgggtcctaaggctgaagagattctgcagacatacttgaaatccaaggagtctgtgaccgatgcaattctacagacagaccagattctcacagaaaaggaaaaggagattgaagtggaatgtgtaaaagctg

SEQ ID NO: 1672 - protein, 64 aa, Homo sapiens
MVGRRTGKPAYSHFLLLTLCSLGPKAEEILQTYLKSKESVTDAILQTDQILTEKEKEIEVECVK

SEQ ID NO: 1673 - DNA, 1509 bp, Homo sapiens
gctctgaagccattacaaaggttgcttaacttctaattatttgatcactgaggaaaatccagaaagctacacaacactgaaggggtgaaataaaagtccagcgatccagcgaaagaaaagagaagtgacagaaacaactttacctggactgaagataaaagcacagacaagagaacaatgccctggacatggctccagagatccacatgacaggcccaatgtgcctcattgagaacactaatggggaactggtggcgaatccagaagctctgaaaatcctgtctgccattacacagcctgtggtggtggtggcaattgtgggcctctaccgcacaggaaaatcctacctgatgaacaagctagctgggaagaataagggcttctctctgggctccacagtgaaatctcacaccaaaggaatctggatgtggtgtgtgcctcaccccaaaaagccagaacacaccttagtcctgcttgacactgagggcctgggagatgtaaagaagggtgacaaccagaatgactcctggatcttcaccctggccgtcctcctgagcagcactctcgtgtacaatagcatgggaaccatcaaccagcaggctatggaccaactgtactatgtgacagagctgacacatcgaatccgatcaaaatcctcacctgatgagaatgagaatgaggattcagctgactttgtgagcttcttcccagattttgtgtggacactgagagatttctccctggacttggaagcagatggacaacccctcacaccagatgagtacctggagtattccctgaagctaacgcaaggtaccagtcaaaaagataaaaattttaatctgccccgactctgtatccggaagttcttcccaaagaaaaaatgttttgtcttcgatctgcccattcaccgcaggaagcttgcccagcttgagaaactacaagatgaagagctggaccctgaatttgtgcaacaagtagcagacttctgttcctacatctttagcaattccaaaactaaaactctttcaggaggcatcaaggtcaatgggcctcgtctagagagcctagtgctgacctatatcaatgctatcagcagaggggatctgccctgcatggagaacgcagtcctggccttggcccagatagagaactcagccgcagtgcaaaaggctattgcccactatgaccagcagatgggccagaaggtgcagctgcccgcagaaaccctccaggagctgctggacctgcacagggttagtgagagggaggccactgaagtctatatgaagaactctttcaaggatgtggaccatctgtttcaaaagaaattagcggcccagctagacaaaaagcgggatgacttttgtaaacagaatcaagaagcatcatcagatcgttgctcagctttacttcaggtcattttcagtcctctagaagaagaagtgaaggcgggaatttattcgaaaccagggggctattgtctctttattcagaagctacaagacc

SEQ ID NO: 1674 - protein, 439 aa, Homo sapiens
MAPEIHMTGPMCLIENTNGELVANPEALKILSAITQPVVVVAIVGLYRTGKSYLMNKLAGKNKGFSLGSTVKSHTKGIWMWCVPHPKKPEHTLVLLDTEGLGDVKKGDNQNDSWIFTLAVLLSSTLVYNSMGTINQQAMDQLYYVTELTHRIRSKSSPDENENEDSADFVSFFPDFVWTLRDFSLDLEADGQPLTPDEYLEYSLKLTQGTSQKDKNFNLPRLCIRKFFPKKKCFVFDLPIHRRKLAQLEKLQDEELDPEFVQQVADFCSYIFSNSKTKTLSGGIKVNGPRLESLVLTYINAISRGDLPCMENAVLALAQIENSAAVQKAIAHYDQQMGQKVQLPAETLQELLDLHRVSEREATEVYMKNSFKDVDHLFQKKLAAQLDKKRDDFCKQNQEASSDRCSALLQVIFSPLEEEVKAGIYSKPGGYCLFIQKLQ

SEQ ID NO: 1675 - DNA, 1359 bp, Homo sapiens
taacaccatgattttatctgacctgtgtctcacatcaggctcagctgcagcctaatttggtcctggtcatttttaagaaaatgaactgacttataaattccttcccatccttgccacaacgttataggctccacgtccctgagctgaggtacttcagagctggagaggaagcaataggagttcttacctgtgcttttatcttcagtccagattatgtcttgtattacggaaatcattcaatttttcaccagagaataaggatgactacaattcaaaaggctgacctatccaggtgaagatgagagtgtgcagcattggaaattcttacacattgctggagatttagaagctaaagaaagaggacaaatgatttggaagcaaagataagaaggaagaagggtgatccgcccacttcggcctcccagtgtgctgagattacaggtgtgagccactgcgcccagctcttctagcctgttttaacagatatctgcaagaggcttggatcatgctgacctaacccaggaaattttaaatttactccagacaggaaccagaatcaacataacctacgagactttgattagaatctaacaggtacctgagtgccttttgtaagtaaatggctctagttgctcaattggccactgctctgccaccaggatccctagaagagaccagataaacctgaagcacgtagctaatcacttccatgccgtgatggaatgcagtgctgtctgccaacaagtttgagccagtctttcaagatgcatcctgagtggctaactgggcctgcatttcaagttgagccaagggaccatttgctaacgaggggacacacacatgttctgagttcacccaaaacacataccttattattttggggcttttcagcccacctgcctctgctaatcagggctcagctgtattgacccattagaactcagctgggttgaccaatcagaactaagtgagtttggagttttaattctcaattgaatgaacagacctgattgggaacctgcgtgggaactttggctattaaacctgagcattctttctgttctctggaagaaataatgtttaagttgctaacactttatgcattttcctaaaattgaatcaaacaactccttttgaaacataaccctgatatcagggaagtcgtacaacaccgtgctaaataattttatacctctaaccaaggtctgtgccctaatcagcaggaagtgccagagtgtctgtcacccattctccctcaagattgagaaatgaacaatgaaaaaagggggatttgaaaatgcagaaccagcccaatgtggttcaagtttgtgtaataaaataatgcgttgttttactgtt

SEQ ID NO: 1676 - protein, 68 aa, Homo sapiens
MQCCLPTSLSQSFKMHPEWLTGPAFQVEPRDHLLTRGHTHVLSSPKTHTLLFWGFSAHLPLLIRAQLY

SEQ ID NO: 1677 - DNA, 1812 bp, Homo sapiens
gagtcactctgatatttgctttctcaatgatggcttcattccccagcaggctcagcccatatgggaccacagcattaacagttccaaacttagagcccttaatctaaacaggacagagactctccttttcccagtatctatattagcctactaaaaatgactgctaagtaggatgttctgatcggcttgccaggagcatgtgtctgtcgctccgacagggaatttgaccaccaaggacaatagggccaagagaaagaattcccagaggagaaaggatggcaggaagacaaacaggaacacctgcttacagccatttcctacttctcactctgtgttctctgggtcctaaggctgaagagattctgcagacatacttgaaatccaaggagtctatgactgatgcaattctccagacagaccagactctcacagaaaaagaaaaggagattgaagtggaacgtgtgaaagctgagtctgcacaggcttcagcaaaaatgttgcaggaaatgcaaagaaagaatgagcagatgatggaacagaaggagaggagttatcaggaacacttgaaacaactgactgagaagatggagaacgacagggtccagttgctgaaagagcaagagaggaccctcgctcttaaacttcaggaacaggagcaactactaaaagagggatttcaaaaagaaagcagaataatgaaaaatgagatacaggatctccagacgaaaatgagacgacgaaaggcatgtaccataagctaaagaccagagccttcctgtcacccctaaccaaggcataattgaaacaattttagaatttggaacaagcgtcactacatttgataataattagatcttgcatcataacaccaaaagtttataaaggcatgtggtacaatgatcaaaatcatgttttttcttaaaaaaaaaaaaagactgtaaattgtgcaacaaagatgcatttacctctgtatcaactcaggaaatctcataagctggtaccactcaggagaagtttattcttccagatgaccagcagtagacaaatggatactgagcagagtcttaggtaaaagtcttgggaaatatttgggcattggtctggccaagtctacaatgtcccaatatcaaggacaaccaccctagcttcttagtgaagacaatgtacagttatccgttagatcaagactacacggtctatgagcaataatgtgatttctggacattgcccatgtataatcctcactgatgatttcaagctaaagcaaaccaccttatacagagatctagaatctctttatgttctccagaggaaggtggaagaaaccatgggcaggagtaggaattgagtgataaacaattgggctaatgaagaaaacttctcttattgttcagttcatccagattataacttcaatgggacactttagaccattagacaattgacactggattaaacaaattcacataatgccaaatacacaatgtatttatagcaacgtataatttgcaaagatggactttaaaagatgctgtgtaactaaactgaaataattcaattacttattatttagaatgttaaagcttatgatagtcttttctaactcttaacactcatacttgaaaactttctgagtttccccagaagagaatatgggattttttttgacatttttgactcatttaataatgctcttgtgtttacctagtatatgtagactttgtcttatgtgtgaaaagtcctaggaaagtggttgatgtttcttatagcaattaaaaattatttttgaactgaaaatacaatgtatttcac

SEQ ID NO: 1678 - protein, 161 aa, Homo sapiens [sequence omitted]

SEQ ID NO: 1679 - DNA, 2049 bp, Homo sapiens
gagtcactctgatatttgctttctcaatgatggcttcattccccagcaggctcagcccatatgggaccacagcattaacagttccaaacttagagcccttaatctaaacaggacagagactctccttttcccagtatctatattagcctactaaaaatgactgctaagtaggatgttctgatcggcttgccaggagcatgtgtctgtcgctccgacagggaatttgaccaccaaggacaatagggccaagagaaagaattcccagaggagaaaggatggcaggaagacaaacaggaacacctgcttacagccatttcctacttctcactctgtgttctctgggtcctaaggctgaagagattctgcagacatacttgaaatccaaggagtctatgactgatgcaattctccagacagaccagactctcacagaaaaagaaaaggagattgaaggtgaggagtgagttaagagattagatggcctcaaaagctccaaaaattgaaataacttgactggataaacatgggaccctttaactagagcaagatccacaaaggtgtgtcttacttgccgaggtcatctctgagtagggcatatgcagtcagcaacaacgacaggtaagtgtataaggaagaatgaggcaacaagataaccccacacaaatttttcttctgccttttcctcctcagtggaacgtgtgaaagctgagtctgcacaggcttcagcaaaaatgttgcaggaaatgcaaagaaagaatgagcagatgatggaacagaaggagaggagttatcaggaacacttgaaacaactgactgagaagatggagaacgacagggtccagttgctgaaagagcaagagaggaccctcgctcttaaacttcaggaacaggagcaactactaaaagagggatttcaaaaagaaagcagaataatgaaaaatgagatacaggatctccagacgaaaatgagacgacgaaaggcatgtaccataagctaaagaccagagccttcctgtcacccctaaccaaggcataattgaaacaattttagaatttggaacaagcgtcactacatttgataataattagatcttgcatcataacaccaaaagtttataaaggcatgtggtacaatgatcaaaatcatgttttttcttaaaaaaaaaaaaagactgtaaattgtgcaacaaagatgcatttacctctgtatcaactcaggaaatctcataagctggtaccactcaggagaagtttattcttccagatgaccagcagtagacaaatggatactgagcagagtcttaggtaaaagtcttgggaaatatttgggcattggtctggccaagtctacaatgtcccaatatcaaggacaaccaccctagcttcttagtgaagacaatgtacagttatccgttagatcaagactacacggtctatgagcaataatgtgatttctggacattgcccatgtataatcctcactgatgatttcaagctaaagcaaaccaccttatacagagatctagaatctctttatgttctccagaggaaggtggaagaaaccatgggcaggagtaggaattgagtgataaacaattgggctaatgaagaaaacttctcttattgttcagttcatccagattataacttcaatgggacactttagaccattagacaattgacactggattaaacaaattcacataatgccaaatacacaatgtatttatagcaacgtataatttgcaaagatggactttaaaagatgctgtgtaactaaactgaaataattcaattacttattatttagaatgttaaagcttatgatagtcttttctaactcttaacactcatacttgaaaactttctgagtttccccagaagagaatatgggattttttttgacatttttgactcatttaataatgctcttgtgtttacctagtatatgtagactttgtcttatgtgtgaaaagtcctaggaaagtggttgatgtttcttatagcaattaaaaattatttttgaactgaaaatacaatgtatttcac

SEQ ID NO: 1680 - protein, 88 aa, Homo sapiens [sequence omitted]

SEQ ID NO: 1681 - DNA, 3804 bp, Homo sapiens
atttgcttttgctgtaaaatagagataatgccacttattctgtatgctagaagtcattactgaattagacataaaacacaaacagctcttagaaaacaatctataaaaataaaatcacactataataaatttaaaaataaaaaacctataaataaaatatttctacaatttttcacttagtaaataagcagcatagtgaagtggttcaagaagagggtatgggatcatgagtgcttgggttcagattagttacagtgttatgattttagacaactaataaagtctttctgtgctcagtttctataaaaccatgaggaaatattatgagttttcagttgtgcgattcatgtaaagccatcagtactgagcctagaacatgagtacaacacatggagccccctcctggctgtgtgctgggcattaagtgccaggggttaggtgttcatgagtgtgttaaacatgtcctttccttatgtactgcacctctcaaagaataggcagctccattgagagtgtgtctattattttaggaaattgtagctgaaaattaacatgatgcctcctcattctaggtttctcaaattgactcaatccatgagacatgtatcattgtattcaaaacctaatgggcattttgttagacaacaaatggtctctaagatttccaacaacaacaaaaaaaatttgaagcttctggttgagaaatctttaaaccctcccactggcacactccactaattccatttatggtagtggagtcagtgatttgaacgaagtactttcagtttcatattactctaaatccattacaaatctgcttagcttctaaatatttcatcaatgaggaaatcccagccctacaacttcggaacagtgaaatattagtccagggatccagtgagagacacagaagtgctagaagccagtgctcgtgaactaaggagaaaaagaacagacaagggaacagcctggacatggcatcagagatccacatgacaggcccaatgtgcctcattgagaacactaatgggcgactgatggcgaatccagaagctctgaagatcctttctgccattacacagcctatggtggtggtggcaattgtgggcctctaccgcacaggcaaatcctacctgatgaacaagctggctggaaagaaaaagggcttctctctgggctccacggtgcagtctcacactaaaggaatctggatgtggtgtgtgccccaccccaagaagccaggccacatcctagttctgctggacaccgagggtctgggagatgtagagaagggtgacaaccagaatgactcctggatcttcgccctggccgtcctcctgagcagcaccttcgtgtacaatagcataggaaccatcaaccagcaggctatggaccaactgtactatgtgacagagctgacacatagaatccgatcaaaatcctcacctgatgagaatgagaatgaggttgaggattcagctgactttgtgagcttcttcccagactttgtgtggacactgagagatttctccctggacttggaagcagatggacaacccctcacaccagatgagtacctgacatactccctgaagctgaagaaaggtaccagtcaaaaagatgaaacttttaacctgcccagactctgtatccggaaattcttcccaaagaaaaaatgctttgtctttgatcggcccgttcaccgcaggaagcttgcccagctcgagaaactacaagatgaagagctggaccccgaatttgtgcaacaagtagcagacttctgttcctacatctttagtaattccaaaactaaaactctttcaggaggcatccaggtcaacgggcctcgtctagagagcctggtgctgacctacgtcaatgccatcagcagtggggatctgccgtgcatggagaacgcagtcctggccttggcccagatagagaactcagctgcagtgcaaaaggctattgcccactatgaacagcagatgggccagaaggtgcagctgcccacagaaaccctccaggagctgctggacctgcacagggacagtgagagagaggccattgaagtcttcatcaggagttccttcaaagatgtggaccatctatttcaaaaggagttagcggcccagctagaaaaaaagcgggatgacttttgtaaacagaatcaggaagcatcatcagatcgttgctcagctttacttcaggtcattttcagtcctctagaagaagaagtgaaggcgggaatttattcgaaaccagggggctatcgtctctttgttcagaagctacaagacctgaagaaaaagtactatgaggaaccgaggaaggggatacaggctgaagagattctgcagacatacttgaaatccaaggagtctatgactgatgcaattctccagacagaccagactctcacagaaaaagaaaaggagattgaagtggaacgtgtgaaagctgagtctgcacaggcttcagcaaaaatgttgcaggaaatgcaaagaaagaatgagcagatgatggaacagaaggagaggagttatcaggaacacttgaaacaactgactgagaagatggagaacgacagggtccagttgctgaaagagcaagagaggaccctcgctcttaaacttcaggaacaggagcaactactaaaagagggatttcaaaaagaaagcagaataatgaaaaatgagatacaggatctccagacgaaaatgagacgacgaaaggcatgtaccataagctaaagaccagagccttcctgtcacccctaaccaaggcataattgaaacaattttagaatttggaacaagcgtcactacatttgataataattagatcttgcatcataacaccaaaagtttataaaggcatgtggtacaatgatcaaaatcatgttttttcttaaaaaaaaaaaaagactgtaaattgtgcaacaaagatgcatttacctctgtatcaactcaggaaatctcataagctggtaccactcaggagaagtttattcttccagatgaccagcagtagacaaatggatactgagcagagtcttaggtaaaagtcttgggaaatatttgggcattggtctggccaagtctacaatgtcccaatatcaaggacaaccaccctagcttcttagtgaagacaatgtacagttatccgttagatcaagactacacggtctatgagcaataatgtgatttctggacattgcccatgtataatcctcactgatgatttcaagctaaagcaaaccaccttatacagagatctagaatctctttatgttctccagaggaaggtggaagaaaccatgggcaggagtaggaattgagtgataaacaattgggctaatgaagaaaacttctcttattgttcagttcatccagattataacttcaatgggacactttagaccattagacaattgacactggattaaacaaattcacataatgccaaatacacaatgtatttatagcaacgtataatttgcaaagatggactttaaaagatgctgtgtaactaaactgaaataattcaattacttattatttagaatgttaaagcttatgatagtcttttctaactcttaacactcatacttgaaaactttctgagtttccccagaagagaatatgggattttttttgacatttttgactcatttaataatgctcttgtgtttacctagtatatgtagactttgtcttatgtgtgaaaagtcctaggaaagtggttgatgtttcttatagcaattaaaaattatttttgaactgaaaatacaatgtatttcac

SEQ ID NO: 1682 - protein, 592 aa, Homo sapiens
MASEIHMTGPMCLIENTNGRLMANPEALKILSAITQPMVVVAIVGLYRTGKSYLMNKLAGKKKGFSLGSTVQSHTKGIWMWCVPHPKKPGHILVLLDTEGLGDVEKGDNQNDSWIFALAVLLSSTFVYNSIGTINQQAMDQLYYVTELTHRIRSKSSPDENENEVEDSADFVSFFPDFVWTLRDFSLDLEADGQPLTPDEYLTYSLKLKKGTSQKDETFNLPRLCIRKFFPKKKCFVFDRPVHRRKLAQLEKLQDEELDPEFVQQVADFCSYIFSNSKTKTLSGGIQVNGPRLESLVLTYVNAISSGDLPCMENAVLALAQIENSAAVQKAIAHYEQQMGQKVQLPTETLQELLDLHRDSEREAIEVFIRSSFKDVDHLFQKELAAQLEKKRDDFCKQNQEASSDRCSALLQVIFSPLEEEVKAGIYSKPGGYRLFVQKLQDLKKKYYEEPRKGIQAEEILQTYLKSKESMTDAILQTDQTLTEKEKEIEVERVKAESAQASAKMLQEMQRKNEQMMEQKERSYQEHLKQLTEKMENDRVQLLKEQERTLALKLQEQEQLLKEGFQKESRIMKNEIQDLQTKMRRRKACTIS

SEQ ID NO: 1683 - DNA, 1793 bp, Homo sapiens
gagtcactctgatatttgctttctcaatgatggcttcattccccagcaggctcagcccatatgggaccacagcattaacagttccaaacttagagcccttaatctaaacaggacagagactctccttttcccagtatctatattagcctactaaaaatgactgctaagtaggatgttctgatcggcttgccaggagcatgtgtctgtcgctccgacagggaatttgaccaccaaggacaatagggccaagagaaagaattcccagaggagaaaggatggcaggaagacaaacaggaacacctgcttacagccatttcctacttctcactctgtgttctctgggtcctaaggctgaagagattctgcagacatacttgaaatccaaggagtctatgactgatgcaattctccagacagaccagactctcacagaaaaagaaaaggagattgaagtggaacgtgtgaaagctgagtctgcacaggcttcagcaaaaatgttgcaggaaatgcaaagaaagaatgagcagatgatggaacagaaggagaggagttatcaggaacacttgaaacaactgactgagaagatggagaacgacagggtccagttgctgaaagagcaagagaggaccctcgctcttaaacttcaggaacaggagcaactactaaaagagggatttcaaaaagaaagcagaataatgaaaaatgagatacaggatctccagacgaaaatgagacgacgaaaggcatgtaccataagctaaagaccagagccttcctgtcacccctaaccaaggcataattgaaacaattttagaatttggaacaagcgtcactacatttgataataattagatcttgcatcataacaccaaaagtttataaaggcatgtggtacaatgatcaaaatcatgttttttcttaaaaaaaaaaaaagactgtaaattgtgcaacaaagatgcatttacctctgtatcaactcaggaaatctcataagctggtaccactcaggagaagtttattcttccagatgaccagcagtagacaaatggatactgagcagagtcttaggtaaaagtcttgggaaatatttgggcattggtctggccaagtctacaatgtcccaatatcaaggacaaccaccctagcttcttagtgaagacaatgtacagttatccgttagatcaagactacacggtctatgagcaataatgtgatttctggacattgcccatgtataatcctcactgatgatttcaagctaaagcaaaccaccttatacagagatctagaatctctttatgttctccagaggaaggtggaagaaaccatgggcaggagtaggaattgagtgataaacaattgggctaatgaagaaaacttctcttattgttcagttcatccagattataacttcaatgggacactttagaccattagacaattgacactggattaaacaaattcacataatgccaaatacacaatgtatttatagcaacgtataatttgcaaagatggactttaaaagatgctgtgtaactaaactgaaataattcaattacttattatttagaatgttaaagcttatgatagtcttttctaactcttaacactcatacttgaaaactttctgagtttccccagaagagaatatgggattttttttgacatttttgactcatttaataatgctcttgtgtttacctagtatatgtagactttgtcttatgtgtgaaaagtcctaggaaagtggttgatgtttcttatagcaattaaaaattatttttgaactg

SEQ ID NO: 1684 - protein, 161 aa, Homo sapiens [sequence omitted]

SEQ ID NO: 1685 - DNA, 2030 bp, Homo sapiens
gagtcactctgatatttgctttctcaatgatggcttcattccccagcaggctcagcccatatgggaccacagcattaacagttccaaacttagagcccttaatctaaacaggacagagactctccttttcccagtatctatattagcctactaaaaatgactgctaagtaggatgttctgatcggcttgccaggagcatgtgtctgtcgctccgacagggaatttgaccaccaaggacaatagggccaagagaaagaattcccagaggagaaaggatggcaggaagacaaacaggaacacctgcttacagccatttcctacttctcactctgtgttctctgggtcctaaggctgaagagattctgcagacatacttgaaatccaaggagtctatgactgatgcaattctccagacagaccagactctcacagaaaaagaaaaggagattgaaggtgaggagtgagttaagagattagatggcctcaaaagctccaaaaattgaaataacttgactggataaacatgggaccctttaactagagcaagatccacaaaggtgtgtcttacttgccgaggtcatctctgagtagggcatatgcagtcagcaacaacgacaggtaagtgtataaggaagaatgaggcaacaagataaccccacacaaatttttcttctgccttttcctcctcagtggaacgtgtgaaagctgagtctgcacaggcttcagcaaaaatgttgcaggaaatgcaaagaaagaatgagcagatgatggaacagaaggagaggagttatcaggaacacttgaaacaactgactgagaagatggagaacgacagggtccagttgctgaaagagcaagagaggaccctcgctcttaaacttcaggaacaggagcaactactaaaagagggatttcaaaaagaaagcagaataatgaaaaatgagatacaggatctccagacgaaaatgagacgacgaaaggcatgtaccataagctaaagaccagagccttcctgtcacccctaaccaaggcataattgaaacaattttagaatttggaacaagcgtcactacatttgataataattagatcttgcatcataacaccaaaagtttataaaggcatgtggtacaatgatcaaaatcatgttttttcttaaaaaaaaaaaaagactgtaaattgtgcaacaaagatgcatttacctctgtatcaactcaggaaatctcataagctggtaccactcaggagaagtttattcttccagatgaccagcagtagacaaatggatactgagcagagtcttaggtaaaagtcttgggaaatatttgggcattggtctggccaagtctacaatgtcccaatatcaaggacaaccaccctagcttcttagtgaagacaatgtacagttatccgttagatcaagactacacggtctatgagcaataatgtgatttctggacattgcccatgtataatcctcactgatgatttcaagctaaagcaaaccaccttatacagagatctagaatctctttatgttctccagaggaaggtggaagaaaccatgggcaggagtaggaattgagtgataaacaattgggctaatgaagaaaacttctcttattgttcagttcatccagattataacttcaatgggacactttagaccattagacaattgacactggattaaacaaattcacataatgccaaatacacaatgtatttatagcaacgtataatttgcaaagatggactttaaaagatgctgtgtaactaaactgaaataattcaattacttattatttagaatgttaaagcttatgatagtcttttctaactcttaacactcatacttgaaaactttctgagtttccccagaagagaatatgggattttttttgacatttttgactcatttaataatgctcttgtgtttacctagtatatgtagactttgtcttatgtgtgaaaagtcctaggaaagtggttgatgtttcttatagcaattaaaaattatttttgaactg

SEQ ID NO: 1686 - protein, 88 aa, Homo sapiens [sequence omitted]

SEQ ID NO: 1687 - DNA, 3785 bp, Homo sapiens
atttgcttttgctgtaaaatagagataatgccacttattctgtatgctagaagtcattactgaattagacataaaacacaaacagctcttagaaaacaatctataaaaataaaatcacactataataaatttaaaaataaaaaacctataaataaaatatttctacaatttttcacttagtaaataagcagcatagtgaagtggttcaagaagagggtatgggatcatgagtgcttgggttcagattagttacagtgttatgattttagacaactaataaagtctttctgtgctcagtttctataaaaccatgaggaaatattatgagttttcagttgtgcgattcatgtaaagccatcagtactgagcctagaacatgagtacaacacatggagccccctcctggctgtgtgctgggcattaagtgccaggggttaggtgttcatgagtgtgttaaacatgtcctttccttatgtactgcacctctcaaagaataggcagctccattgagagtgtgtctattattttaggaaattgtagctgaaaattaacatgatgcctcctcattctaggtttctcaaattgactcaatccatgagacatgtatcattgtattcaaaacctaatgggcattttgttagacaacaaatggtctctaagatttccaacaacaacaaaaaaaatttgaagcttctggttgagaaatctttaaaccctcccactggcacactccactaattccatttatggtagtggagtcagtgatttgaacgaagtactttcagtttcatattactctaaatccattacaaatctgcttagcttctaaatatttcatcaatgaggaaatcccagccctacaacttcggaacagtgaaatattagtccagggatccagtgagagacacagaagtgctagaagccagtgctcgtgaactaaggagaaaaagaacagacaagggaacagcctggacatggcatcagagatccacatgacaggcccaatgtgcctcattgagaacactaatgggcgactgatggcgaatccagaagctctgaagatcctttctgccattacacagcctatggtggtggtggcaattgtgggcctctaccgcacaggcaaatcctacctgatgaacaagctggctggaaagaaaaagggcttctctctgggctccacggtgcagtctcacactaaaggaatctggatgtggtgtgtgccccaccccaagaagccaggccacatcctagttctgctggacaccgagggtctgggagatgtagagaagggtgacaaccagaatgactcctggatcttcgccctggccgtcctcctgagcagcaccttcgtgtacaatagcataggaaccatcaaccagcaggctatggaccaactgtactatgtgacagagctgacacatagaatccgatcaaaatcctcacctgatgagaatgagaatgaggttgaggattcagctgactttgtgagcttcttcccagactttgtgtggacactgagagatttctccctggacttggaagcagatggacaacccctcacaccagatgagtacctgacatactccctgaagctgaagaaaggtaccagtcaaaaagatgaaacttttaacctgcccagactctgtatccggaaattcttcccaaagaaaaaatgctttgtctttgatcggcccgttcaccgcaggaagcttgcccagctcgagaaactacaagatgaagagctggaccccgaatttgtgcaacaagtagcagacttctgttcctacatctttagtaattccaaaactaaaactctttcaggaggcatccaggtcaacgggcctcgtctagagagcctggtgctgacctacgtcaatgccatcagcagtggggatctgccgtgcatggagaacgcagtcctggccttggcccagatagagaactcagctgcagtgcaaaaggctattgcccactatgaacagcagatgggccagaaggtgcagctgcccacagaaaccctccaggagctgctggacctgcacagggacagtgagagagaggccattgaagtcttcatcaggagttccttcaaagatgtggaccatctatttcaaaaggagttagcggcccagctagaaaaaaagcgggatgacttttgtaaacagaatcaggaagcatcatcagatcgttgctcagctttacttcaggtcattttcagtcctctagaagaagaagtgaaggcgggaatttattcgaaaccagggggctatcgtctctttgttcagaagctacaagacctgaagaaaaagtactatgaggaaccgaggaaggggatacaggctgaagagattctgcagacatacttgaaatccaaggagtctatgactgatgcaattctccagacagaccagactctcacagaaaaagaaaaggagattgaagtggaacgtgtgaaagctgagtctgcacaggcttcagcaaaaatgttgcaggaaatgcaaagaaagaatgagcagatgatggaacagaaggagaggagttatcaggaacacttgaaacaactgactgagaagatggagaacgacagggtccagttgctgaaagagcaagagaggaccctcgctcttaaacttcaggaacaggagcaactactaaaagagggatttcaaaaagaaagcagaataatgaaaaatgagatacaggatctccagacgaaaatgagacgacgaaaggcatgtaccataagctaaagaccagagccttcctgtcacccctaaccaaggcataattgaaacaattttagaatttggaacaagcgtcactacatttgataataattagatcttgcatcataacaccaaaagtttataaaggcatgtggtacaatgatcaaaatcatgttttttcttaaaaaaaaaaaaagactgtaaattgtgcaacaaagatgcatttacctctgtatcaactcaggaaatctcataagctggtaccactcaggagaagtttattcttccagatgaccagcagtagacaaatggatactgagcagagtcttaggtaaaagtcttgggaaatatttgggcattggtctggccaagtctacaatgtcccaatatcaaggacaaccaccctagcttcttagtgaagacaatgtacagttatccgttagatcaagactacacggtctatgagcaataatgtgatttctggacattgcccatgtataatcctcactgatgatttcaagctaaagcaaaccaccttatacagagatctagaatctctttatgttctccagaggaaggtggaagaaaccatgggcaggagtaggaattgagtgataaacaattgggctaatgaagaaaacttctcttattgttcagttcatccagattataacttcaatgggacactttagaccattagacaattgacactggattaaacaaattcacataatgccaaatacacaatgtatttatagcaacgtataatttgcaaagatggactttaaaagatgctgtgtaactaaactgaaataattcaattacttattatttagaatgttaaagcttatgatagtcttttctaactcttaacactcatacttgaaaactttctgagtttccccagaagagaatatgggattttttttgacatttttgactcatttaataatgctcttgtgtttacctagtatatgtagactttgtcttatgtgtgaaaagtcctaggaaagtggttgatgtttcttatagcaattaaaaattatttttgaactg

SEQ ID NO: 1688 - protein, 592 aa, Homo sapiens; identical to SEQ ID NO: 1682

SEQ ID NO: 1689 - DNA, 1189 bp, Homo sapiens
gcagttttctatgtcttcagctggctattcctagaaattaatacttgctgaatatccaaattaatagatgttattttaaattacatttgtcattgttctagaacaagtttcttgttctttcacctttgtgtatgctgtgattaggttaattttatctccctgcctagggtttgtgatcttctacttagccatagagtatggagtacaatggatatttatttaaagaacatagactaaaacatgaaccgtgtgctagtccaagcattggcaaactacagcccaagacaaatcatggcaaatcctgcctgccagctgtctttgtaaataaggtttttttggaataatgctatgcccattcatttacatattgtctaaagctgttgtcatgcttcaataacagagttgaatacttggaaaagagaccatccagcctgaagagcctaaaatatttactatttggccctttacagaaacacttatattaggcaattttataattttttaaatgtttttctaggtaccagtcaaaaagatgaaacttttaacctgcccagactctgtatccggaaattcttcccaaagaaaaaatgctttgtctttgatcggcccgttcaccgcaggaagcttgcccagctcgagaaactacaagatgaagagctggaccccgaatttgtgcaacaagtagcagacttctgttcctacatctttagtaattccaaaactacgtcaatgccatcagcagtggggatctgccgtgcatggagaacgcagtcctggccttggcccagatagagaactcagctgcagtgcaaaaggctattgcccactatgaacagcagatgggccagaaggtgcagctgcccacagaaaccctccaggagctgctggacctgcacagggacagtgagagagaggccattgaagtcttcatcaggagttccttcaaagatgtggaccatctatttcaaaaggagttagcggtaatttttgtctcaaatgtatacggtttagggtcatagaagctaaagtaccacaaggaaagaaaactattatttattttgacggaagtaattcctcctagcttccataatggtgaaaacaacagatttgtgatcacatcagtcagaaggaccaactgtattattacagacccaaagttctaaaacattttttcctgaataattttccc

SEQ ID NO: 1690 - protein, 86 aa, Homo sapiens [sequence omitted]

SEQ ID NO: 1691 - DNA, 1770 bp, Homo sapiens
atttgcttttgctgtaaaatagagataatgccacttattctgtatgctagaagtcattactgaattagacataaaacacaaacagctcttagaaaacaatctataaaaataaaatcacactataataaatttaaaaataaaaaacctataaataaaatatttctacaatttttcacttagtaaataagcagcatagtgaagtggttcaagaagagggtatgggatcatgagtgcttgggttcagattagttacagtgttatgattttagacaactaataaagtctttctgtgctcagtttctataaaaccatgaggaaatattatgagttttcagttgtgcgattcatgtaaagccatcagtactgagcctagaacatgagtacaacacatggagccccctcctggctgtgtgctgggcattaagtgccaggggttaggtgttcatgagtgtgttaaacatgtcctttccttatgtactgcacctctcaaagaataggcagctccattgagagtgtgtctattattttaggaaattgtagctgaaaattaacatgatgcctcctcattctaggtttctcaaattgactcaatccatgagacatgtatcattgtattcaaaacctaatgggcattttgttagacaacaaatggtctctaagatttccaacaacaacaaaaaaaatttgaagcttctggttgagaaatctttaaaccctcccactggcacactccactaattccatttatggtagtggagtcagtgatttgaacgaagtactttcagtttcatattactctaaatccattacaaatctgcttagcttctaaatatttcatcaatgaggaaatcccagccctacaacttcggaacagtgaaatattagtccagggatccagtgagagacacagaagtgctagaagccagtgctcgtgaactaaggagaaaaagaacagacaagggaacagcctggacatggcatcagagatccacatgacaggcccaatgtgcctcattgagaacactaatgggcgactgatggcgaatccagaagctctgaagatcctttctgccattacacagcctatggtggtggtggcaattgtgggcctctaccgcacaggcaaatcctacctgatgaacaagctggctggaaagatgtggtgtgtgccccaccccaagaagccaggccacatcctagttctgctggacaccgagggtctgggagatgtagagaagggtgacaaccagaatgactcctggatcttcgccctggccgtcctcctgagcagcaccttcgtgtacaatagcataggaaccatcaaccagcaggctatggaccaactgtagtatccttttgtgacccagaacagcaccaaggtcagaggggacacctgtattcatacaccagctgcctgactgtgaatcctgatgaatcaagctcaaaaggagaaaacaaaaaataatgcaagtacagaggagagatcccatgtatccactttagaactgacactgacacttaggttaggagcaaaggaaaatggaaggtttgggtatgtgttgaactaacatgggatgaggtccctgttcattttgtcacatttccttagttagctactcagctatgtgacagagctgacacatagaatccgatcaaaatcctcacctgatgagaatgagaatgaggttgaggattcagctgactttgtgagcttcttcccagactttgtgtggacactgagagatttctccctggacttggaagcagatg

SEQ ID NO: 1692 - protein, 124 aa, Homo sapiens
MASEIHMTGPMCLIENTNGRLMANPEALKILSAITQPMVVVAIVGLYRTGKSYLMNKLAGKMWCVPHPKKPGHILVLLDTEGLGDVEKGDNQNDSWIFALAVLLSSTFVYNSIGTINQQAMDQL

SEQ ID NO: 1693 - DNA, 1824 bp, Homo sapiens
atttgcttttgctgtaaaatagagataatgccacttattctgtatgctagaagtcattactgaattagacataaaacacaaacagctcttagaaaacaatctataaaaataaaatcacactataataaatttaaaaataaaaaacctataaataaaatatttctacaatttttcacttagtaaataagcagcatagtgaagtggttcaagaagagggtatgggatcatgagtgcttgggttcagattagttacagtgttatgattttagacaactaataaagtctttctgtgctcagtttctataaaaccatgaggaaatattatgagttttcagttgtgcgattcatgtaaagccatcagtactgagcctagaacatgagtacaacacatggagccccctcctggctgtgtgctgggcattaagtgccaggggttaggtgttcatgagtgtgttaaacatgtcctttccttatgtactgcacctctcaaagaataggcagctccattgagagtgtgtctattattttaggaaattgtagctgaaaattaacatgatgcctcctcattctaggtttctcaaattgactcaatccatgagacatgtatcattgtattcaaaacctaatgggcattttgttagacaacaaatggtctctaagatttccaacaacaacaaaaaaaatttgaagcttctggttgagaaatctttaaaccctcccactggcacactccactaattccatttatggtagtggagtcagtgatttgaacgaagtactttcagtttcatattactctaaatccattacaaatctgcttagcttctaaatatttcatcaatgaggaaatcccagccctacaacttcggaacagtgaaatattagtccagggatccagtgagagacacagaagtgctagaagccagtgctcgtgaactaaggagaaaaagaacagacaagggaacagcctggacatggcatcagagatccacatgacaggcccaatgtgcctcattgagaacactaatgggcgactgatggcgaatccagaagctctgaagatcctttctgccattacacagcctatggtggtggtggcaattgtgggcctctaccgcacaggcaaatcctacctgatgaacaagctggctggaaagaaaaagggcttctctctgggctccacggtgcagtctcacactaaaggaatctggatgtggtgtgtgccccaccccaagaagccaggccacatcctagttctgctggacaccgagggtctgggagatgtagagaagggtgacaaccagaatgactcctggatcttcgccctggccgtcctcctgagcagcaccttcgtgtacaatagcataggaaccatcaaccagcaggctatggaccaactgtagtatccttttgtgacccagaacagcaccaaggtcagaggggacacctgtattcatacaccagctgcctgactgtgaatcctgatgaatcaagctcaaaaggagaaaacaaaaaataatgcaagtacagaggagagatcccatgtatccactttagaactgacactgacacttaggttaggagcaaaggaaaatggaaggtttgggtatgtgttgaactaacatgggatgaggtccctgttcattttgtcacatttccttagttagctactcagctatgtgacagagctgacacatagaatccgatcaaaatcctcacctgatgagaatgagaatgaggttgaggattcagctgactttgtgagcttcttcccagactttgtgtggacactgagagatttctccctggacttggaagcagatg

SEQ ID NO: 1694 - protein, 142 aa, Homo sapiens
MASEIHMTGPMCLIENTNGRLMANPEALKILSAITQPMVVVAIVGLYRTGKSYLMNKLAGKKKGFSLGSTVQSHTKGIWMWCVPHPKKPGHILVLLDTEGLGDVEKGDNQNDSWIFALAVLLSSTFVYNSIGTINQQAMDQL

SEQ ID NO: 1695 - DNA, 618 bp, Homo sapiens
gtccagggatccagtgagagacacagaagtgctagaagccagtgctcgtgaactaaggagaaaaagaacagacaagggaacagcctggacatggcatcagagatccacatgacaggcccaatgtgcctcattgagaacactaatgggcgactgatggcgaatccagaagctctgaagatcctttctgccattacacagcctatggtggtggtggcaattgtgggcctctaccgcacaggcaaatcctacctgatgaacaagctggctggaaagaaaaagggtgagtggcatgagcaaagctctgccaagtcccttctgtccatctacacagtcagcctccattatgaagatgtgaggagagaaagagatgaggatgaatactgaaagctaactttccattcacagtcgggctccttatcttcacgctgttctaggggataagaatcaattcattaattattcccatgataccttagtttccatttcaaaagcacaaattatgcctctcctaaaaggagtaagacagtaataaaaataattaatgtacataataataactataataaactatacaatgtttattacaatttttatgcaataacagagttcacagtgatc

SEQ ID NO: 1696 - protein, 97 aa, Homo sapiens [sequence omitted]

SEQ ID NO: 1697 - DNA, 1546 bp, Homo sapiens
gcgcagtgcattctggggaccgaggtcgagccagccactgctgccgtcgcctgagggaagcgagaagaggccgcgaccgggaagaaaacgctgagtcgccactggagagaagtggactccatagcagcagaccccgccagagaggcccgcccacccgttcgcccctccccctgccccgttcacaatgcagcctgcttctgcaaagtggtacgatcaaaggcactatgtcttcattgaattttgtgttgaagacagtaaggatgttaatgtaaattttgaaaaatccaaacttacattcagttgtctcggaggaagtgataattttaagcatttaaatgaaattgatctttttcactgtattgatacaaacgattccaagcataaaagaacggacagatcaattttatgttgtttacgaaaaggagaatctggacagtcatggccaaggttaacaaaagaaagggcaaagcttaattggcttagtgttgacttcaataattggaaagactgggaagatgattcagatgaagacatgtctaattttgatcgtttctctgagatgatgaataacatgggtggtgatgaggatgtagatttaccagaagtagatggagcagatgatgattcacaagacagtgatgatgaaaaaatgccagatctgcagtaaggaatattgtcatcacctgggttttgagaaagaaaaataacttctctgcaagatttcatgattgagagaattcctgagttgatctaaaagcagatgctgtagctgcctactttaacccatttttcaacctgtttgttttttaaagggcttcactaagggttgatatgtaccattgtagggggcaattttaagtcagctaaggcaataaccttatgcatgaacatttcccagactttcatgaagctgttgaggtcctaggcaattaatgcggcagttgtgataaataaaaacatctcacctaagtctccttttcttcataatatagatactgacatgatgataggaagctctcagcttagggaaagagagctaaattttagattatagaacatggattcaaaagtggctgaacaaattggctgacaccttactggtaacctgctattcctctggtgttatccttcaggattgttccactaaaatttatttttcaaaaaatttacttcacattattctatgtaagtgatcacttgtcagtgttccaggtgtatattagctaaaattagagaatgccctaacttagatggtttttgaagcctgtacatttggtattgtttgacccttaagcttttacatctcttagcatggaagacgaagaaagctgtacattgttgcttgagagtctgtacatttagtccagatttgtatttgcattgtcagtatggcaaatgagtgaaaaatgtttaatacactattgtatttttattttttctttttttgattcagcttataccagggctgaaaacctcaatttatgttcatgacagtggggatttttttaaatgcctacattctttctaataaactgttggaagactt

SEQ ID NO: 1698 - protein, 31 aa, Homo sapiens
MSEKCLIHYCIFIFSFFDSAYTRAENLNLCS

SEQ ID NO: 1699 - DNA, 3365 bp, Homo sapiens
tccaaagcatcatcagattgttgcatggctttacttcaggatatatttggccctttagaagaagatgtcaagcagggaacattttcaggccaaagaggtgctgaaaaaatatttggagtccaaggaggatgtggctgatgcacttctacagactgatcagtcactctcagaaaaggaaaaagcgattgaagtggaacgtataaaggctgaatctgcagaagctgcaaagaaaatgttggaggaaatacaaaagaagaatgaggagatgatggaacagaaagagaagagttatcaggaacatgtgaaacaattgactgagaagatggagagggacagggcccagttaatggcagagcaagagaagaccctcgctcttaaacttcaggaacaggaacgccttctcaaggagggattcgagaatgagagcaagagacttcaaaaagacatatgggatatccagatgagaagcaaatcattggagccaatatgtaacatactctaaaagtccaaggagcaaaatttgcctgtccagctccctctccccaagaaacaacatgaatgagcaacttcagagtgtcaaacaactgccattaaacttaactcaaaatcatgatgcatgcatttttgttgaaccataaagtttgcaaagtaaaggttaagtatgaggtcaatgttttacctacagagcaattcaactcatgcttatttatagtactaacttttaatatgatctttaactaaatcctatatttgaaatcatacacaaggactcaagagagatattgtgtaactaggatgcattttccaatgagatatcttgcagtttctgttctgggtagatttttttctctcatatgcaccacccttactgtatattcagtcctatactcttattcagggatttaactatggtcgtagcatagggctgaagtgttgtgaatatgatgaaaatgtgatgagaccaaacaaaccatggggcacagtagagcatcactcctgccaagtggtctttgtatggcatgctggctgcaaataaaggagatctgggacacttaactaggcttttaaagtacagacagtgcacagttctcatttgggtggaggctgcatgatctgtgggcactagcagagaaagtggttgcctctgtgcagaatgcatttatgagtagaggctccaccttctctgtccatgtaaaccctctaggtaattactgccccattcccaggccacctagatctctcttctctagtctcccttagtcttttctctttcctgaagtttagaaaataacttctacaatcacagaaaggaaagctttaactcaaactcaaattactttccattcttctgaggaccaggactataatcctataaagcctaaaacttgactgcatttttctctctgctcctctgctatgacattatatcctcaaagctactcagggtaaatgacttactaaaaaaaaaaaaatgacagattgaaaaatcaagaataattcattaatacaaaacattatcctactacaattgtttcaggatgtgtattattcagagttcttcatggcaaataacaatctgctcagcaatttaagtaaaaagtaatttactttttaataccattaggttgcacaccgatgctccagaattgtgagggagccatactctacagctattccaccgaggataatactaccattgtaaaggcatctcacgggaaaacaacacagctaccatgaaccagcaccatgatctctggatgaaatgctggaagcttctgcagtgtcagctatgagtaaatggatgccaccaccttcacattttcagtaaacaaatactcccctaccccatgaaaagttgcatctttgagctgctcacatctccagctaagcctcacaaaagtcaatctgcagggaagaatctaaatcatatgcctacccatgggaaagtctgagaattagagtatttttgtcttctacttttggaggaagaaactaataacgtgggaaattttcctgtatgtttagtcaaccagtttttccatgcagatgtatggagataaatcttatagtaggaataacctaagacttgagttagtatttttgtgtacatcagatacaacactcttctcatcttttttgtcattatttttcaatgttgttttaatctttccactgttgtttcatgtcatgcactttgttaatattctttaagttattcttagtttttaacaatgatacttaagaaagacttaataggactatagaataggtactccctattccccaaccctgggaacacaatttaacatattagttcatttgtatttaagatctatcttgtttatgcctcagtttagttattgctcttacctttcaaacagttagtattttgtatctagttctgtgaaagcaaaaagcaactttattctttcttacaattccccttttacttaatcggaacatttctttcctgtttgttcattagtcactctcagataaatgaatagtctctttttctaaaaaaaaaaataacatttgacctaaatttttaaatgtctgagttttgatttaaagttcctccccttgtatcttgctccccctcagattccactcagtcacacagcccaggcctgattcagccttacaggcacacagtgagaaaggtgtacgactttttattttcatttccagctctccctcccactgggtacactagctcatgttgatgataccttcaagttgttaacactagagtgcagggaattaaggaaaagaaaccttacatgatacataactgatctggtgttggcaccttctggtggtggcttaagtccttaaggatgatttgggttctttgctgatcccccttgccaggacctcccaatagcacgtccctattgtagtccacttctgattcctttcctcaaattctctcttctagagatccactcattcaatatattcttggtgttgagatcaatgcctcttgacatgttgacatcttgtgcaggatttccttcaatatgacccaagtccagaacaccccagtgattatacccatgagaaaaactcatgcgcaccagtttagccatacaccgtaggaacaggattcccccaactctcttttctttcctattttgccacaaaccattccatcccagactatcacttttagatgtttttaggcataagttgggcaccagtactagtgtccccaaaccccaaagagcacatatcagcttttcaagaggatcttttaagtgcccaatgctacttagtttgtaaagatagtaagaaagaagcacctctcattgccctatggggaaaatgagcagagataaagagagggtggatatcaatgcaca

SEQ ID NO: 1700 - protein, 145 aa, Homo sapiens
MSSREHFQAKEVLKKYLESKEDVADALLQTDQSLSEKEKAIEVERIKAESAEAAKKMLEEIQKKNEEMMEQKEKSYQEHVKQLTEKMERDRAQLMAEQEKTLALKLQEQERLLKEGFENESKRLQKDIWDIQMRSKSLEPICNIL

SEQ ID NO: 1701 - DNA, 3599 bp, Homo sapiens
gtgtagtgtatccgggaactccaggcaggctgcctgactccagtgtttgtgctcagaactattcctgaaatgagagacttggaaagataaaagtttcgtatgaaatagtgcccagttggaagcaaggcgagatgacttttgtaagcagaattccaaagcatcatcagattgttgcatggctttacttcaggatatatttggccctttagaagaagatgtcaagcagggaacattttctaaaccaggaggttaccgtctctttactcagaagctgcaggagctgaagaataagtactaccaggtgccaaggaaggggatacaggccaaagaggtgctgaaaaaatatttggagtccaaggaggatgtggctgatgcacttctacagactgatcagtcactctcagaaaaggaaaaagcgattgaagtggaacgtataaaggctgaatctgcagaagctgcaaagaaaatgttggaggaaatacaaaagaagaatgaggagatgatggaacagaaagagaagagttatcaggaacatgtgaaacaattgactgagaagatggagagggacagggcccagttaatggcagagcaagagaagaccctcgctcttaaacttcaggaacaggaacgccttctcaaggagggattcgagaatgagagcaagagacttcaaaaagacatatgggatatccagatgagaagcaaatcattggagccaatatgtaacatactctaaaagtccaaggagcaaaatttgcctgtccagctccctctccccaagaaacaacatgaatgagcaacttcagagtgtcaaacaactgccattaaacttaactcaaaatcatgatgcatgcatttttgttgaaccataaagtttgcaaagtaaaggttaagtatgaggtcaatgttttacctacagagcaattcaactcatgcttatttatagtactaacttttaatatgatctttaactaaatcctatatttgaaatcatacacaaggactcaagagagatattgtgtaactaggatgcattttccaatgagatatcttgcagtttctgttctgggtagatttttttctctcatatgcaccacccttactgtatattcagtcctatactcttattcagggatttaactatggtcgtagcatagggctgaagtgttgtgaatatgatgaaaatgtgatgagaccaaacaaaccatggggcacagtagagcatcactcctgccaagtggtctttgtatggcatgctggctgcaaataaaggagatctgggacacttaactaggcttttaaagtacagacagtgcacagttctcatttgggtggaggctgcatgatctgtgggcactagcagagaaagtggttgcctctgtgcagaatgcatttatgagtagaggctccaccttctctgtccatgtaaaccctctaggtaattactgccccattcccaggccacctagatctctcttctctagtctcccttagtcttttctctttcctgaagtttagaaaataacttctacaatcacagaaaggaaagctttaactcaaactcaaattactttccattcttctgaggaccaggactataatcctataaagcctaaaacttgactgcatttttctctctgctcctctgctatgacattatatcctcaaagctactcagggtaaatgacttactaaaaaaaaaaaaatgacagattgaaaaatcaagaataattcattaatacaaaacattatcctactacaattgtttcaggatgtgtattattcagagttcttcatggcaaataacaatctgctcagcaatttaagtaaaaagtaatttactttttaataccattaggttgcacaccgatgctccagaattgtgagggagccatactctacagctattccaccgaggataatactaccattgtaaaggcatctcacgggaaaacaacacagctaccatgaaccagcaccatgatctctggatgaaatgctggaagcttctgcagtgtcagctatgagtaaatggatgccaccaccttcacattttcagtaaacaaatactcccctaccccatgaaaagttgcatctttgagctgctcacatctccagctaagcctcacaaaagtcaatctgcagggaagaatctaaatcatatgcctacccatgggaaagtctgagaattagagtatttttgtcttctacttttggaggaagaaactaataacgtgggaaattttcctgtatgtttagtcaaccagtttttccatgcagatgtatggagataaatcttatagtaggaataacctaagacttgagttagtatttttgtgtacatcagatacaacactcttctcatcttttttgtcattatttttcaatgttgttttaatctttccactgttgtttcatgtcatgcactttgttaatattctttaagttattcttagtttttaacaatgatacttaagaaagacttaataggactatagaataggtactccctattccccaaccctgggaacacaatttaacatattagttcatttgtatttaagatctatcttgtttatgcctcagtttagttattgctcttacctttcaaacagttagtattttgtatctagttctgtgaaagcaaaaagcaactttattctttcttacaattccccttttacttaatcggaacatttctttcctgtttgttcattagtcactctcagataaatgaatagtctctttttctaaaaaaaaaaataacatttgacctaaatttttaaatgtctgagttttgatttaaagttcctccccttgtatcttgctccccctcagattccactcagtcacacagcccaggcctgattcagccttacaggcacacagtgagaaaggtgtacgactttttattttcatttccagctctccctcccactgggtacactagctcatgttgatgataccttcaagttgttaacactagagtgcagggaattaaggaaaagaaaccttacatgatacataactgatctggtgttggcaccttctggtggtggcttaagtccttaaggatgatttgggttctttgctgatcccccttgccaggacctcccaatagcacgtccctattgtagtccacttctgattcctttcctcaaattctctcttctagagatccactcattcaatatattcttggtgttgagatcaatgcctcttgacatgttgacatcttgtgcaggatttccttcaatatgacccaagtccagaacaccccagtgattatacccatgagaaaaactcatgcgcaccagtttagccatacaccgtaggaacaggattcccccaactctcttttctttcctattttgccacaaaccattccatcccagactatcacttttagatgtttttaggcataagttgggcaccagtactagtgtccccaaaccccaaagagcacatatcagcttttcaagaggatcttttaagtgcccaatgctacttagtttgtaaagatagtaagaaagaagcacctctcattgccctatggggaaaatgagcagagataaagagagggtggatatcaatgcaca

SEQ ID NO: 1702 - protein, 186 aa, Homo sapiens [sequence omitted]

SEQ ID NO: 1703 - DNA, 4936 bp, Homo sapiens
gtcactgctttagttgatactttgtttcatattagtgcatttctttgcagaggttacctctttttcttgtctctcgtcaggtctctgacattgacagagcctggacgttggaggaagccccaggacgttggaggggtaaagtaaaagtccacagttaccgtgagagaaaaaagagggagaaagcagtgcagccaaactcggaagaaaagagaggaggaaaaggactcgactttcacattggaacaaccttctttccagtgctaaaggatctctgatctggggaacaacaccctggacatggctccagagatcaacttgccgggcccaatgagcctcattgataacactaaagggcagctggtggtgaatccagaagctctgaagatcctatctgcaattacgcagcctgtggtggtggtggcgattgtgggcctctatcgcacaggcaaatcctacctgatgaacaagctggctgggaagaaaaacggcttctctctaggctccacagtgaagtctcacaccaagggaatctggatgtggtgtgtgcctcatcccaagaagccagaacacaccctagttctgctcgacactgagggcctgggagatatagagaagggtgacaatgagaatgactcctggatctttgccttggccatcctcctgagcagcaccttcgtgtacaatagcatgggaaccatcaaccagcaggccatggaccaacttcactatgtgacagagctgacagatcgaatcaaggcaaactcctcacctggtaacaattctgtagacgactcagctgactttgtgagcttttttccagcatttgtgtggactctcagagatttcaccctggaactggaagtagatggagaacccatcactgctgatgactacttggagctttcgctaaagctaagaaaaggtactgataagaaaagtaaaagctttaatgatcctcggttgtgcatccgaaagttcttccccaagaggaagtgcttcgtcttcgattggcccgctcctaagaagtaccttgctcacctagagcagctaaaggaggaagagctgaaccctgatttcatagaacaagttgcagaattttgttcctacatcctcagccattccaatgtcaagactctttcaggtggcattccagtcaatgggcctcgtctagagagcctggtgctgacctacgtcaatgccatcagcagtggggatctaccctgcatggagaacgcagtcctggccttggcccagatagagaactcagccgcagtggaaaaggctattgcccactatgaacagcagatgggccagaaggtgcagctgcccacggaaaccctccaggagctgctggacctgcacagggacagtgagagagaggccattgaagtcttcatgaagaactctttcaaggatgtggaccaaatgttccagaggaaattaggggcccagttggaagcaaggcgagatgacttttgtaagcagaattccaaagcatcatcagattgttgcatggctttacttcaggatatatttggccctttagaagaagatgtcaagcagggaacattttctaaaccaggaggttaccgtctctttactcagaagctgcaggagctgaagaataagtactaccaggtgccaaggaaggggatacaggccaaagaggtgctgaaaaaatatttggagtccaaggaggatgtggctgatgcacttctacagactgatcagtcactctcagaaaaggaaaaagcgattgaagtggaacgtataaaggctgaatctgcagaagctgcaaagaaaatgttggaggaaatacaaaagaagaatgaggagatgatggaacagaaagagaagagttatcaggaacatgtgaaacaattgactgagaagatggagagggacagggcccagttaatggcagagcaagagaagaccctcgctcttaaacttcaggaacaggaacgccttctcaaggagggattcgagaatgagagcaagagacttcaaaaagacatatgggatatccagatgagaagcaaatcattggagccaatatgtaacatactctaaaagtccaaggagcaaaatttgcctgtccagctccctctccccaagaaacaacatgaatgagcaacttcagagtgtcaaacaactgccattaaacttaactcaaaatcatgatgcatgcatttttgttgaaccataaagtttgcaaagtaaaggttaagtatgaggtcaatgttttacctacagagcaattcaactcatgcttatttatagtactaacttttaatatgatctttaactaaatcctatatttgaaatcatacacaaggactcaagagagatattgtgtaactaggatgcattttccaatgagatatcttgcagtttctgttctgggtagatttttttctctcatatgcaccacccttactgtatattcagtcctatactcttattcagggatttaactatggtcgtagcatagggctgaagtgttgtgaatatgatgaaaatgtgatgagaccaaacaaaccatggggcacagtagagcatcactcctgccaagtggtctttgtatggcatgctggctgcaaataaaggagatctgggacacttaactaggcttttaaagtacagacagtgcacagttctcatttgggtggaggctgcatgatctgtgggcactagcagagaaagtggttgcctctgtgcagaatgcatttatgagtagaggctccaccttctctgtccatgtaaaccctctaggtaattactgccccattcccaggccacctagatctctcttctctagtctcccttagtcttttctctttcctgaagtttagaaaataacttctacaatcacagaaaggaaagctttaactcaaactcaaattactttccattcttctgaggaccaggactataatcctataaagcctaaaacttgactgcatttttctctctgctcctctgctatgacattatatcctcaaagctactcagggtaaatgacttactaaaaaaaaaaaaatgacagattgaaaaatcaagaataattcattaatacaaaacattatcctactacaattgtttcaggatgtgtattattcagagttcttcatggcaaataacaatctgctcagcaatttaagtaaaaagtaatttactttttaataccattaggttgcacaccgatgctccagaattgtgagggagccatactctacagctattccaccgaggataatactaccattgtaaaggcatctcacgggaaaacaacacagctaccatgaaccagcaccatgatctctggatgaaatgctggaagcttctgcagtgtcagctatgagtaaatggatgccaccaccttcacattttcagtaaacaaatactcccctaccccatgaaaagttgcatctttgagctgctcacatctccagctaagcctcacaaaagtcaatctgcagggaagaatctaaatcatatgcctacccatgggaaagtctgagaattagagtatttttgtcttctacttttggaggaagaaactaataacgtgggaaattttcctgtatgtttagtcaaccagtttttccatgcagatgtatggagataaatcttatagtaggaataacctaagacttgagttagtatttttgtgtacatcagatacaacactcttctcatcttttttgtcattatttttcaatgttgttttaatctttccactgttgtttcatgtcatgcactttgttaatattctttaagttattcttagtttttaacaatgatacttaagaaagacttaataggactatagaataggtactccctattccccaaccctgggaacacaatttaacatattagttcatttgtatttaagatctatcttgtttatgcctcagtttagttattgctcttacctttcaaacagttagtattttgtatctagttctgtgaaagcaaaaagcaactttattctttcttacaattccccttttacttaatcggaacatttctttcctgtttgttcattagtcactctcagataaatgaatagtctctttttctaaaaaaaaaaataacatttgacctaaatttttaaatgtctgagttttgatttaaagttcctccccttgtatcttgctccccctcagattccactcagtcacacagcccaggcctgattcagccttacaggcacacagtgagaaaggtgtacgactttttattttcatttccagctctccctcccactgggtacactagctcatgttgatgataccttcaagttgttaacactagagtgcagggaattaaggaaaagaaaccttacatgatacataactgatctggtgttggcaccttctggtggtggcttaagtccttaaggatgatttgggttctttgctgatcccccttgccaggacctcccaatagcacgtccctattgtagtccacttctgattcctttcctcaaattctctcttctagagatccactcattcaatatattcttggtgttgagatcaatgcctcttgacatgttgacatcttgtgcaggatttccttcaatatgacccaagtccagaacaccccagtgattatacccatgagaaaaactcatgcgcaccagtttagccatacaccgtaggaacaggattcccccaactctcttttctttcctattttgccacaaaccattccatcccagactatcacttttagatgtttttaggcataagttgggcaccagtactagtgtccccaaaccccaaagagcacatatcagcttttcaagaggatcttttaagtgcccaatgctacttagtttgtaaagatagtaagaaagaagcacctctcattgccctatggggaaaatgagcagagataaagagagggtggatatcaatgcaca

SEQ ID NO: 1704 - protein, 591 aa, Homo sapiens; identical to SEQ ID NO: 36

SEQ ID NO: 1705 - DNA, 4507 bp, Homo sapiens
gttgaagaagtacgagaagaccaactggatagtaatttccagatgcaatcagaaaatttctgttcttatatcttcacccatgcaaagaccaagaccctgagagagggaatccttgtcactggaaaccggctggggatgctggtggagacctacctggatgccatcaacagtggagcgactccttgtctggagaatgcaatggcagttctggcccagtgtgagaactcagcagccgtgcagagggcagccaaccactacagccagcagatggcccagcaagtgagattccccacagacacactccaggagctgctggacgtgcatgcagtttgtgagagggaagccattgcagtcttcatggagtactccttcaaagataaaagccaggaatttcagaagaagcttgtggacaccatggagaaaaagaaggaagactttgtgctgcagaatgaagaggcatctgccaaatattgtcaggctgagcttaagcggctttcagagctcttgacagaaagtatttcaagaggaactttctttgttccgggggggcacaatatctacttagaagcaaaaaagaagattgaacaggactatacactagtgcccagaaaaggagttaaggtctctgacattgacagagcctggacgttggaggaagccccaggacgttggaggggtaaagtaaaagtccacagttaccgtgagagaaaaaagagggagaaagcagtgcagccaaactcggaagaaaagagaggaggaaaaggactcgactttcacattggaacaaccttctttccagtgctaaaggatctctgatctggggaacaacaccctggacatggctccagagatcaacttgccgggcccaatgagcctcattgataacactaaagggcagctggtggtgaatccagaagctctgaagatcctatctgcaattacgcagcctgtggtggtggtggcgattgtgggcctctatcgcacaggcaaatcctacctgatgaacaagctggctgggaagaaaaacggcttctctctaggctccacagtgaagtctcacaccaagggaatctggatgtggtgtgtgcctcatcccaagaagccagaacacaccctagttctgctcgacactgagggcctgggagatatagagaagggtgacaatgagaatgactcctggatctttgccttggccatcctcctgagcagcaccttcgtgtacaatagcatgggaaccatcaaccagcaggccatggaccaacttcactatgtgacagagctgacagatcgaatcaaggcaaactcctcacctggtaacaattctgtagacgactcagctgactttgtgagcttttttccagcatttgtgtggactctcagagatttcaccctggaactggaagtagatggagaacccatcactgctgatgactacttggagctttcgctaaagctaagaaaaggtactgataagaaaagtaaaagctttaatgatcctcggttgtgcatccgaaagttcttccccaagaggaagtgcttcgtcttcgattggcccgctcctaagaagtaccttgctcacctagagcagctaaaggaggaagagctgaaccctgatttcatagaacaagttgcagaattttgttcctacatcctcagccattccaatgtcaagactctttcaggtggcattccagtcaatgggcctcgtctagagagcctggtgctgacctacgtcaatgccatcagcagtggggatctaccctgcatggagaacgcagtcctggccttggcccagatagagaactcagccgcagtggaaaaggctattgcccactatgaacagcagatgggccagaaggtgcagctgcccacggaaaccctccaggagctgctggacctgcacagggacagtgagagagaggccattgaagtcttcatgaagaactctttcaaggatgtggaccaaatgttccagaggaaattaggggcccagttggaagcaaggcgagatgacttttgtaagcagaattccaaagcatcatcagattgttgcatggctttacttcaggatatatttggccctttagaagaagatgtcaagcagggaacattttctaaaccaggaggttaccgtctctttactcagaagctgcaggagctgaagaataagtactaccaggtgccaaggaaggggatacaggccaaagaggtgctgaaaaaatatttggagtccaaggaggatgtggctgatgcacttctacagactgatcagtcactctcagaaaaggaaaaagcgattgaagtggaacgtataaaggctgaatctgcagaagctgcaaagaaaatgttggaggaaatacaaaagaagaatgaggagatgatggaacagaaagagaagagttatcaggaacatgtgaaacaattgactgagaagatggagagggacagggcccagttaatggcagagcaagagaagaccctcgctcttaaacttcaggaacaggaacgccttctcaaggagggattcgagaatgagagcaagagacttcaaaaagacatatgggatatccagatgagaagcaaatcattggagccaatatgtaacatactctaaaagtccaaggagcaaaatttgcctgtccagctccctctccccaagaaacaacatgaatgagcaacttcagagtgtcaaacaactgccattaaacttaactcaaaatcatgatgcatgcatttttgttgaaccataaagtttgcaaagtaaaggttgcacaccgatgctccagaattgtgagggagccatactctacagctattccaccgaggataatactaccattgtaaaggcatctcacgggaaaacaacacagctaccatgaaccagcaccatgatctctggatgaaatgctggaagcttctgcagtgtcagctatgagtaaatggatgccaccaccttcacattttcagtaaacaaatactcccctaccccatgaaaagttgcatctttgagctgctcacatctccagctaagcctcacaaaagtcaatctgcagggaagaatctaaatcatatgcctacccatgggaaagtctgagaattagagtatttttgtcttctacttttggaggaagaaactaataacgtgggaaattttcctgtatgtttagtcaaccagtttttccatgcagatgtatggagataaatcttatagtaggaataacctaagacttgagttagtatttttgtgtacatcagatacaacactcttctcatcttttttgtcattatttttcaatgttgttttaatctttccactgttgtttcatgtcatgcactttgttaatattctttaagttattcttagtttttaacaatgatacttaagaaagacttaataggactatagaataggtactccctattccccaaccctgggaacacaatttaacatattagttcatttgtatttaagatctatcttgtttatgcctcagtttagttattgctcttacctttcaaacagttagtattttgtatctagttctgtgaaagcaaaaagcaactttattctttcttacaattccccttttacttaatcggaacatttctttcctgtttgttcattagtcactctcagataaatgaatagtctctttttctaaaaaaaaaaataacatttgacctaaatttttaaatgtctgagttttgatttaaagttcctccccttgtatcttgctccccctcagattccactcagtcacacagcccaggcctgattcagccttacaggcacacagtgagaaaggtgtacgactttttattttcatttccagctctccctcccactgggtacactagctcatgttgatgataccttcaagttgttaacactagagtgcagggaattaaggaaaagaaaccttacatgatacataactgatctggtgttggcaccttctggtggtggcttaagtccttaaggatgatttgggttctttgctgatcccccttgccaggacctcccaatagcacgtccctattgtagtccacttctgattcctttcctcaaattctctcttctagagatccactcattcaatatattcttggtgttgagatcaatgcctcttgacatgttgacatcttgtgcaggatttccttcaatatgacccaagtccagaacaccccagtgattatacccatgagaaaaactcatgcgcaccagtttagccatacaccgtaggaacaggattcccccaactctcttttctttcctattttgccacaaaccattccatcccagactatcacttttagatgtttttaggcataagttgggcaccagtactagtgtccccaaaccccaaagagcacatatcagcttttcaagaggatcttttaagtgcccaatgctacttagtttgtaaagatagtaagaaagaagcacctctcattgccctatggggaaaatgagcagagataaagagagggtggatatcaatgcaca

SEQ ID NO: 1706 - protein, 591 aa, Homo sapiens; identical to SEQ ID NO: 36

SEQ ID NO: 1707 - DNA, 846 bp, Homo sapiens
gtgtagtgtatccgggaactccaggcaggctgcctgactccagtgtttgtgctcagaactattcctgaaatgagagacttggaaagataaaagtttcgtatgaaatagtgcccagttggaagcaaggcgagatgacttttgtaagcagaattccaaagcatcatcagattgttgcatggctttacttcaggatatatttggccctttagaagaagatgtcaagcagggaacattttctaaaccaggaggttaccgtctctttactcagaagctgcaggagctgaagaataagtactaccaggtgccaaggaaggggatacaggccaaagaggtgctgaaaaaatatttggagtccaaggaggatgtggctgatgcacttctacagactgatcagtcactctcagaaaaggaaaaagcgattgaagtggaacgtataaaggctgaatctgcagaagctgcaaagaaaatgttggaggaaatacaaaagaagaatgaggagatgatggaacagaaagagaagagttatcaggaacatgtgaaacaattgactgagaagatggagagggacagggcccagttaatggcagagcaagagaagaccctcgctcttaaacttcaggaacaggaacgccttctcaaggagggattcgagaatgagagcaagagacttcaaaaagacatatgggatatccagatgagaagcaaatcattggagccaatatgtaacatactctaaaagtccaaggagcaaaatttgcctgtccagctccctctccccaagaaacaacatgaatgagcaacttcagagtgtcaaacaactgccattaaacttaactcaaaatcatg

SEQ ID NO: 1708 - protein, 186 aa, Homo sapiens [sequence omitted]

SEQ ID NO: 1709 - DNA, 2183 bp, Homo sapiens
gtcactgctttagttgatactttgtttcatattagtgcatttctttgcagaggttacctctttttcttgtctctcgtcaggtctctgacattgacagagcctggacgttggaggaagccccaggacgttggaggggtaaagtaaaagtccacagttaccgtgagagaaaaaagagggagaaagcagtgcagccaaactcggaagaaaagagaggaggaaaaggactcgactttcacattggaacaaccttctttccagtgctaaaggatctctgatctggggaacaacaccctggacatggctccagagatcaacttgccgggcccaatgagcctcattgataacactaaagggcagctggtggtgaatccagaagctctgaagatcctatctgcaattacgcagcctgtggtggtggtggcgattgtgggcctctatcgcacaggcaaatcctacctgatgaacaagctggctgggaagaaaaacggcttctctctaggctccacagtgaagtctcacaccaagggaatctggatgtggtgtgtgcctcatcccaagaagccagaacacaccctagttctgctcgacactgagggcctgggagatatagagaagggtgacaatgagaatgactcctggatctttgccttggccatcctcctgagcagcaccttcgtgtacaatagcatgggaaccatcaaccagcaggccatggaccaacttcactatgtgacagagctgacagatcgaatcaaggcaaactcctcacctggtaacaattctgtagacgactcagctgactttgtgagcttttttccagcatttgtgtggactctcagagatttcaccctggaactggaagtagatggagaacccatcactgctgatgactacttggagctttcgctaaagctaagaaaaggtactgataagaaaagtaaaagctttaatgatcctcggttgtgcatccgaaagttcttccccaagaggaagtgcttcgtcttcgattggcccgctcctaagaagtaccttgctcacctagagcagctaaaggaggaagagctgaaccctgatttcatagaacaagttgcagaattttgttcctacatcctcagccattccaatgtcaagactctttcaggtggcattccagtcaatgggcctcgtctagagagcctggtgctgacctacgtcaatgccatcagcagtggggatctaccctgcatggagaacgcagtcctggccttggcccagatagagaactcagccgcagtggaaaaggctattgcccactatgaacagcagatgggccagaaggtgcagctgcccacggaaaccctccaggagctgctggacctgcacagggacagtgagagagaggccattgaagtcttcatgaagaactctttcaaggatgtggaccaaatgttccagaggaaattaggggcccagttggaagcaaggcgagatgacttttgtaagcagaattccaaagcatcatcagattgttgcatggctttacttcaggatatatttggccctttagaagaagatgtcaagcagggaacattttctaaaccaggaggttaccgtctctttactcagaagctgcaggagctgaagaataagtactaccaggtgccaaggaaggggatacaggccaaagaggtgctgaaaaaatatttggagtccaaggaggatgtggctgatgcacttctacagactgatcagtcactctcagaaaaggaaaaagcgattgaagtggaacgtataaaggctgaatctgcagaagctgcaaagaaaatgttggaggaaatacaaaagaagaatgaggagatgatggaacagaaagagaagagttatcaggaacatgtgaaacaattgactgagaagatggagagggacagggcccagttaatggcagagcaagagaagaccctcgctcttaaacttcaggaacaggaacgccttctcaaggagggattcgagaatgagagcaagagacttcaaaaagacatatgggatatccagatgagaagcaaatcattggagccaatatgtaacatactctaaaagtccaaggagcaaaatttgcctgtccagctccctctccccaagaaacaacatgaatgagcaacttcagagtgtcaaacaactgccattaaacttaactcaaaatcatg

SEQ ID NO: 1710 - protein, 591 aa, Homo sapiens; identical to SEQ ID NO: 36

SEQ ID NO: 1711 - DNA, 610 bp, Homo sapiens
tccaaagcatcatcagattgttgcatggctttacttcaggatatatttggccctttagaagaagatgtcaagcagggaacattttcaggccaaagaggtgctgaaaaaatatttggagtccaaggaggatgtggctgatgcacttctacagactgatcagtcactctcagaaaaggaaaaagcgattgaagtggaacgtataaaggctgaatctgcagaagctgcaaagaaaatgttggaggaaatacaaaagaagaatgaggagatgatggaacagaaagagaagagttatcaggaacatgtgaaacaattgactgagaagatggagagggacagggcccagttaatggcagagcaagagaagaccctcgctcttaaacttcaggaacaggaacgccttctcaaggagggattcgagaatgagagcaagagacttcaaaaagacatatgggatatccagatgagaagcaaatcattggagccaatatgtaacatactctaaaagtccaaggagcaaaatttgcctgtccagctccctctccccaagaaacaacatgaatgagcaacttcagagtgtcaaacaactgccattaaacttaactcaaaatca

SEQ ID NO: 1712 - protein, 145 aa, Homo sapiens; identical to SEQ ID NO: 1700

SEQ ID NO: 1713 - DNA, 2454 bp, Homo sapiens
aagaaaaaaagtgggagaaatcagtgcagccaaattcagaactaaagagaagagaataaagactcataactttctcattgaagctgccttcttaccaagtccagaggatctctactctggacagaggaacgccctgaacatggcatcagagatccacatgccaggcccagtgtgcctcactgagaacactaaagggcatctggtggtgaattcagaagctctggaaatcctgtctgccattacacagcctgtagtagtggtggcaattgtgggcctctaccgcacaggcaaatcctacctaatgaacaagctggctgggaagaacaaaggcttccctctgggctgcacagtgaagtctgaaaccaaaggcatctggatgtggtgtgtgccccacccctccaagccaaaccacaccctgatccttctggacacggagggcctgggtgatatggaaaagagtgaccctaagagtgactcgtggatctttgccctggctgtgcttctaagcagcagctttgtctacaacagcatgggcaccatcaaccaccaggccctggagcagctgcactacgtgactgagctaacagagctaatcagggcaaaatcgtgccccagacctgatgaagttgaggactccagcgagtttgtgagtttctttccagactttatttggactgttcgagattttaccctggagctgaagttagatggacaccccatcacagaagatgagtacctggagaatgccttgaagctgatttcaggcaagaatccccaaatccaaaattctaacaagcccagggagtggatcaggcatttctttccaaaacagaagtgctttgtctttgaccggccaataaatgacaaaaaactcttactccatgttgaagaagtacgagaagaccaactggatagtaatttccagatgcaatcagaaaatttctgttcttatatcttcacccatgcaaagaccaagaccctgagagagggaatccttgtcactggaaaccggctggggatgctggtggagacctacctggatgccatcaacagtggagcgactccttgtctggagaatgcaatggcagttctggcccagtgtgagaactcagcagccgtgcagagggcagccaaccactacagccagcagatggcccagcaagtgagattccccacagacacactccaggagctgctggacgtgcatgcagtttgtgagagggaagccattgcagtcttcatggagtactccttcaaagataaaagccaggaatttcagaagaagcttgtggacaccatggagaaaaagaaggaagactttgtgctgcagaatgaagaggcatctgccaaatattgtcaggctgagcttaagcggctttcagagctcttgacagaaagtatttcaagaggaactttctttgttccgggggggcacaatatctacttagaagcaaaaaagaagattgaacaggactatacactagtgcccagaaaaggagttaaggcagacgaggtcctccagagcttcctgcagtcacaggtggttatagaggaatccatcctgcagtcagacaaagccctcactgctggagagaaggccatagcagctaagcaggctaagaaggaggcagctgaaaaggaacaggagctgctaagacaaaaacagaaggaacagcagcaaatgatggaggctcaagagagaagtttccaggaaaacatagctcaactcaagaagaagatggagagggaaagggaaaactatatgagagaactgagaaagatgttgagtcacaagatgaaggtcctagaagaactgcttactgaaggatttaaagagatatttgagtcgttaaatgaagagattaatcgactgaaagaacaaattgaagcagctgaaaatgaagagccctcagtgttttcacagattcttgatgtggctggcagtatatttattgcagcactacctggggctgctaagctagttgatttaggaatgaaaattcttagctcattatgtaataggctgagaaatcctggtaagaaaattataagctgaggtttcttttgttaaaatggtataacgctgttgctcattttaaaagtatatgtgttattgcagtttcatttaagaaaagtttaaaattaaaaagcaaatttcaaagaatattatggcctgaagttcataaaaacaaacttaattttgactaaagtaataattaatagaaatggggaacaagttagaagataaaattattcctagaaaagatttaagtaaagcaaaaggacaaatggtaatataaagaaattattttcaattaatgttatagtcacagagataatttaagttataattagctcttgcaaatcagtgagaagagagtaacgccacatattttaaacaggcaaaaatatgataataaaaatgtttaattttactgacaataaaagttgtgc

SEQ ID NO: 1714 - protein, 638 aa, Homo sapiens
MASEIHMPGPVCLTENTKGHLVVNSEALEILSAITQPVVVVAIVGLYRTGKSYLMNKLAGKNKGFPLGCTVKSETKGIWMWCVPHPSKPNHTLILLDTEGLGDMEKSDPKSDSWIFALAVLLSSSFVYNSMGTINHQALEQLHYVTELTELIRAKSCPRPDEVEDSSEFVSFFPDFIWTVRDFTLELKLDGHPITEDEYLENALKLISGKNPQIQNSNKPREWIRHFFPKQKCFVFDRPINDKKLLLHVEEVREDQLDSNFQMQSENFCSYIFTHAKTKTLREGILVTGNRLGMLVETYLDAINSGATPCLENAMAVLAQCENSAAVQRAANHYSQQMAQQVRFPTDTLQELLDVHAVCEREAIAVFMEYSFKDKSQEFQKKLVDTMEKKKEDFVLQNEEASAKYCQAELKRLSELLTESISRGTFFVPGGHNIYLEAKKKIEQDYTLVPRKGVKADEVLQSFLQSQVVIEESILQSDKALTAGEKAIAAKQAKKEAAEKEQELLRQKQKEQQQMMEAQERSFQENIAQLKKKMERERENYMRELRKMLSHKMKVLEELLTEGFKEIFESLNEEINRLKEQIEAAENEEPSVFSQILDVAGSIFIAALPGAAKLVDLGMKILSSLCNRLRNPGKKIIS

SEQ ID NO: 1715 - DNA, 1865 bp, Homo sapiens
atattccttgtcccaacctgaagcttgacaaccaatgttttatacagggtcagcagtcccccgttatttgctagatgagcatggccttgctacaccagtggaaattagaattaattagaattaaacctgcattccctctcgaagggcattctttgtgctggaacaaaatttctttctacctccagtgagatgttgcttagggaatgtcacaaaaggtaaaccatgtatactcccatgattcaggtccaatcatctggaaatgttacacaaattcatcaaagcgttttctaagataatagagaaatagacacatatgcttaaacgttgaattagttaaatacaaaactctgactcctgaagaaaattggagattttcaaaagtggactatttcccttttataggtacaagaagaaatgcttaaggaagaatttcaaaagaaatctgagcagttaaataaagagattaatcaactgaaagaaaaaattgaaagcactaaaaatgaacagttaaggctcttaaagatccttgacatggctagcaacataatgattgtcactctacctggggcttccaagctacttggagtagggacaaaatatcttggctcacgtatttaagagcctgaatattccagtgcatgcagcccctgtcatgtaccgcctgtttgctcaaatcaatcatgaccctttcatgtgaaatctttagtgttgtgagcccttaaaagggacagaaattgtgcattcaaggagcttggattttaaggcagcagcttgctgatgccaccagctgaaaaaagcccttccttctccaactcggtgtctgagaagttttgtctgcagctcatcctgctacagaatgaactccttgtaattctacaagatatgccatgggccttttcacaggggacacaggcttcttaaaacaacccggcttcctcaccctatgtcctttatttacaaagctgtgctcctattcatgagcatggaatgtttttccatttgtttgtgacatctcttatttctttcaggggtatcttgtaattctcattatatatatcttttgcttccttggttagctgtatttttaggtattttagtcttcttgtggcaattgtgaatgggattgcattcctgatttggctcttggcttaatgttattaacgccacattttttaaatagacaaaaatatgagattaaaaatgttgaattttactaacaataaaagttgttcaaaggaaaactataaggttcttgtttcaactctgtcataggaagaacaggacagtgagctggcacagagttagggaaactgactgtgtctcatattggctagtgagagtgatctgttggaattgtatatcaaaattttaatgtacatacattttgtctagcaattctactattgggtatttatatagtacatataaatataaatgtatatgtttagtaaatatatacttatagttagtaaatatattttatatctatttagtaaatatactaaatgtcaggcctctgagcccaagctaagccatcatatcccctgtgacctgcatgtacatacgtccagatggcctgaagcaagtgaagaatcacaaaagaagtgaaaatggcctgttcctgccttaactgatgacattaccttgtgaaattccttctcctggctcatcctggctcaaaagctcccccactaagcaacttgtgacacccacctctgcccgccagagaacaaccccctttgactgtaattttcctttaccaacccaaatcctgtaaaatggtcccaaccctatctcccttcactgactgtcttttcggactcagccagcctgcacccaggtgattaaaaagctttattgctcac

SEQ ID NO: 1716 - protein, 67 aa, Homo sapiens [sequence omitted]

SEQ ID NO: 1717 - DNA, 6144 bp, Homo sapiens
gtcctttcaatttcggttctcacagactcttacttggatgtctgtaaatccggctggactttcagcttctaagaacagtccgtttctcgaggatccaggcgcaggaggacagagcaatgggtgagagaactcttcacgctgcagtgcccacaccaggttatccagaatctgaatccatcatgatggcccccatttgtctagtggaaaaccaggaagagcagctgacagtgaattcaaaggcattagagattcttgacaagatttctcagcccgtggtggtggtggccattgtagggctataccgcacaggaaaatcctatctcatgaatcgtcttgcaggaaagcgcaatggcttccctctgggctccacggtgcagtctgaaactaagggcatctggatgtggtgtgtgccccacctctctaagccaaaccacaccctggtccttctggacaccgagggcctgggcgatgtagaaaagagtaaccctaagaatgactcgtggatctttgccctggctgtgcttctaagcagcagctttgtctataacagcgtgagcaccatcaaccaccaggccctggagcagctgcactatgtgactgagctagcagagctaatcagggcaaaatcctgccccagacctgatgaagctgaggactccagcgagtttgcgagtttctttccagactttatttggactgttcgggattttaccctggagctaaagttagatggaaaccccatcacagaagatgagtacctggagaatgccttgaagctgattccaggcaagaatcccaaaattcaaaattcaaacatgcctagagagtgtatcaggcatttcttccgaaaacggaagtgctttgtctttgaccggcctacaaatgacaagcaatatttaaatcatatggacgaagtgccagaagaaaatctggaaaggcatttccttatgcaatcagacaacttctgttcttatatcttcacccatgcaaagaccaagaccctgagagagggaatcattgtcactggaaagcggctggggactctggtggtgacttatgtagatgccatcaacagtggagcagtaccttgtctggagaatgcagtgacagcactggcccagcttgagaacccagcggctgtgcagagggcagccgaccactatagccagcagatggcccagcaactgaggctccccacagacacgctccaggagctgctggacgtgcatgcagcctgtgagagggaagccattgcagtcttcatggagcactccttcaaggatgaaaaccatgaattccagaagaagcttgtggacaccatagagaaaaagaagggagactttgtgctgcagaatgaagaggcatctgccaaatattgccaggctgagcttaagcggctttcagagcacctgacagaaagcattttgagaggaattttctctgttcctggaggacacaatctctacttagaagaaaagaaacaggttgagtgggactataagctagtgcccagaaaaggagttaaggcaaacgaggtcctccagaacttcctgcagtcacaggtggttgtagaggaatccatcctgcagtcagacaaagccctcactgctggagagaaggccatagcagcggagcgggccatgaaggaagcagctgagaaggaacaggagctgctaagagaaaaacagaaggagcagcagcaaatgatggaggctcaagagagaagcttccaggaatacatggcccaaatggagaagaagttggaggaggaaagggaaaaccttctcagagagcatgaaaggctgctaaaacacaagctgaaggtacaagaagaaatgcttaaggaagaatttcaaaagaaatctgagcagttaaataaagagattaatcaactgaaagaaaaaattgaaagcactaaaaatgaacagttaaggctcttaaagatccttgacatggctagcaacataatgattgtcactctacctggggcttccaagctacttggagtagggacaaaatatcttggctcacgtatttaagagcctgaatattccaggtaagaaaatataaaatgaggtttattttattttaataacataacactgttgctcattttgtaagtatatgtgttatagcagtttcattcaagaaaagtttaaaattaaaaagtgattatcaaagaatatcagggcctgacatccacaaaaaacaaacttaattttgattgaactaataatttataaacatgggaaacaagtcagaagtagtgacattattcctagaaaagatttaaggaaagcaaaaagacaactggtaagattaagaagccattaaccatttgcaatttatattatagtcacagaaataatttcagttatgactagctcttgccgattaatgagaagagagcagctccacaatttttaatttttttaacttttattttagattcaggggtatatgtgcaggtttgttacataggtaaactgcatgtcatgggggtttggtgtgcagataattttatcacacaattattaatcataatacccaataggtttttttctgatcttctccctcctcccaacctacaccctcaagtagaccccagtgtctcttgttctcctctgagtatccatgtgttctctttgtttggcccccatttataagtgagaacatgtggtatttgggtttctgttcctgtgttagtttgcttatgataatggcttccagctccatccatattgctacagaggacatgatcttgttgttttttatggctgcatagtattccatggtgtttgtatataccacattttcattatccagcctattattaatgcacatttaggttgattccttatctttgctattgtgaacagtgctgcaatggacatacacgtgcatgtgcctttatggtacaatgatttatatttccttgggatatgcattcctttgggaataatgggattgctgagttgaatggtaattctgagttctttgaggaatcaccaacctgctttccacagtggctaaactaatttacactcccaccaacagtgtatgtgttccattttctccacaaccttgccagcatctgttatttattgactttctagtaacagccattctgactggtgtgagatggtatgcatttctgtagtgattagtgatgatgagtgatttttatatgctttttaaatgcatatatgtcttcttttgaaatgtgttcatgttctttgcccactttctttttaatggggttgcttgtttttcgcttgtaaattttttgaagcttcttatagattctggatattagatctttgttggatgcatagttggcaaatattttctaccattctgtaggttgtctgttactttgttaattgtttcattttgttttgtttttgttttttgaaacagggtctcactttgacacccaggctggagtgcagtagcacaaacatgggtcattgtagcctcaacctcccaggctcaagcagtcctttcacctcaaccccccacatagctgggactacaggtgcttacacccaagaccagttaattttttgtatttgtttgtagagatgtgtttttccatgttgcccaagctggtcttgaactactgagctcaagcaatctgcctgcttcagcctcccaaagtactgggatttaggcatgagccaccacatctggccaatagtttcttttgatgtgcagaagctctttaatttaattagatctcctttgtcagtttttgtttttgctgcaattgcttatgttatcttcatcatgaaattttagccaagtcttatgtccagaatggtatttcttaggttatttttcagagtttttatagtttaatgttttatatttaagtctttaatccttcttaagttgatttttgtatgcagagtaagctgggggcccagtttcaatcttctgcatatggctagccagtaatcccagcaccatttattaaatggggacttctttccccattgcttgtttttgtcagctttgtccaagatcagatgattgtaggtgtacagcattatttctggactctctgttatgttccatttatctgtgtgtctgtttttctactaataccatgctgttttggttactgtagctctgtagtatggtttgaggtttggtaacttgatgcctccccttttgttctttatgtttaggattgccttggctaggctcttttttggttccatatgaattttaaagtagtttctaattctgtgaagaatgtcattggtagtttgatagggatagcattgaactatttgctcaactcaacattttaggaatttatttctgctgtctagtgctcaaaacttgcagctagaattgagggaagagagagaccttcttatattgttttatattgtttgatactcagtacctgttttaagaaaaaacaacaaggaagtaaaaccaaagacaggcagcccagcgccaggcccaaaaccaggcctgggcctgcctggcctaaacccagtagttaaaaatcaactcattgcctgtaatcccagcactttgggaggccgagacgggtggatcacgaggtcaggagatcgagaccatcctggctaacacggtgaaaccccgtctctactaaaaatacaaaaattagccgggcatggtggcacgcgcctgtagtcccagctacacgggaggctgaggcaggagaatggcgtgaacccaggaggcggagcttgcagtgagtcgagatcgcgccactgcactccagcctgggcgacagagcgaaactccgtctcaaaaaaaaaaaaaaaaaatcaactcataacttagaaaccgatgttattcatagattccagacattgtatagaagaacatttggaaactcactgccttgttctgtttctctctgaccaccagtgcatgcagcccctgtcatgtaccgcctgtttgctcaaatcaatcatgaccctttcatgtgaaatctttagtgttgtgagcccttaaaagggacagaaattgtgcattcaaggagcttggattttaaggcagcagcttgctgatgccaccagctgaaaaaagcccttccttctccaactcggtgtctgagaagttttgtctgcagctcatcctgctacagaatgaactccttgtaattctacaagatatgccatgggccttttcacaggggacacaggcttcttaaaacaacccggcttcctcaccctatgtcctttatttacaaagctgtgctcctattcatgagcatggaatgtttttccatttgtttgtgacatctcttatttctttcaggggtatcttgtaattctcattatatatatcttttgcttccttggttagctgtatttttaggtattttagtcttcttgtggcaattgtgaatgggattgcattcctgatttggctcttggcttaatgttattaacgccacattttttaaatagacaaaaatatgagattaaaaatgttgaattttactaacaataaaagttgttcaaaggaaaactataaggttcttgtttcaactctgtcataggaagaacaggacagtgagctggcacagagttagggaaactgactgtgtctcatattggctagtgagagtgatctgttggaattgtatatcaaaattttaatgtacatacattttgtctagcaattctactattgggtatttatatagtacatataaatataaatgtatatgtttagtaaatatatacttatagttagtaaatatattttatatctatttagtaaatatactaaatgtcaggcctctgagcccaagctaagccatcatatcccctgtgacctgcatgtacatacgtccagatggcctgaagcaagtgaagaatcacaaaagaagtgaaaatggcctgttcctgccttaactgatgacattaccttgtgaaattccttctcctggctcatcctggctcaaaagctcccccactaagcaacttgtgacacccacctctgcccgccagagaacaaccccctttgactgtaattttcctttaccaacccaaatcctgtaaaatggtcccaaccctatctcccttcactgactgtcttttcggactcagccagcctgcacccaggtgattaaaaagctttattgctcac

SEQ ID NO: 1718 - protein, 640 aa, Homo sapiens; identical to SEQ ID NO: 40

SEQ ID NO: 1719 - DNA, 2413 bp, Homo sapiens
aggctgtggaacctttgttctttcactctttgcaataaatcttgctgctgctcactctttgggtccacactgcctttatgagctgtaacactcactgggaatgtctgcagcttcactcctgaagccagcgagaccacgaacccaccaggaggaacaaacaactccagacgcgcagccttaagagctgtaacactcaccgcgaaggtctgcagcttcactcctgagccagccagaccacgaacccaccagaaggaagaaactccaaacacatccgaacatcagaaggagcaaactcctgacacgccacctttaagaaccgtgacactcaacgctagggtccgcggcttcattcttgaagtcagtgagaccaagaacccaccaattccggacacggcaaagtaacatcctagacatggctttagagatccacatgtcagaccccatgtgcctcatcgagaactttaatgagcagctgaaggttaatcaggaagctttggagatcctgtctgccattacgcaacctgtagttgtggtagcgattgtgggcctctatcgcactggcaaatcctacctgatgaacaagctggctgggaagaacaagggcttctctgttgcatctacggtgcagtctcacaccaagggaatttggatatggtgtgtgcctcatcccaactggccaaatcacacattagttctgcttgacaccgagggcctgggagatgtagagaaggctgacaacaagaatgatatccagatctttgcactggcactcttactgagcagcacctttgtgtacaatactgtgaacaaaattgatcagggtgctatcgacctactgcacaatgtgacagaactgacagatctgctcaaggcaagaaactcacccgaccttgacagggttgaagatcctgctgactctgcgagcttcttcccagacttagtgtggactctgagagatttctgcttaggcctggaaatagatgggcaacttgtcacaccagatgaatacctggagaattccctaaggccaaagcaaggtagtgatcaaagagttcaaaatttcaatttgccccgtctgtgtatacagaagttctttccaaaaaagaaatgctttatctttgacttacctgctcaccaaaaaaagcttgcccaacttgaaacactgcctgatgatgagctagagcctgaatttgtgcaacaagtgacagaattctgttcctacatctttagccattctatgaccaagactcttccaggtggcatcatggtcaatggatctcgtctaaagaacctggtgctgacctatgtcaatgccatcagcagtggggatctgccttgcatagagaatgcagtcctggccttggctcagagagagaactcagctgcagtgcaaaaggccattgcccactatgaccagcaaatgggccagaaagtgcagctgcccatggaaaccctccaggagctgctggacctgcacaggaccagtgagagggaggccattgaagtcttcatgaaaaactctttcaaggatgtagaccaaagtttccagaaagaattggagactctactagatgcaaaacagaatgacatttgtaaacggaacctggaagcatcctcggattattgctcggctttacttaaggatatttttggtcctctagaagaagcagtgaagcagggaatttattctaagccaggaggccataatctcttcattcagaaaacagaagaactgaaggcaaagtactatcgggagcctcggaaaggaatacaggctgaagaagttctgcagaaatatttaaagtccaaggagtctgtgagtcatgcaatattacagactgaccaggctctcacagagacggaaaaaaagaagaaagaggcacaagtgaaagcagaagctgaaaaggctgaagcgcaaaggttggcggcgattcaaaggcagaacgagcaaatgatgcaggagagggagagactccatcaggaacaagtgagacaaatggagatagccaaacaaaattggctggcagagcaacagaaaatgcaggaacaacagatgcaggaacaggctgcacagctcagcacaacattccaagctcaaaatagaagccttctcagtgagctccagcacgcccagaggactgttaataacgatgatccatgtgttttactctaaagtgctaaatatgggagtttcctttttttactctttgtcactgatgacacaacagaaaagaaactgtagaccttgggacaatcaacatttaaataaactttataattattttttcaaactttcatatagagttataagattatgatgctggtatctggtaaaatgtacatcccagtagtccaatagtttaaatgtttattgcttcctttaagagattataaattgtataagggacattgt

SEQ ID NO: 1720 - protein, 586 aa, Homo sapiens; identical to SEQ ID NO: 42

SEQ ID NO: 1721 - DNA, 2538 bp, Homo sapiens
cactgaggtcaccctccaggctgtggaacctttgttctttcactctttgcaataaatcttgctgctgctcactctttgggtccacactgcctttatgagctgtaacactcactgggaatgtctgcagcttcactcctgaagccagcgagaccacgaacccaccaggaggaacaaacaactccagacgcgcagccttaagagctgtaacactcaccgcgaaggtctgcagcttcactcctgagccagccagaccacgaacccaccagaaggaagaaactccaaacacatccgaacatcagaaggagcaaactcctgacacgccacctttaagaaccgtgacactcaacgctagggtccgcggcttcattcttgaagtcagtgagaccaagaacccaccaattccggacacgctaattgttgtagatcatcacttcaaggtgcccatatctttctagtggaaaaattattctggcctccgctgcatacaaatcaggcaaccagaattctacatatataaggcaaagtaacatcctagacatggctttagagatccacatgtcagaccccatgtgcctcatcgagaactttaatgagcagctgaaggttaatcaggaagctttggagatcctgtctgccattacgcaacctgtagttgtggtagcgattgtgggcctctatcgcactggcaaatcctacctgatgaacaagctggctgggaagaacaagggcttctctgttgcatctacggtgcagtctcacaccaagggaatttggatatggtgtgtgcctcatcccaactggccaaatcacacattagttctgcttgacaccgagggcctgggagatgtagagaaggctgacaacaagaatgatatccagatctttgcactggcactcttactgagcagcacctttgtgtacaatactgtgaacaaaattgatcagggtgctatcgacctactgcacaatgtgacagaactgacagatctgctcaaggcaagaaactcacccgaccttgacagggttgaagatcctgctgactctgcgagcttcttcccagacttagtgtggactctgagagatttctgcttaggcctggaaatagatgggcaacttgtcacaccagatgaatacctggagaattccctaaggccaaagcaaggtagtgatcaaagagttcaaaatttcaatttgccccgtctgtgtatacagaagttctttccaaaaaagaaatgctttatctttgacttacctgctcaccaaaaaaagcttgcccaacttgaaacactgcctgatgatgagctagagcctgaatttgtgcaacaagtgacagaattctgttcctacatctttagccattctatgaccaagactcttccaggtggcatcatggtcaatggatctcgtctaaagaacctggtgctgacctatgtcaatgccatcagcagtggggatctgccttgcatagagaatgcagtcctggccttggctcagagagagaactcagctgcagtgcaaaaggccattgcccactatgaccagcaaatgggccagaaagtgcagctgcccatggaaaccctccaggagctgctggacctgcacaggaccagtgagagggaggccattgaagtcttcatgaaaaactctttcaaggatgtagaccaaagtttccagaaagaattggagactctactagatgcaaaacagaatgacatttgtaaacggaacctggaagcatcctcggattattgctcggctttacttaaggatatttttggtcctctagaagaagcagtgaagcagggaatttattctaagccaggaggccataatctcttcattcagaaaacagaagaactgaaggcaaagtactatcgggagcctcggaaaggaatacaggctgaagaagttctgcagaaatatttaaagtccaaggagtctgtgagtcatgcaatattacagactgaccaggctctcacagagacggaaaaaaagaagaaagaggcacaagtgaaagcagaagctgaaaaggctgaagcgcaaaggttggcggcgattcaaaggcagaacgagcaaatgatgcaggagagggagagactccatcaggaacaagtgagacaaatggagatagccaaacaaaattggctggcagagcaacagaaaatgcaggaacaacagatgcaggaacaggctgcacagctcagcacaacattccaagctcaaaatagaagccttctcagtgagctccagcacgcccagaggactgttaataacgatgatccatgtgttttactctaaagtgctaaatatgggagtttcctttttttactctttgtcactgatgacacaacagaaaagaaactgtagaccttgggacaatcaacatttaaataaactttataattattttttcaaactttcatatagagttataagattatgatgctggtatctggtaaaatgtacatcccagtagtccaatagtttaaatgtttattgcttcctttaagagattataaattgtataagggacattgt

SEQ ID NO: 1722 - protein, 586 aa, Homo sapiens; identical to SEQ ID NO: 42

SEQ ID NO: 1723 - DNA, 626 bp, Homo sapiens
gattcaaaggcagaacgagcaaatgatgcaggagagggagagactccatcaggaacaagtgagacaaatggagatagccaaacaaaattggctggcagagcaacagaaaatgcaggaacaacagatgcaggtattcatcaattgtttcatctctcccctgcctgtaacgatgagagtatgtagcagtggcaaagagggagaggcagcaagatcttgtggctctcagcagggagtctggagccagaaagtctgggtatgaatccaagctccacctcttagaacaggctgcacagctcagcacaacattccaagctcaaaatagaagccttctcagtgagctccagcacgcccagaggactgttaataacgatgatccatgtgttttactctaaagtgctaaatatgggagtttcctttttttactctttgtcactgatgacacaacagaaaagaaactgtagaccttgggacaatcaacatttaaataaactttataattattttttcaaactttcatatagagttataagattatgatgctggtatctggtaaaatgtacatcccagtagtccaatagtttaaatgtttattgcttcctttaagagattataaattgtataaggga

SEQ ID NO: 1724 - protein, 78 aa, Homo sapiens
MMQERERLHQEQVRQMEIAKQNWLAEQQKMQEQQMQVFINCFISPLPVTMRVCSSGKEGEAARSCGSQQGVWSQKVWV

SEQ ID NO: 1725 - DNA, 430 bp, Homo sapiens
aaaataaagtctctctattttacaggactctttttattttaaaactttttttttccagaaacttaggcagtgctggggagtagtatgtccccaggttcagtaagcaaaatgacttcctttgcttattaaacaaacaccagaaattccagcacgcccagaggactgttaataacgatgatccatgtgttttactctaaagtgctaaatatgggagtttcctttttttactctttgtcactgatgacacaacagaaaagaaactgtagaccttgggacaatcaacatttaaataaactttataattattttttcaaactttcatatagagttataagattatgatgctggtatctggtaaaatgtacatcccagtagtccaatagtttaaatgtttattgcttcctttaagagattataaattgtataaggg

SEQ ID NO: 1726 - protein, 55 aa, Homo sapiens
MIHVFYSKVLNMGVSFFYSLSLMTQQKRNCRPWDNQHLNKLYNYFFKLSYRVIRL

SEQ ID NO: 1727 - DNA, 2296 bp, Homo sapiens
aggctgtggaacctttgttctttcactctttgcaataaatcttgctgctgctcactctttgggtccacactgcctttatgagctgtaacactcactgggaatgtctgcagcttcactcctgaagccagcgagaccacgaacccaccaggaggaacaaacaactccagacgcgcagccttaagagctgtaacactcaccgcgaaggtctgcagcttcactcctgagccagccagaccacgaacccaccagaaggaagaaactccaaacacatccgaacatcagaaggagcaaactcctgacacgccacctttaagaaccgtgacactcaacgctagggtccgcggcttcattcttgaagtcagtgagaccaagaacccaccaattccggacacggcaaagtaacatcctagacatggctttagagatccacatgtcagaccccatgtgcctcatcgagaactttaatgagcagctgaaggttaatcaggaagctttggagatcctgtctgccattacgcaacctgtagttgtggtagcgattgtgggcctctatcgcactggcaaatcctacctgatgaacaagctggctgggaagaacaagggcttctctgttgcatctacggtgcagtctcacaccaagggaatttggatatggtgtgtgcctcatcccaactggccaaatcacacattagttctgcttgacaccgagggcctgggagatgtagagaaggctgacaacaagaatgatatccagatctttgcactggcactcttactgagcagcacctttgtgtacaatactgtgaacaaaattgatcagggtgctatcgacctactgcacaatgtgacagaactgacagatctgctcaaggcaagaaactcacccgaccttgacagggttgaagatcctgctgactctgcgagcttcttcccagacttagtgtggactctgagagatttctgcttaggcctggaaatagatgggcaacttgtcacaccagatgaatacctggagaattccctaaggccaaagcaaggtagtgatcaaagagttcaaaatttcaatttgccccgtctgtgtatacagaagttctttccaaaaaagaaatgctttatctttgacttacctgctcaccaaaaaaagcttgcccaacttgaaacactgcctgatgatgagctagagcctgaatttgtgcaacaagtgacagaattctgttcctacatctttagccattctatgaccaagactcttccaggtggcatcatggtcaatggatctcgtctaaagaacctggtgctgacctatgtcaatgccatcagcagtggggatctgccttgcatagagaatgcagtcctggccttggctcagagagagaactcagctgcagtgcaaaaggccattgcccactatgaccagcaaatgggccagaaagtgcagctgcccatggaaaccctccaggagctgctggacctgcacaggaccagtgagagggaggccattgaagtcttcatgaaaaactctttcaaggatgtagaccaaagtttccagaaagaattggagactctactagatgcaaaacagaatgacatttgtaaacggaacctggaagcatcctcggattattgctcggctttacttaaggatatttttggtcctctagaagaagcagtgaagcagggaatttattctaagccaggaggccataatctcttcattcagaaaacagaagaactgaaggcaaagtactatcgggagcctcggaaaggaatacaggctgaagaagttctgcagaaatatttaaagtccaaggagtctgtgagtcatgcaatattacagactgaccaggctctcacagagacggaaaaaaagaagaaagaggcacaagtgaaagcagaagctgaaaaggctgaagcgcaaaggttggcggcgattcaaaggcagaacgagcaaatgatgcaggagagggagagactccatcaggaacaagtgagacaaatggagatagccaaacaaaattggctggcagagcaacagaaaatgcaggaacaacagatgcaggaacaggctgcacagctcagcacaacattccaagctcaaaatagaagccttctcagtgagctccagcacgcccagaggactgttaataacgatgatccatgtgttttactctaaagtgctaaatatgggagtttcctttttttactctttgtcactgatgacacaacagaaaagaaactgtagaccttgggacaatcaacatttaaataaactttataattattttttcaaactttc

SEQ ID NO: 1728 - protein, 586 aa, Homo sapiens; identical to SEQ ID NO: 42

SEQ ID NO: 1729 - DNA, 2421 bp, Homo sapiens
cactgaggtcaccctccaggctgtggaacctttgttctttcactctttgcaataaatcttgctgctgctcactctttgggtccacactgcctttatgagctgtaacactcactgggaatgtctgcagcttcactcctgaagccagcgagaccacgaacccaccaggaggaacaaacaactccagacgcgcagccttaagagctgtaacactcaccgcgaaggtctgcagcttcactcctgagccagccagaccacgaacccaccagaaggaagaaactccaaacacatccgaacatcagaaggagcaaactcctgacacgccacctttaagaaccgtgacactcaacgctagggtccgcggcttcattcttgaagtcagtgagaccaagaacccaccaattccggacacgctaattgttgtagatcatcacttcaaggtgcccatatctttctagtggaaaaattattctggcctccgctgcatacaaatcaggcaaccagaattctacatatataaggcaaagtaacatcctagacatggctttagagatccacatgtcagaccccatgtgcctcatcgagaactttaatgagcagctgaaggttaatcaggaagctttggagatcctgtctgccattacgcaacctgtagttgtggtagcgattgtgggcctctatcgcactggcaaatcctacctgatgaacaagctggctgggaagaacaagggcttctctgttgcatctacggtgcagtctcacaccaagggaatttggatatggtgtgtgcctcatcccaactggccaaatcacacattagttctgcttgacaccgagggcctgggagatgtagagaaggctgacaacaagaatgatatccagatctttgcactggcactcttactgagcagcacctttgtgtacaatactgtgaacaaaattgatcagggtgctatcgacctactgcacaatgtgacagaactgacagatctgctcaaggcaagaaactcacccgaccttgacagggttgaagatcctgctgactctgcgagcttcttcccagacttagtgtggactctgagagatttctgcttaggcctggaaatagatgggcaacttgtcacaccagatgaatacctggagaattccctaaggccaaagcaaggtagtgatcaaagagttcaaaatttcaatttgccccgtctgtgtatacagaagttctttccaaaaaagaaatgctttatctttgacttacctgctcaccaaaaaaagcttgcccaacttgaaacactgcctgatgatgagctagagcctgaatttgtgcaacaagtgacagaattctgttcctacatctttagccattctatgaccaagactcttccaggtggcatcatggtcaatggatctcgtctaaagaacctggtgctgacctatgtcaatgccatcagcagtggggatctgccttgcatagagaatgcagtcctggccttggctcagagagagaactcagctgcagtgcaaaaggccattgcccactatgaccagcaaatgggccagaaagtgcagctgcccatggaaaccctccaggagctgctggacctgcacaggaccagtgagagggaggccattgaagtcttcatgaaaaactctttcaaggatgtagaccaaagtttccagaaagaattggagactctactagatgcaaaacagaatgacatttgtaaacggaacctggaagcatcctcggattattgctcggctttacttaaggatatttttggtcctctagaagaagcagtgaagcagggaatttattctaagccaggaggccataatctcttcattcagaaaacagaagaactgaaggcaaagtactatcgggagcctcggaaaggaatacaggctgaagaagttctgcagaaatatttaaagtccaaggagtctgtgagtcatgcaatattacagactgaccaggctctcacagagacggaaaaaaagaagaaagaggcacaagtgaaagcagaagctgaaaaggctgaagcgcaaaggttggcggcgattcaaaggcagaacgagcaaatgatgcaggagagggagagactccatcaggaacaagtgagacaaatggagatagccaaacaaaattggctggcagagcaacagaaaatgcaggaacaacagatgcaggaacaggctgcacagctcagcacaacattccaagctcaaaatagaagccttctcagtgagctccagcacgcccagaggactgttaataacgatgatccatgtgttttactctaaagtgctaaatatgggagtttcctttttttactctttgtcactgatgacacaacagaaaagaaactgtagaccttgggacaatcaacatttaaataaactttataattattttttcaaactttc

SEQ ID NO: 1730 - protein, 586 aa, Homo sapiens; identical to SEQ ID NO: 42

SEQ ID NO: 1731 - DNA, 514 bp, Homo sapiens
gattcaaaggcagaacgagcaaatgatgcaggagagggagagactccatcaggaacaagtgagacaaatggagatagccaaacaaaattggctggcagagcaacagaaaatgcaggaacaacagatgcaggtattcatcaattgtttcatctctcccctgcctgtaacgatgagagtatgtagcagtggcaaagagggagaggcagcaagatcttgtggctctcagcagggagtctggagccagaaagtctgggtatgaatccaagctccacctcttagaacaggctgcacagctcagcacaacattccaagctcaaaatagaagccttctcagtgagctccagcacgcccagaggactgttaataacgatgatccatgtgttttactctaaagtgctaaatatgggagtttcctttttttactctttgtcactgatgacacaacagaaaagaaactgtagaccttgggacaatcaacatttaaataaactttataattattttttcaaacttt

SEQ ID NO: 1732 - protein, 78 aa, Homo sapiens; identical to SEQ ID NO: 1724

SEQ ID NO: 1733 - DNA, 601 bp, Homo sapiens
tttgggtccacactgcctttatgagctgtaacactcactgggaatgtctgcagcttcactcctgaagccagcgagaccacgaacccaccaggaggaacaaacaactccagacgcgcagccttaagagctgtaacactcaccgcgaaggtctgcagcttcactcctgagccagccagaccacgaacccaccagaaggaagaaactccaaacacatccgaacatcagaaggagcaaactcctgacacgccacctttaagaaccgtgacactcaacgctagggtccgcggcttcattcttgaagtcagtgagaccaagaacccaccaattccggacacgctaattgttgtagatcatcacttcaaggtgcccatatctttctagtggaaaaattattctggcctccgctgcatacaaatcaggcaaccagaattctacatatataaggtactaatactacattgaaaatagattagaatgagaagagacctgccatttgagtctctaaatttgttgcaaaattgcctctttctgggtcaggcttgcactaggcatttcctgactcccatgtcctagtgctacaccatttgcaaatggatatcct

SEQ ID NO: 1734 - protein, 32 aa, Homo sapiens
MRRDLPFESLNLLQNCLFLGQACTRHFLTPMS

SEQ ID NO: 1735 - DNA, 348 bp, Homo sapiens
caatcactattgtagccccagactaacgcatagctagccaactgtcaggcatagacagggtctcactatgttgccaggctgttttcgaactcctgggctcaagcaatcctcctatcttggcctcccaaactgctgggattacaagtgtgagtcactgcgcctggcctgaagattctatttcacctatgaaaacatgctttaaactgccacagaatgaagcctgccttgtttaatgtgttgtgtgaaatcaaagaaaaaacagacctcgtttcgtggactaacacacttataacacatcccaggagggcatttaaattttaaagcaacaattaaaaaatagcagtcatc

SEQ ID NO: 1736 - protein, 35 aa, Homo sapiens
MKPALFNVLCEIKEKTDLVSWTNTLITHPRRAFKF

SEQ ID NO: 1737 - DNA, 782 bp, Homo sapiens
ctgacggggctgctggagtttgcagagacacggaggaggagagagcctgtgctttgcctgccgccgcggctgggggagatctggcttttgcaacagcccaccccctttgagatcactctggcccggagtgggggtggggggcagcggggggtggggggggaaagtttgcattgcaatccccctgccttcctctcctttctcccgatcaatgcatatttgcaaaaggattaagccacagatttaagcgccgggagcccatttctgccttgcaaaggagaccggactgaaaaacctaaagccagctctgatttcttttcgccaagtgggaaggatttgaagacaagcttgaaggataaaaagccttggtgcttcccaggagccgagccgaggagcagaagaggaagagccgggggctgccgtagcctttggagatggacgagcagcccaggctgatgcattcccatgctggggtcgggatggccggacaccccggcctgtcccagcacttgcaggatggggccggagggaccgagggggagggcgggaggaagcaggacattggagacattttacagcaaattatgaccatcacagaccagagtttggatgaggcgcaggccagcaactacatggcggaggagtaaaatttgaaggagcgttgttatcgaaagtgtaatcgcccatgccgagatgtggctgtgtacatatttgtgtgtgtgtgtgtgaatataggggtattcatttatatccacacaaacacacaggcatgccgaaaatactgc

SEQ ID NO: 1738 - protein, 70 aa, Homo sapiens
MDEQPRLMHSHAGVGMAGHPGLSQHLQDGAGGTEGEGGRKQDIGDILQQIMTITDQSLDEAQASNYMAEE

SEQ ID NO: 1739 - DNA, 1913 bp, Homo sapiens
aatgcatatttgcaaaaggattaagccacagatttaagcgccgggagcccatttctgccttgcaaaggagaccggactgaaaaacctaaagccagctctgatttcttttcgccaagtgggaaggatttgaagacaagcttgaaggataaaaagccttggtgcttcccaggagccgagccgaggagcagaagaggaagagccgggggctgccgtagcctttggagatggacgagcagcccaggctgatgcattcccatgctggggtcgggatggccggacaccccggcctgtcccagcacttgcaggatggggccggagggaccgagggggagggcgggaggaagcaggacattggagacattttacagcaaattatgaccatcacagaccagagtttggatgaggcgcaggccagaaaacatgctttaaactgccacagaatgaagcctgccttgtttaatgtgttgtgtgaaatcaaagaaaaaacagttttgagtatccgaggagcccaggaggaggaacccacagacccccagctgatgcggctggacaacatgctgttagcggaaggcgtggcggggcctgagaagggcggagggtcggcggcagcggcggcagcggcggcggcttctggaggggcaggttcagacaactcagtggagcattcagattacagagccaaactctcacagatcagacaaatctaccatacggagctggagaaatacgagcaggcctgcaacgagttcaccacccacgtgatgaatctcctgcgagagcaaagccggaccaggcccatctccccaaaggagattgagcggatggtcagcatcatccaccgcaagttcagctccatccagatgcagctcaagcagagcacgtgcgaggcggtgatgatcctgcgttcccgatttctggatgcgcggcggaagagacggaatttcaacaagcaagcgacagaaatcctgaatgaatatttctattcccatctcagcaacccttaccccagtgaggaagccaaagaggagttagccaagaagtgtggcatcacagtctcccaggtatcaaactggtttggaaataagcgaatccggtacaagaagaacataggtaaatttcaagaggaagccaatatttatgctgccaaaacagctgtcactgctaccaatgtgtcagcccatggaagccaagctaactcgccctcaactcccaactcggctggttcttccagttcttttaacatgtcaaactctggagatttgttcatgagcgtgcagtcactcaatggggattcttaccaaggggcccaggttggagccaacgtgcaatcacaggtggatacccttcgccatgttatcagccagacaggaggatacagtgatggactcgcagccagtcagatgtacagtccgcagggcatcagtgctaatggaggttggcaggatgctactaccccttcatcagtgacctcccctacagaaggccctggcagtgttcactctgatacctccaactgatctcccagcaatcgcatcccggctgaccctgtgccccagttggggcaggggcaggagggagggtttctctcccaacgctgaagcggtcagactggaggtcgaagcaatcagcaaacacaataagagtctccttctcttctcttctttgggatgctatttcagccaatctggacacttctttatactctcttcccttttttttctgggtagaagccacccttccctgcctccagctgtcagcctggttttcgtcatcttccctgcccctgtgcctctgtcctagactcccggggtccccgccctctctcatatcactgaaggatattttcaacaattagaggaatttaaagaggaaaaaaattacaaagaaaataataaaagtgtttgtacgttttc

SEQ ID NO: 1740 - protein, 430 aa, Homo sapiens; identical to SEQ ID NO: 44

SEQ ID NO: 1741 - DNA, 1889 bp, Homo sapiens
atggacgagcagcccaggctgatgcattcccatgctggggtcgggatggccggacaccccggcctgtcccagcacttgcaggatggggccggagggaccgagggggagggcgggaggaagcaggacattggagacattttacagcaaattatgaccatcacagaccagagtttggatgaggcgcaggccagaaaacatgctttaaactgccacagaatgaagcctgccttgtttaatgtgttgtgtgaaatcaaagaaaaaacagatttattaaaacagatgtgatctaccaataatgttttacatctgatggaaagaattggaatataataatcctacttttctttaatgcattactaattcagacaggcccttctggttgttctgaattggagagagagcagacacttcagttggatttggaatcatccacttttttttgcaggtatttcgaaaaaagcctggttttggtacagctcttccagaacccacgggaagaacctgttcatcagctcatccatccgtctgctgagtaaatgcttattgagcatctactgaatgccagcactgttctttgttcttggaatacatcagtaaacaaaataaggaaaacaaaaccaaacctcctgacctcaaggagcttttattttaggaatgatgtcttttagtcatttaatagttgctgtttttattaactcttaactgtacccataaactggatactttcaacttaaaaaaaaaaaagagaaactaattatgtgccctaaggatcaccaggccttaggttctacctttatttttcttctactgttaaatagcaacctcattcctcaggctgctgatggaattggtaactgagtaatcaggccactgtgctcggggacataaaacctgtggctgctgccattgcagagtcccgtcatggatcagagttcgtccctgggaaacaacttgtgccgacggaaggagttcttcctttgctcccctcatacctcccttccttgcagatgggatccttgcaagggcagagcagctcttagagttgtcaggcccttttctttcattctgcttattttcccataggcgagtactgctcagaacccaggctgtgagttttttgatgtggaaagctatttactaagcatgtcttgacgcagaggatggagggaaagaaagcctccaagagagtggtgattctacaaccatcatcaaattttggttgaaaactcaaagctgctgatatgtattagtaagcagataacagtaacatcctgtatttgcatggccctgtatcagtcaatagcattcagatttgtgtggtggtgtatagctttccttatttcatatcaggtgttttcatttgatcccaagtggtatgtcctgagacagaagaaatagccccattttacagaagaagaaacccaaaattgcaaggaatttgcctaaggtcattagaaagtgtctaaaataagactttgacccggactctctgatttcaagcccagcgattcttctaacaggccatattctttcacttttattatcttgacttacgcaacaaaggagataagccaggtacatgtcattaatcttcctatgtatgacaactgaggctccaggaggttaagtgccttgcctaagattacttgggtggtggtagaactggttttcaaaaccagatcatctgaatggaatctaagtctttcttctgtatcaccttgttaatgtgtcaggaactaccaccccaccttccaaaacacatacacactctcacttttaatgcggacccatcttagaataaactagttaaggactgactgctgaacatggtccagaaacttactgtcaaattttgcttttgagatgtgcttgtgttgtgtgaagtcttt

SEQ ID NO: 1742 - protein, 94 aa, Homo sapiens
MDEQPRLMHSHAGVGMAGHPGLSQHLQDGAGGTEGEGGRKQDIGDILQQIMTITDQSLDEAQARKHALNCHRMKPALFNVLCEIKEKTDLLKQM

SEQ ID NO: 1743 - DNA, 1864 bp, Homo sapiens
aaccccgttaccccccagcccacacaccaccaccccagttttgggtggggagaaggcaaagggagagatcatctctcaaaaagctcccatcagagcaaccattctgggactttgagcagaatgcttaaggcagtggttctaaaattccacaccacctgttcttccagttgtgtcctctctgagctgcctctgacggtcacattccatggccatgtgccacagcagacttgtgatactgattttagtgttgtccttggccattgggggaagggaggaaggagagagaagagaaggggagagaagaagagaaatgggagtggggtccattcatccatctctcttgtcattaggggcccagcagttcccactatggtacctaggaaactagcttggacctggaggccatccagtgacctagtctgggccagtaaagccaccaggccattttcctgcttcggacatgctttctcagctgccctcccccttagctaaggctgaaatgactcatcttcccgtgccctagttccacggggtttcatctctgtgactcgggacagaggccttggttgccaccaaaggcagcttatggtgtagcttcaggtctggcctgactcagtggccttccctcagctattcactacagaggcagttaatgaagaagacacaagggtagcaggcctgagggataacttcaaggctaacgtgtcttttttccagtacttactcttcttttgaattttaagaattccagattttattctaagtcagagaatactgtgagaaaggattttattgtatccactctctccaaatggtgtgaacatctggatttgcatccttcccatgacagatatcacaaattgggttgggttttgcatgctgaggatgatttttggtattcagctaacacccttcctttaaggaagttagaacacttgataaattttaagcttttgatcctcagtagtacccctggaaaattaaggtccagtgaggtaaattgtcttgattaattatatgacatgcactgctttttggtggctcttttgttgtgttttgttttttctttctccttcattttgttaaaatgaattatgtgaatgtccaggttagcagtgttctattttcataggataagccccatctctagtactgtttatttccattgtgcctatttttcagggaactctgtgcatttccacatttccatcaccagctctaagaagaaaatagaaaatgagatattagaaggaaatagaacaaaaactatttgccttcaaggagctcacagtctagttctggagactggacataagcagtctctgctctctgcttggactggtgtcactgtgatcattctaagttacagagacagttgacggctttggagtgaaagctaggagccaaggagtcctgagaaaactataaatgggcatggaatgtcctggataattctgtggtggggaaattaattctgaaccactaagtactattaagaagctgatgccaactaaataggcagaaatttttacaaaagctgccagagtttagaaaccacccagtgtgccatagcttcaggggagcaaaactacccactctaccaagttggaaaaaatgaagaatgcttcaaactgaatccagctgatcctggaggccactgaccctgtcctaatggagacaaaaagtgacagtatttcgaaaaaagcctggttttggtacagctcttccagaacccacgggaagaacctgttcatcagctcatccatccgtctgctgagtaaatgcttattgagcatctactgaatgccagcactgttctttgttcttggaatacatcagtaaacaaaataaggaaaacaaaacc

SEQ ID NO: 1744 - protein, 92 aa, Homo sapiens
MSRLAVFYFHRISPISSTVYFHCAYFSGNSVHFHISITSSKKKIENEILEGNRTKTICLQGAHSLVLETGHKQSLLSAWTGVTVIILSYRDS

SEQ ID NO: 1745 - DNA, 3348 bp, Homo sapiens
gcttctgcagacattcccggcactggccgactggcgggaggacctccccgcgcgccccgcacaccggctcctgcgcgcaccccaacagagcgcagcgccaggagtccagaagcgggcgggacgccctccgggtcccttacagtgccccttctcgacctggggcaggtcctcccggcccggcccgaacatgctggacggcctaaagatggaggagaacttccaaagcgcgatcgacacctcggcctccttctcctcgctgctgggcagagcggtgagccccaagtctgtctgcgagggctgtcagcgggtcatcttggacaggtttctgctgcggctcaacgacagcttctggcatgagcagtgcgtgcagtgcgcctcctgcaaagagcccctggagaccacctgcttctaccgggacaagaagctgtactgcaagtatgactacgagaagctgtttgctgttaaatgtgggggctgcttcgaggccatcgctcccaatgagtttgttatgcgggcccagaagagtgtataccacctgagctgcttctgctgctgtgtctgcgagcgacagcttcagaagggtgatgagtttgtcctgaaggaggggcagctgctctgcaaaggggactatgagaaggagcgggagctgctcagcctggtgagcccagcagcctcagactcaggtaaaagtgatgatgaagaaagtctctgcaagtcagcccatggggcagggaaaggaactgctgaggaaggcaaggaccataagcgccccaaacgtccgagaaccatcttgacaactcaacagaggcgagcattcaaggcctcatttgaagtatcctccaagccctgcaggaaggtgagagagactctggctgcagagacagggctgagtgtccgtgtcgtccaggtgtggttccaaaaccagagagcgaagatgaagaagctggccaggcgacagcagcagcagcagcaagatcagcagaacacccagaggctgagctctgctcagacaaacggtggtgggagtgctgggatggaaggaatcatgaacccctacacggctctgcccaccccacagcagctcctggccatcgagcagagtgtctacagctcagatcccttccgacagggtctcaccccaccccagatgcctggagaccacatgcacccttatggtgccgagccccttttccatgacctggatagcgacgacacctccctcagtaacctgggtgattgtttcctagcaacctcagaagctgggcctctgcagtccagagtgggaaaccccattgaccatctgtactccatgcagaattcttacttcacatcttgagtcttcccctagagttctgtgactaggctcccatatggaacaaccatattctttgaggggtcactggctttaggacagggaggccagggaagaggtgggttggggagggagttttgttggggatgctgttgtataatgatatggtgtagctcagcatttccaaagactgaatacattatggattgcatagtttaatgtttctaataagagtcttagcattagatatgaagacgtgtttatcattaaggacagagacttttaatatagacattctcatgcaaactagatacttagggactcctaacaacttcccaccatgtcggggaagctcttgtcaagaggtgcatatgtctatccatctacacaccaatagacagaaggacagatagatagatgtgtgtgtgtgagtgtgtaacctttcgtattttaccctcaaagtttattcctaattataacagacaccaactgtacagcaaaagtaactttattttcagtgtgaactatatttaaggaaatgcttgatgcacttaagttataaaatgagataatttacttttataaactttatttttagcttgacaagacttgtcagcagggcagagagggctgctccacctagccccatagctttgagtgctggggttcattctgttttcagagtgtctttcagatctggaaagaaattctgtgtggctgatggtgttctctcttgcattcttgctctctttggggttgaatcactgggcaggggtgggacagaataatctctgatcatgttctgagaaaatgtaaagcccagactcctgggctttcttttaaattctgacaagtggttgttgggcagtgctaggatgattggttcagctcttgagcttcagcatctgcaaatgtggatgaggctaatagtatgtacctacctcactgggaaacaccaaggcttaattcattcccaggacacatgagcagggctgagactaatatctgatatttgtttaagatacaaccaggccactcacttggcaaaggagggtacatagggttgcagagcaggagggctcctgaactccagagggcagttctgcctgctgaagtccctctgcaaagcctgtgctgaaggagacaccagctcagagcagttcagagggatcccagagtcccagagtggggaggaggtgaaggctgaggggatagaggagggcctggtggtgttctagagcagggttgggcaaactcctgcttgcgggcctgctttctatggcttgccagcaaagaatggtttttactttttttttgaggtcattaaaaaaaaggagaagaagaatatataacaggctgtctgtggcctggaaagcctgaaatatttgctatctgtattgtctggcccttacagaaaaagtttggggccccttgttttagagggtctgtttctaaagaacctcatggcgctcatagaggcagaaggttccagtggaaacccttggctcttccttccaactcactcctctgatcctcggcacagaagacccagcagccattgtacatggggacagttccacaccctggtctccagttgcggtgctaggatggtattgttctgtgctaggaagtctcctgggaacccagaatgagttggtggggaagacagcgggtcactgtggacccatccaggaggggccaggataggcttggcctcatttctggggacatcattggagacttgaacacagagacacgtccctatcactctggcaaggccagagggaacatgtccccttatggtagagtctatgttgtgtgatttttgtgctcttgtttataatttatgcaaaccaccaagaaacccaaaccagtctgatgagtgaaaattatgcagatgctgtatggccccacaggtttctgtggtaaagaccagttggagaatgtaggagatactatgtgagtgaaaatgaatagagatccttattccactccttaatggcataccaagatgaaattaaaatctcttacaaatg

SEQ ID NO: 1746 - protein, 382 aa, Homo sapiens; identical to SEQ ID NO: 48

SEQ ID NO: 1747 - DNA, 3544 bp, Homo sapiens
agaagctgcaggatccgccccggcgaagcagggccgactcgcacccaggaccctgggcctctgccttccctcctagccttggagaagcaactggccctctcctcccgctgaggagcgacgcgggctggtaggacgtcccgggaaggccggcagctcgcgaccacgtcccggcccagcctgggcgcgccgaggagcagagccagcggccggcgttcgctccggctccctccccggcgctccgaagccgagggcggctcctccggctgcagtctcgggggcgacgccttcccgggcagaagcttccagcagcgctccgcaacttctctctgctccagtcactgggagagagctcgcctaccaggtcctcccggcccggcccgaacatgctggacggcctaaagatggaggagaacttccaaagcgcgatcgacacctcggcctccttctcctcgctgctgggcagagcggtgagccccaagtctgtctgcgagggctgtcagcgggtcatcttggacaggtttctgctgcggctcaacgacagcttctggcatgagcagtgcgtgcagtgcgcctcctgcaaagagcccctggagaccacctgcttctaccgggacaagaagctgtactgcaagtatgactacgagaagctgtttgctgttaaatgtgggggctgcttcgaggccatcgctcccaatgagtttgttatgcgggcccagaagagtgtataccacctgagctgcttctgctgctgtgtctgcgagcgacagcttcagaagggtgatgagtttgtcctgaaggaggggcagctgctctgcaaaggggactatgagaaggagcgggagctgctcagcctggtgagcccagcagcctcagactcaggtaaaagtgatgatgaagaaagtctctgcaagtcagcccatggggcagggaaaggaactgctgaggaaggcaaggaccataagcgccccaaacgtccgagaaccatcttgacaactcaacagaggcgagcattcaaggcctcatttgaagtatcctccaagccctgcaggaaggtgagagagactctggctgcagagacagggctgagtgtccgtgtcgtccaggtgtggttccaaaaccagagagcgaagatgaagaagctggccaggcgacagcagcagcagcagcaagatcagcagaacacccagaggctgagctctgctcagacaaacggtggtgggagtgctgggatggaaggaatcatgaacccctacacggctctgcccaccccacagcagctcctggccatcgagcagagtgtctacagctcagatcccttccgacagggtctcaccccaccccagatgcctggagaccacatgcacccttatggtgccgagccccttttccatgacctggatagcgacgacacctccctcagtaacctgggtgattgtttcctagcaacctcagaagctgggcctctgcagtccagagtgggaaaccccattgaccatctgtactccatgcagaattcttacttcacatcttgagtcttcccctagagttctgtgactaggctcccatatggaacaaccatattctttgaggggtcactggctttaggacagggaggccagggaagaggtgggttggggagggagttttgttggggatgctgttgtataatgatatggtgtagctcagcatttccaaagactgaatacattatggattgcatagtttaatgtttctaataagagtcttagcattagatatgaagacgtgtttatcattaaggacagagacttttaatatagacattctcatgcaaactagatacttagggactcctaacaacttcccaccatgtcggggaagctcttgtcaagaggtgcatatgtctatccatctacacaccaatagacagaaggacagatagatagatgtgtgtgtgtgagtgtgtaacctttcgtattttaccctcaaagtttattcctaattataacagacaccaactgtacagcaaaagtaactttattttcagtgtgaactatatttaaggaaatgcttgatgcacttaagttataaaatgagataatttacttttataaactttatttttagcttgacaagacttgtcagcagggcagagagggctgctccacctagccccatagctttgagtgctggggttcattctgttttcagagtgtctttcagatctggaaagaaattctgtgtggctgatggtgttctctcttgcattcttgctctctttggggttgaatcactgggcaggggtgggacagaataatctctgatcatgttctgagaaaatgtaaagcccagactcctgggctttcttttaaattctgacaagtggttgttgggcagtgctaggatgattggttcagctcttgagcttcagcatctgcaaatgtggatgaggctaatagtatgtacctacctcactgggaaacaccaaggcttaattcattcccaggacacatgagcagggctgagactaatatctgatatttgtttaagatacaaccaggccactcacttggcaaaggagggtacatagggttgcagagcaggagggctcctgaactccagagggcagttctgcctgctgaagtccctctgcaaagcctgtgctgaaggagacaccagctcagagcagttcagagggatcccagagtcccagagtggggaggaggtgaaggctgaggggatagaggagggcctggtggtgttctagagcagggttgggcaaactcctgcttgcgggcctgctttctatggcttgccagcaaagaatggtttttactttttttttgaggtcattaaaaaaaaggagaagaagaatatataacaggctgtctgtggcctggaaagcctgaaatatttgctatctgtattgtctggcccttacagaaaaagtttggggccccttgttttagagggtctgtttctaaagaacctcatggcgctcatagaggcagaaggttccagtggaaacccttggctcttccttccaactcactcctctgatcctcggcacagaagacccagcagccattgtacatggggacagttccacaccctggtctccagttgcggtgctaggatggtattgttctgtgctaggaagtctcctgggaacccagaatgagttggtggggaagacagcgggtcactgtggacccatccaggaggggccaggataggcttggcctcatttctggggacatcattggagacttgaacacagagacacgtccctatcactctggcaaggccagagggaacatgtccccttatggtagagtctatgttgtgtgatttttgtgctcttgtttataatttatgcaaaccaccaagaaacccaaaccagtctgatgagtgaaaattatgcagatgctgtatggccccacaggtttctgtggtaaagaccagttggagaatgtaggagatactatgtgagtgaaaatgaatagagatccttattccactccttaatggcataccaagatgaaattaaaatctcttacaaatg

SEQ ID NO: 1748 - protein, 382 aa, Homo sapiens; identical to SEQ ID NO: 48

SEQ ID NO: 1749 - DNA, 1252 bp, Homo sapiens
gagtctggctttttccacttggtgtggtggtttggggattcattcattcctatttcagcattccactgtatagtccagaggtgagcaaggcaaggctggtgggtggctctgttatccatctcctgtgtccaagcgactgctccagttgtcaccatgtttccagtcaccaggtgagagagactctggctgcagagacagggctgagtgtccgtgtcgtccaggtgtggttccaaaaccagagagcgaagatgaagaagctggccaggcgacagcagcagcagcagcaagatcagcagaacacccagaggctgagctctgattggtgttctcatacatgctgacttgacttttacaacacccattcctggaggcgagtggagaagttgttattatccctatgtcacagatgagcaaacaaaggctctgcaagattgaatgtggccctagatcgctcagacaaacggtggtgggagtgctgggatggaaggaatcatgaacccctacacggctctgcccaccccacagcagctcctggccatcgagcagagtgtctacagctcagatcccttccgacagggtctcaccccaccccagatgcctggagaccacatgcacccttatggtgccgagccccttttccatgacctggatagcgacgacacctccctcagtaacctgggtgattgtttcctagcaacctcagaagctgggcctctgcagtccagagtgggaaaccccattgaccatctgtactccatgcagaattcttacttcacatcttgagtcttcccctagagttctgtgactaggctcccatatggaacaaccatattctttgaggggtcactggctttaggacagggaggccagggaagaggtgggttggggagggagttttgttggggatgctgttgtataatgatatggtgtagctcagcatttccaaagactgaatacattatggattgcatagtttaatgtttctaataagagtcttagcattagatatgaagacgtgtttatcattaaggacagagacttttaatatagacattctcatgcaaactagatacttagggactcctaacaacttcccaccatgtcggggaagctcttgtcaagaggtgcatatgtctatccatctacacaccaatagacagaaggacagatagatagatgtgtgtgtgtgagtgtgtaacctttcgtattttaccctcaaagtttattcctaattataacagacaccaactgt

SEQ ID NO: 1750 - protein, 100 aa, Homo sapiens; identical to SEQ ID NO: 46

SEQ ID NO: 1751 - DNA, 839 bp, Homo sapiens
tctggctttttccacttggtgtggtggtttggggattcattcattcctatttcagcattccactgtatagtccagaggtgagcaaggcaaggctggtgggtggctctgttatccatctcctgtgtccaagcgactgctccagttgtcaccatgtttccagtcaccaggtgagagagactctggctgcagagacagggctgagtgtccgtgtcgtccaggtgtggttccaaaaccagagagcgaagatgaagaagctggccaggcgacagcagcagcagcagcaagatcagcagaacacccagaggctgagctctgctcagacaaacggtggtgggagtgctgggatggaaggaatcatgaacccctacacggctctgcccaccccacagcagctcctggccatcgagcagagtgtctacagctcagatcccttccgacagggtctcaccccaccccagatgcctggagaccacatgcacccttatggtgccgagccccttttccatgacctggatagcgacgacacctccctcagtaacctgggtgattgtttcctagcaacctcagaagctgggcctctgcagtccagagtgggaaaccccattgaccatctgtactccatgcagaattcttacttcacatcttgagtcttcccctagagttctgtgactaggctcccatatggaacaaccatattctttgaggggtcactggctttaggacagggaggccagggaagaggtgggttggggagggagttttgttggggatgctgttgtataatgatatggtgtagctcagcatttccaaagactgaatacattatggattgcatagtt

SEQ ID NO: 1752 - protein, 133 aa, Homo sapiens; identical to SEQ ID NO: 50

SEQ ID NO: 1753 - DNA, 1562 bp, Homo sapiens
gtgaaatcagatcagccagagcagttcgctgtgactgatctctcctcccaccctacattctcttggctggaccctatcctcctggctgattctggtcgccctggacactccctcagttctttcccaggagtgcggtggctgctggcgccgagtcccagcgggcacggacgtcagacgcatcgtttcttctcctctacaggtcctcccggcccggcccgaacatgctggacggcctaaagatggaggagaacttccaaagcgcgatcgacacctcggcctccttctcctcgctgctgggcagagcggtgagccccaagtctgtctgcgagggctgtcagcgggtcatcttggacaggtttctgctgcggctcaacgacagcttctggcatgagcagtgcgtgcagtgcgcctcctgcaaagagcccctggagaccacctgcttctaccgggacaagaagctgtactgcaagtatgactacgagaagctgtttgctgttaaatgtgggggctgcttcgaggccatcgctcccaatgagtttgttatgcgggcccagaagagtgtataccacctgagctgcttctgctgctgtgtctgcgagcgacagcttcagaagggtgatgagtttgtcctgaaggaggggcagctgctctgcaaaggggactatgagaaggagcgggagctgctcagcctggtgagcccagcagcctcagactcaggtaaaagtgatgatgaagaaagtctctgcaagtcagcccatggggcagggaaaggaactgctgaggaaggcaaggaccataagcgccccaaacgtccgagaaccatcttgacaactcaacagaggcgagcattcaaggcctcatttgaagtatcctccaagccctgcaggaaggtgagagagactctggctgcagagacagggctgagtgtccgtgtcgtccaggtgtggttccaaaaccagagagcgaagatgaagaagctggccaggcgacagcagcagcagcagcaagatcagcagaacacccagaggctgagctctgctcagacaaacggtggtgggagtgctgggatggaaggaatcatgaacccctacacggctctgcccaccccacagcagctcctggccatcgagcagagtgtctacagctcagatcccttccgacagggtctcaccccaccccagatgcctggagaccacatgcacccttatggtgccgagccccttttccatgacctggatagcgacgacacctccctcagtaacctgggtgattgtttcctagcaacctcagaagctgggcctctgcagtccagagtgggaaaccccattgaccatctgtactccatgcagaattcttacttcacatcttgagtcttcccctagagttctgtgactaggctcccatatggaacaaccatattctttgaggggtcactggctttaggacagggaggccagggaagaggtgggttggggagggagttttgttggggatgctgttgtataatgatatggtgtagctcagcatttccaaagactgaatacattatggattgcatagtt

SEQ ID NO: 1754 - protein, 382 aa, Homo sapiens; identical to SEQ ID NO: 48

SEQ ID NO: 1755 - DNA, 693 bp, Homo sapiens
gtacaatgtcctactgtgattatttcaggaaaccagcaacatggggacagataaaagtaagaagcaggttaccttcgctctctggttttggaaccacacctggacgacacggacactcagccctgtctctgcagccagagtctctctcaccttggaaaaattgaacgagaaatgtagacacactggcatctcagggtaggaggtagaacatctcctatataatacttgaggaggccaaaagactgtatctgctttaggagctgaatagtttttaatgttgagcatacacacaaacacgagaacattgcttcccttcaggtagaaagaaagtccttcaccaggtaactttgggtgtttcatgaatatccatagtgactgctaccccaagtgagccctgcccaaagagaataaaatgagagccatctggaacccggcagagccaggaagtgtggccacaggactacattctggccaacacatatgaggagaaatgatttgagcaacccctggatacatccttaaaaagcagggcgcttgccctccatttcctctttctctacctggtgactggaaacatggtgacaactggagcagtcgcttggacacaggagatggataacagagccacccaccagccttgccttgctcacctctggactgtgacagaagagaataaactcctgtctcattaaa

SEQ ID NO: 1756 - protein, 52 aa, Homo sapiens
MGTDKSKKQVTFALWFWNHTWTTRTLSPVSAARVSLTLEKLNEKCRHTGISG

SEQ ID NO: 1757 - DNA, 674 bp, Homo sapiens
atgaaaagggtgtcttttccctctgcctcacccctctcaatagtacaaataaaaccccccacaagattaaagaagagagttaaagcaagaatcctcatgacaaggggtggctactctggcattttcaagtcttgaggttgctgttttccagggggtgatgtgcaggggcagacctgcctgacttggatatcagcttctccatgaaaatatgcagtgcctaaaatttacactgatcgatttgttcacgagaaaggacatttctaaaagagccaggagactgcccccagaaccaagaggagtactggagagcagaagatgaagaaaaacctttaaacagcagagcagtgaagtggagggagaggcggcccctctcctttgccagagactcccactcccagatgcaggctggagcgatccctcataatttaagctgacacccctcagcggagatgaaaggaacaccactcgctgctctccaacaacaaatgtcagcatccctggaggccgtttagacacaaacgcagcataaatctgactcctagtggggaagtccagagattaagtctccacacacagcctaccagagtgaaatgaatttgcttggcacaaagtttgaacatgtttctcagggcctttctttcccctttcttgtaaaaaaaaaatctggaatggtt

SEQ ID NO: 1758 - protein, 44 aa, Homo sapiens
MKRVSFPSASPLSIVQIKPPTRLKKRVKARILMTRGGYSGIFKS

SEQ ID NO: 1759 - DNA, 594 bp, Homo sapiens
agtacagatagatgccacaagccagctgccaacaggaatccagaccctggctaaccatcacccagcttccatctactgtgttcaggggcagacctgcctgacttggatatcagcttctccatgaaaatatgcagtgcctaaaatttacactgatcgatttgttcacgagaaaggacatttctaaaagagccaggagactgcccccagaaccaagaggagtactggagagcagaagatgaagaaaaacctttaaacagcagagcagtgaagtggagggagaggcggcccctctcctttgccagagactcccactcccagatgcaggctggagcgatccctcataatttaagctgacacccctcagcggagatgaaaggaacaccactcgctgctctccaacaacaaatgtcagcatccctggaggccgtttagacacaaacgcagcataaatctgactcctagtggggaagtccagagattaagtctccacacacagcctaccagagtgaaatgaatttgcttggcacaaagtttgaacatgtttctcagggcctttctttcccctttcttgtaaaaaaaaaatctggaatggtt

SEQ ID NO: 1760 - protein, 36 aa, Homo sapiens
MQCLKFTLIDLFTRKDISKRARRLPPEPRGVLESRR

SEQ ID NO: 1761 - DNA, 2036 bp, Homo sapiens
gcggtggcaagagtagcggtgacggcggcggcggcggcggcggcagcattatgcgtgattactgacaggcaccagctgctgccgccacagccgtctcaaacgcactatgtggactctccgatctagaggcagattcctgactaatcccagagggctggcccagcctgtgctccccgggctgctaggaagcgatgaccactcttgttagcccaagttgaagaaagccgggctgtgcctgggagccgagagaggcggtaatatttagaagctgcacaggagaggaacatgaactgacgagtaaacatgtatggaaattattctcacttcatgaagtttcccgcaggctatggaggctcccctggccacactggctctacatccatgagcccatcagcagccttgtccacagggaagccaatggacagccaccccagctacacagataccccagtgagtgccccacggactctgagtgcagtggggacccccctcaatgccctgggctctccatatcgagtcatcacctctgccatgggcccaccctcaggagcacttgcagcgcctccaggaatcaacttggttgccccacccagctctcagctaaatgtggtcaacagtgtcagcagttcagaggacatcaagcccttaccagggcttcccgggattggaaacatgaactacccatccaccagccccggatctctggttaaacacatctgtgccatctgtggagacagatcctcaggaaagcactacggggtatacagttgtgaaggctgcaaagggttcttcaagaggacgataaggaaggacctcatctacacgtgtcgggataataaagactgcctcattgacaagcgtcagcgcaaccgctgccagtactgtcgctatcagaagtgccttgtcatgggcatgaagagggaagctgtgcaagaagaaagacagaggagccgagagcgagctgagagtgaggcagaatgtgctaccagtggtcatgaagacatgcctgtggagaggattctagaagctgaacttgctgttgaaccaaagacagaatcctatggtgacatgaatatggagaactcgacaaatgaccctgttaccaacatatgtcatgctgctgacaagcagcttttcaccctcgttgaatgggccaagcgtattccccacttctctgacctcaccttggaggaccaggtcattttgcttcgggcagggtggaatgaattgctgattgcctctttctcccaccgctcagtttccgtgcaggatggcatccttctggccacgggtttacatgtccaccggagcagtgcccacagtgctggggtcggctccatctttgacagagtcctaactgagctggtttccaaaatgaaagacatgcagatggacaagtcggaactgggatgcctgcgagccattgtactctttaacccagatgccaagggcctgtccaacccctctgaggtggagactctgcgagagaaggtttatgccacccttgaggcctacaccaagcagaagtatccggaacagccaggcaggtttgccaagctgctgctgcgcctcccagctctgcgttccattggcttgaaatgcctggagcacctcttcttcttcaagctcatcggggacacccccattgacaccttcctcatggagatgttggagaccccgctgcagatcacctgagccccaccagccacagcctccccacccaggatgacccctgggcaggtgtgtgtggacccccaccctgcactttcctccacctcccaccctgacccccttcctgtccccaaaatgtgatgcttataataaagaaaacctttctacacatgagacttttataggtggacttttgtatagatgttaaaggtaatacgctttgctgtctacagggctgggagactttctggaagttcttgggaaaactaatcaagcctctgtacatacaattggtttaaattattttttcacttgccctggaaagcaaacaaatgagtaataaaataatatgtgtgaaattggca

SEQ ID NO: 1762 - protein, 463 aa, Homo sapiens; identical to SEQ ID NO: 54

SEQ ID NO: 1763 - DNA, 1844 bp, Homo sapiens
gcggtggcaagagtagcggtgacggcggcggcggcggcggcggcagcattatgcgtgattactgacaggcaccagctgctgccgccacagccgtctcaaacgcactatgtggactctccgatctagaggcagattcctgactaatcccagagggctggcccagcctgtgctccccgggctgctaggaagcgatgaccactcttgttagcccaagttgaagaaagccgggctgtgcctgggagccgagagaggcggtaatatttagaagctgcacaggagaggaacatgaactgacgagtaaacatgtatggaaattattctcacttcatgaagtttcccgcaggctatggaggctcccctggccacactggctctacatccatgagcccatcagcagccttgtccacagggaagccaatggacagccaccccagctacacagataccccagtgagtgccccacggactctgagtgcagtggggacccccctcaatgccctgggctctccatatcgagtcatcacctctgccatgggcccaccctcaggagcacttgcagcgcctccaggaatcaacttggttgccccacccagctctcagctaaatgtggtcaacagtgtcagcagttcagaggacatcaagcccttaccagggcttcccgggattggaaacatgaactacccatccaccagccccggatctctggttaaacacatctgtgccatctgtggagacagatcctcaggaaagcactacggggtatacagttgtgaaggctgcaaagggttcttcaagaggacgataaggaaggacctcatctacacgtgtcgggataataaagactgcctcattgacaagcgtcagcgcaaccgctgccagtactgtcgctatcagaagtgccttgtcatgggcatgaagagggaagctgtgcaagaagaaagacagaggagccgagagcgagctgagagtgaggcagaatgtgctaccagtggtcatgaagacatgcctgtggagaggattctagaagctgaacttgctgttgaaccaaagacagaatcctatggtgacatgaatatggagaactcgacaaatgaccctgttaccaacatatgtcatgctgctgacaagcagcttttcaccctcgttgaatgggccaagcgtattccccacttctctgacctcaccttggaggaccaggtcattttgcttcgggcagggtggaatgaattgctgattgcctctttctcccaccgctcagtttccgtgcaggatggcatccttctggccacgggtttacatgtccaccggagcagtgcccacagtgctggggtcggctccatctttgacagagtcctaactgagctggtttccaaaatgaaagacatgcagatggacaagtcggaactgggatgcctgcgagccattgtactctttaacccagatgccaagggcctgtccaacccctctgaggtggagactctgcgagagaaggtttatgccacccttgaggcctacaccaagcagaagtatccggaacagccaggcaggtttgccaagctgctgctgcgcctcccagctctgcgttccattggcttgaaatgcctggagcacctcttcttcttcaagctcatcggggacacccccattgacaccttcctcatggagatgttggagaccccgctgcagatcacctgagccccaccagccacagcctccccacccaggatgacccctgggcaggtgtgtgtggacccccaccctgcactttcctccacctcccaccctgacccccttcctgtccccaaaatgtgatgcttataataaagaaaacctttctacacatg

SEQ ID NO: 1764 - protein, 463 aa, Homo sapiens; identical to SEQ ID NO: 54

SEQ ID NO: 1765 - DNA, 2764 bp, Homo sapiens
atttctttccagtgttgtcgtgtatctattatgtctcgtgtgtatcctcgtgtaactattatgtattacgcatgtcatgtatgcatttctagatatgaaattatacagtttggtgtattattttcttcccttagccattctagaaattttattcaattactgacaactacaaattatcattttcaatggttttgtaatattttgcagtgtgaacatatcctaatgtatttagtcatcgccctgtgattgacatttgggttgtttctaattcatatcactttgaaaactttggaacttgactcttctgccagaatatggctggcagggggctgggctgcctccacactctggggagagaggccaacacttgttgccaggactagggcagaacttagaactgcaaggaggtggcagagtcccctgcatagtctcctgggtttgtccatcacagcttggactgaggctgactgccctgatcaagtgttcatagttggctcagtaggtacatcaggggtgtcactggccaggcatgtgggtgtgctgagggctggtcacctctggtccgcagaacctggttgaaggggatcctggcacagccaggtagaggcagatttctcagtgggagagtgctgccactctgtggaaacatttcagaagtgcatgtcacaagggccacattctgctttcactctgatcagaaagcagagatcaaaagtcaggtcacagaactcacacacacactctcttgcacacacagcaggcaccttcaaaggcataaatgccccttgctgctaacctgtgggtgaggaatgctgtgacgttcatgggtgtgtttatttctattagccttgatctcagttcctaaatccaggtcacacaacaaagagggtagtatgatggcatacttcgaattttagatattgtaaaatcgtggcctttttagagttaaaaaaattttttaaagttaatcccagtctaactttgtacttacagagaagctgtttcctttgcctacttccataaagcttaacggcagaggcacggccgggagttcagcctccttattctctaactacctctttcctgaatggtgatgccactcaaatgctttcaggggctttaccactggaggcttttgaagtaatgtgtagcattggcatagatctttaatttttccatgtagggaagcaatttctacttttttagatggtgccgctttattttccttgtattgctacatttctttaaaatgtcttatggcataagtgtagaaatatacacattttcaaggaacattgaaattctaatttgtaactttttcatgaaataatgttgtgacactcagtaaagattcatctggaaccagaaatctctgacttagggccacagtgactaaagtgattttggtccttgagctttttttggaagttgtgagtagagtgactttatgtctagtagcattaataacgttaaaaatgagctggcattgcactgtgcacagagggtcacacagacagagtgaaaaatgtcacagagagaagtacccgaaaggacatgcagatgggagatgaattccttcacacactggtctttctcccttttgtgaatctcacaacaaatgtcctcagttatagaaaaatgtgtgtgagggtgtgtatgagtgagtgtgtgagggtatgtgtgtgtgcatgttgtaagaacatgttagagtgtgagtgtggagtgtgtctgcatgtgtgtatgtgtgagtgcatgcatgcacgtgtgtgtaagagtgtgcatgtgcatgtatgtgagaccacaggcatgagatatgtgagaatgagtgtgtgcacatgtgtgagtatgtgtattgtgtataatgtgcatgaatatagtgtgagagcatgagtgtgtggatgcgtgtgcaaacatgtgaagtatgtgtgaaggtgtgtatgcatgagagtgtgtgaaggtgtgtgtgcatgagtgtgtgtgaaggtgtgtgtgcaggcacatgtgagttcatgtgaaagtgtgcatgagtgggcatgtgtgtatgtgtgagggtgtgtgtgtaagtgcatgtatgcaagggaatgtgacagtgtaaaagagtgtgagtgtgcgtgtgtgagtggtgaggatgtgtgtgcgggcacatgggtgtgaagcatgtgtgagtgtgtaggataatgtgtgggtcagtgtgtatgcatgtgtgccatgtatcctctccccaaacagaccatagactcctcaagggcagagactatgattttctcttttcctaatttaagggtaagcatagactaataagttgatcataaaaattggtaacaattggccgggtgcggtggctcacgcctgtaatcccagcactttgggaggctgaggtgggtggatcacctgaggtcaggaattcaagaccagcctggccaacatggcaaagacctgtctctactaaaactacaaaaatttagccaggcattgtggtgggagcctgtattcgcagtctgcgttccattggcttgaaatgcctggagcacctcttcttcttcaagctcatcggggacacccccattgacaccttcctcatggagatgttggagaccccgctgcagatcacctgagccccaccagccacagcctccccacccaggatgacccctgggcaggtgtgtgtggacccccaccctgcactttcctccacctcccaccctgacccccttcctgtccccaaaatgtgatgcttataataaagaaaacctttctacacatg

SEQ ID NO: 1766 - protein, 111 aa, Homo sapiens [sequence omitted]

SEQ ID NO: 1767 - DNA, 602 bp, Homo sapiens
gcggcggcggcggcggcggcagcattatgcgtgattactgacaggcaccagctgctgccgccacagccgtctcaaacgcactatgtggactctccgatctagaggcagattcctgactaatcccagagggctggcccagcctgtgctccccgggctgctaggaagcgatgaccactcttgttagcccaagttgaagaaagccgggctgtgcctgggagccgagagaggcggtaatatttagaagctgcacaggagaggaacatgaactgacgagtaaacatgtatggaaattattctcacttcatgaagtttcccgcaggctatggagggtgttcttcccctgctctccaacttctgctctccacatcgctagggctgtgaaaacagatactgtgagccctgaaccctccaggaggctgcttccccatgacactagtgaccagtaaaatgaaaaggaggagcaaaggagattttgagtcacagaaatgaaacccaggcaaccagcctagaagaaacactccaagatattcattaagtgctttgtttcccgttcctctgacatcttgtaaatgctttttgaattaaagatgataacaggcttt

SEQ ID NO: 1768 - protein, 33 aa, Homo sapiens; identical to SEQ ID NO: 52

SEQ ID NO: 1769 - DNA, 1802 bp, Homo sapiens
cgtcaccttgcaacggatggtgtagggcttgccgatcttgttcccctagtaacctctgcgcatggggacaatggagagctaggccaggatgatggccctgtggatggcagtggccacctccttggagcacttaacacccagaccgacgtgaccgttgtagcccgcaatggccacaaacgccttgaacctggttcgctggccggctccggtctgcttctgcaccggcataatcttcaaaacctaggcctcgagagaggccccccaggaaaaaatcaatgatctcagattccgtgatgggcagggagaagagacagatctcctccagggaagtgatcttcatgtgcttgaccaggcagcccagcttgctgacgggcatccactccttatccttggccttgcctccgcgagctccgtggcttcggccccagcctggtccacggcagtgaccccggcctcggatgccactgccgaaacctccacggaagccaccatggttccccatcccagggccccggggcctccgggactccccccgcaacccaatgccggctgcgccggcgtcatccgccatttggtgttttctcggagaagaagctacatgtggaatatattaacgcaacaaattgtgcgtacttgctagacattaggcatgatagcaagtgctagggttacaaagtattgctttttggggaacccatggttgttggggagaaaccagaagatcagtcatcacagtgcggcaagatcagacttgtggtttgttcaggttctgggagccgtcactgcagtgagaatggaccccacaatgtctcataaggggatctgcaaggcagccctaaattccaagcaggacatgtaactcctcaatggacaaatggacactggaccctggttgaaggaacctgttgttcttatggtggagggcagaaacccaagagggctggagccaatccataactcaggcacgtggccacatctaacagcaagggagtctggaaaacacagttcagctgtgtgaaggatatttataaacatttagcaagatccaaaggaatggaccatagcacagccctgttttctttagacgctgactcctgctgtctgccagatcctcgtggtacaatgactggtgtagactggcttgttgaagtcactctctggatctgagcaacgctggctgagccgtgatgaagtattcctatccatccactatgcttcacagtgggaatctctcactgttcatcaccgctgccctagcagccgcagggattcttcacccatggttgcttaggtttataagcaaggaagctgaatgaagtccctttcctctctggatgagcccctgggtttctggaagagtcttaaaatcacccctaaatggcttccaagcactgaagcccgagatgttagctggcctgtgtgaggccttgagacagaatgccacagccacaccccaaggatgctgaaggggatttccctcctctgtggtttttctcctttcttcccgcagcactcctcctacgtgctaacatcttctagtcaaacaactctccttttcaaagggaccaggcacagtttctgcttatccctgagtagcagtgttcagtttcctgccagcctgtggagtttttcaaacaagccaatcacctcctcctgtgggaactgagaagcaccccaccctctcgatactacaaagcccctgcttgttccctagtgcaactcccatgtggtcctgtggagcatatggtatcttcctcttctgggcagtgagcatatgtgactaataaactatctatctcatc

SEQ ID NO: 1770 - protein, 69 aa, Homo sapiens
MIASARVTKYCFLGNPWLLGRNQKISHHSAARSDLWFVQVLGAVTAVRMDPTMSHKGICKAALNSKQDM

SEQ ID NO: 1771 - DNA, 1719 bp, Homo sapiens
agcccgtcaccttgcaacggatggtgtagggcttgccgatcttgttcccctagtaacctctgcgcatggggacaatggagagctaggccaggatgatggccctgtggatggcagtggccacctccttggagcacttaacacccagaccgacgtgaccgttgtagcccgcaatggccacaaacgccttgaacctggttcgctggccggctccggtctgcttctgcaccggcataatcttcaaaacctaggcctcgagagaggccccccaggaaaaaatcaatgatctcagattccgtgatgggcagggagaagagacagatctcctccagggaagtgatcttcatgtgcttgaccaggcagcccagcttgctgacgggcatccactccttatccttggccttgcctccgcgagctccgtggcttcggccccagcctggtccacggcagtgaccccggcctcggatgccactgccgaaacctccacggaagccaccatggttccccatcccagggccccggggcctccgggactccccccgcaacccaatgccggctgcgccggcgtcatccgccatttggtgttttctcggagaagaagctacatgtggaatatattaacgcaacaaattgtgcgtacttgctagacattaggcatgatagcaagtgctagggttacaaagtattgctttttggggaacccatggttgttggggagaaaccagaagatcagtcatcacagtgcggcaagatcagacttgtggtttgttcaggttctgggagccgtcactgcagtgagaatgggaccctggttgaaggaacctgttgttcttatggtggagggcagaaacccaagagggctggagccaatccataactcaggcacgtggccacatctaacagcaagggagtctggaaaacacagttcagctgtgtgaaggatatttataaacatttagcaagatccaaaggaatggaccatagcacagccctgttttctttagacgctgactcctgctgtctgccagatcctcgtggtacaatgactggtgtagactggcttgttgaagtcactctctggatctgagcaacgctggctgagccgtgatgaagtattcctatccatccactatgcttcacagtgggaatctctcactgttcatcaccgctgccctagcagccgcagggattcttcacccatggttgcttaggtttataagcaaggaagctgaatgaagtccctttcctctctggatgagcccctgggtttctggaagagtcttaaaatcacccctaaatggcttccaagcactgaagcccgagatgttagctggcctgtgtgaggccttgagacagaatgccacagccacaccccaaggatgctgaaggggatttccctcctctgtggtttttctcctttcttcccgcagcactcctcctacgtgctaacatcttctagtcaaacaactctccttttcaaagggaccaggcacagtttctgcttatccctgagtagcagtgttcagtttcctgccagcctgtggagtttttcaaacaagccaatcacctcctcctgtgggaactgagaagcaccccaccctctcgatactacaaagcccctgcttgttccctagtgcaactcccatgtggtcctgtggagcatatggtatcttcctcttctgggcagtgagcatatgtgactaataaactatctatctcatc

SEQ ID NO: 1772 - protein, 93 aa, Homo sapiens
MIASARVTKYCFLGNPWLLGRNQKISHHSAARSDLWFVQVLGAVTAVRMGPWLKEPVVLMVEGRNPRGLEPIHNSGTWPHLTARESGKHSSAV

SEQ ID NO: 1773 - DNA, 2423 bp, Homo sapiens
cgtcaccttgcaacggatggtgtagggcttgccgatcttgttcccctagtaacctctgcgcatggggacaatggagagctaggccaggatgatggccctgtggatggcagtggccacctccttggagcacttaacacccagaccgacgtgaccgttgtagcccgcaatggccacaaacgccttgaacctggttcgctggccggctccggtctgcttctgcaccggcataatcttcaaaacctaggcctcgagagaggccccccaggaaaaaatcaatgatctcagattccgtgatgggcagggagaagagacagatctcctccagggaagtgatcttcatgtgcttgaccaggcagcccagcttgctgacgggcatccactccttatccttggccttgcctccgcgagctccgtggcttcggccccagcctggtccacggcagtgaccccggcctcggatgccactgccgaaacctccacggaagccaccatggttccccatcccagggccccggggcctccgggactccccccgcaacccaatgccggctgcgccggcgtcatccgccatttggtgttttctcggagaagaagctacatgtggaatatattaacgcaacaaattgtgcgtacttgctagacattaggcatgatagcaagtgctagggttacaaagtattgctttttggggaacccatggttgttggggagaaaccagaagatcagtcatcacagtgcggcaagatcagacttgtggtttgttcaggttctgggagccgtcactgcagtgagaatggaccccacaatgtctcataaggggatctgcaaggcagccctaaattccaagcaggacatgtaactcctcaatggacaaatggacactggaccctggttgaaggaacctgttgttcttatggtggagggcagaaacccaagagggctggagccaatccatgaaagaggtttaattgactcagagttccatatggctggggaggccttgcgatcatgcagatggcgaatgaggagcaaaaacacatcttacatggtggcagaactcaggcacgtggccacatctaacagcaagggagtctggaaaacacagttcagctgtgtgaaggatatttataaacatttagcaagatccaaaggaatggaccatagcacagccctgttttctttagacgctgactcctgctgtctgccagatcctcgtggtacaatgactggtgtagactggcttgttgaagtcactctctggatctgagcaacgctggctgagccgtgatgaagtattcctatccatccactatgcttcacagtgggaatctctcactgttcatcaccgctgccctagcagccgcaggttcaagagctgctgggatatagcagttaagagatgaaccctgcagcctgacttcctttgctagaatcctggcactgttacttattccttgtatgtctctagctggaatgagagactggatggcgttgaaatgaaatgctggagccatccatccatgtgcttccagggtggcttcctggctgtgagaacacagtgaccctgtgaggccaacatggactcggttctcctgacataacatggctggaggagctccagctctgggatgttatcttgctgttttacactggtggttcagccagcccatgggaaactgaacttgggctgggagacctggcagcaaatccaaactgaaataagaatcagcacttcgagttcaactgtgaaacaaatgtgggcccaaggcctaaatgcccgaaagacatagggaagggttgaagtggaataaagaaagcttttggtgacactatgggaagggctattgagtatcttctcaggacagtacaaaatgtcagaggcacagcatatttcgaaacctatttttaaagctgctttagattttttaacttgatggatagatatattcattttttaaaaaaagaaatggtgaccctcttaagaggcaaagtacgagcctcaagtgttgtgggatgtatccatcattggttactaagttttccaatggctcagacactcccagaagcgaagactcctgagccaaaggaagatgagagctgaaaggagcatcgagctcatccagtgcaatgcttctcagcttgtgcccactttggattcacttggaaatattttagaaatactgatgcctgggccccattccagaccagttaaatcatactatctgggagagatacccagaaagtggtatgttttaacacctccttagggattctgctgatcaaccaaggttgagaagaatcaaactagactcattttacatatgaagaaatggaaacccagatattgagataaaaaatgttgcccaagtcacgtagctagtgtcaaaacctgactcttaataaatgcccttatgtcacactaa

SEQ ID NO: 1774 - protein, 130 aa, Homo sapiens
MDTGPWLKEPVVLMVEGRNPRGLEPIHERGLIDSEFHMAGEALRSCRWRMRSKNTSYMVAELRHVATSNSKGVWKTQFSCVKDIYKHLARSKGMDHSTALFSLDADSCCLPDPRGTMTGVDWLVEVTLWI

SEQ ID NO: 1775 - DNA, 972 bp, Homo sapiens
tgttgttacatagattgcctgtgatttaaggaaacacgatagccactatttactatttaccctgtgtcaagaatgtgatcctcccagcaacgcaatgagtcatattgcatgaccctcatcttatgaatgaagaaacagaagctcccagaggtgccactcgcccgtggtcacagagctggtgggagaatcactgagtgagtctgaggacagagaatgacacactgtggtttccaagagagaacatcaatgtttttgaccaactcgtaatttcaaagactggaaaaaccatgcttatatgcgcagcctcttttctgaggaacagactagaggatgtttgtttatgccagcagaaagcaaagccacttctagatcagatcacctgctgctgacagtcagatcaaatcaacagcactgaatgagctcctcccagggacagtgcagctgcctggaatttgaatgtggtatctggagcttcagtagtcatccaggactgtaagtgtgaaagccatgcactgagagtggtggaacagaagccctgttttctttagacgctgactcctgctgtctgccagatcctcgtggtacaatgactggtgtagactggcttgttgaagtcactctctggatctgagcaacgctggctgagccgtgatgaagtattcctatccatccactatgcttcacagtgggaatctctcactgttcatcaccgctgccctagcagccgcaggccttctcctcttcagatggactgcagggggccacgagactccagtggcagccgctcaactctgaacacagccactgcatagagggttcagtgaagtgagtggggttgttactccccaccaagcagtgagtggctttctgctgttccactccagaggcctcacctcctgtgtttttaaactccagtttctgtctttccctgttggcaccaaacttatcttcataaaatataaatcaaatcac

SEQ ID NO: 1776 - protein, 47 aa, Homo sapiens
MKYSYPSTMLHSGNLSLFITAALAAAGLLLFRWTAGGHETPVAAAQL

SEQ ID NO: 1777 - DNA, 371 bp, Homo sapiens
tttcaactcactacttttgttcttatgtctctttattctccagccctgttttctttagacgctgactcctgctgtctgccagatcctcgtggtacaatgactggtgtagactggcttgttgaagtcactctctggatctgagcaacgctggctgagccgtgatgaagtattcctatccatccactatgcttcacagtgggaatctctcactgttcatcaccgctgccctagcagccgcaggccttctcctcttcagatggactgcagggggccacgagactccagtggcagccgctcaactctgaacacagccactgcatagagggttcagtgaagtgagtggggttgttactccccaccaagcagtgagt

SEQ ID NO: 1778 - protein, 47 aa, Homo sapiens; identical to SEQ ID NO: 1776

SEQ ID NO: 1779 - DNA, 791 bp, Homo sapiens
aggttttccaggcttcctgtgctgtcttggggacctgctcagaggctggaccgcgtcatgctcagaaggccctgttttctttagacgctgactcctgctgtctgccagatcctcgtggtacaatgactggtgtagactggcttgttgaagtcactctctggatctgagcaacgctggctgagccgtgatgaagtattcctatccatccactatgcttcacagtgggaatctctcactgttcatcaccgctgccctagcagccgcaggttcaagagctgctgggatatagcagttaagagatgaaccctgcagcctgacttcctttgctagaatcctggcactgttacttattccttgtatgtctctaggtaagttgcttgatctctttgtgtctccgtttctccacctgtaaagtggagataatgatagtaccaccttcagagagttttaaataaggattagattagggagtacacttagaatagtgtctagcacatagtaaaagctcaataaatgttagccgttattattggaagacatggtgtcatggaagactgtgggagtttctctccctagccaccctctttccatgagaaccccatgaagctttctaatgcagccttctctgaggagtaggtacaggctggagtagctgggatagggtcagaactaatgctcaaagccttatctgaacacgtcatatatgttgccctagagggagccttaacttttgaaaaactttgctctccttcttagcattggcaagactatttcctgacctaaggggcaga

SEQ ID NO: 1780 - protein, 33 aa, Homo sapiens
MKYSYPSTMLHSGNLSLFITAALAAAGSRAAGI

SEQ ID NO: 1781 - DNA, 287 bp, Homo sapiens
aggaaagaggtttaattgactcagagttccatatggctggggaggccttgcgatcatgcagatggcgaatgaggagcaaaaacacatcttacatggtggcagaagattccatgaagctcatcaccaggttagagaaaaaaggatccttcagcagctaaggtgaagataccatccaggatgcagaaatgggacctggaaagactccgtattccttttagggaagaaaaggtccatctcgaattacctcattgttcagagaataataagtatttgttcagcaataacaa

SEQ ID NO: 1782 - protein, 41 aa, Homo sapiens
MAGEALRSCRWRMRSKNTSYMVAEDSMKLITRLEKKGSFSS

SEQ ID NO: 1783 - DNA, 1369 bp, Homo sapiens
acttgcaaacgcagggaaagggtgagacctttcaaagctgccaagtgggcaagcttccagcagcagtctgggagcgagcgacagagccaccaagctgggcggcagggcattgagcctcgcgtttcaatttctgttcagttctcctgtaatggaaaattgctttgcacaaagctaaagtgttacagttctttccagagcccctcccccgccccacccccccaccggcagccttcggatcagaggacagagcccgcaggaaggtgaaaggagggtggttgtggcttcttactatgtcccttgcttcaggccctggccctgggtggttactcttttcctttggaatggggctggtatcagggtcaaagtgtccaaataattgtctgtgtcaagcccaagaagtaatctgcacagggaagcagttaaccgaatacccccttgacatacccctgaacacccggaggctgttcctgaacgagaacagaatcactagtttgccagcaatgcatctaggactcctcagtgaccttgtttatttggactgtcagaacaaccggattcgagaggtgatggattataccttcatcggggtcttcaaactcatctaccttgacctcagctccaacaacctaacctcgatctccccattcactttctcggtgctcagcaacctggtgcagctgaacattgccaacaaccctcacctgttatcgcttcacaagttcacctttgccaacaccacctctttgaggtacctggacctcagaaataccggcttgcagaccctggacagtgctgccttataccacctcactactctggagaccctgtttctgagtggaaacccctggaagtgcaactgctctttcctggacttcgccatcttcttaatagtgttccatatggacccctcagatgatctaaatgccacatgtgtggagcccacagagctgacagggtggcccatcacccgggtggggaacccactccgatacatgtgcatcacgcacctggaccacaaagactacatcttcctgctgctcatcggcttctgcatcttcgccgcgggaactgtggctgcctggctcacaggtgtgtgtgctgtgctctaccagaacacccgccacaagtcgagtgaagaagatgaggacgaggccgggactagggtggaagtcagccggcggatttttcaaacccagacgagctcggtccaggagttccctcagcttatttagttgccagagaccactatcttatgtgcctcccccaggctccctgctttctctcttgccctccccatcccaccaccttggagctgtcatagagattgaaaccttctagtaaaataaataaaatctctgatggccatttc

SEQ ID NO: 1784 - protein, 313 aa, Homo sapiens
MSLASGPGPGWLLFSFGMGLVSGSKCPNNCLCQAQEVICTGKQLTEYPLDIPLNTRRLFLNENRITSLPAMHLGLLSDLVYLDCQNNRIREVMDYTFIGVFKLIYLDLSSNNLTSISPFTFSVLSNLVQLNIANNPHLLSLHKFTFANTTSLRYLDLRNTGLQTLDSAALYHLTTLETLFLSGNPWKCNCSFLDFAIFLIVFHMDPSDDLNATCVEPTELTGWPITRVGNPLRYMCITHLDHKDYIFLLLIGFCIFAAGTVAAWLTGVCAVLYQNTRHKSSEEDEDEAGTRVEVSRRIFQTQTSSVQEFPQLI

SEQ ID NO: 1785 - DNA, 756 bp, Homo sapiens
atggcggatgacgccggcgcagccggcattgggttgcggggggagtcccggaggccccggggccctgggatggggaaccatggtggcttccgtggaggtttcggcagtggcatccgaggccggggtcactgccgtggaccaggctggggccgaagccacggagctcgcggaggcaaggccaaggataaggagtggatgcccgtcagcaagctgggctgcctggtcaagcacatgaagatcacttccctggaggagatctgtctcttctccctgcccatcacggaatctgagatcattgattttttcctggggggcctctctcgaggcctaggttttgaagattatgccggtgcagaagcagaccggagccggccagcgaaccaggggaacaagatcggcaagccctacaccatccgttgcaaggtgacgggctgctgcggctccgtgctcgtgcgcctcatccgcgtgcccagaggcaccggtatcgtctcggcgcctgtgcccaagaagttgctcatgatggctggtatcgatgactgctacacctcagccaggggctgcactgccactctgagcaacttcgccaaggccacctttgatgccatctctaagacctacagctacctgacccctgacctctggaggacggctgtattcaccaagtgtccctatcaagaattcactgaccacctcgccaagacccacaccagagtctccgtgcagaggacccaggctccagctgtagctacaacatag

SEQ ID NO: 1786 - protein, 251 aa, Homo sapiens
MADDAGAAGIGLRGESRRPRGPGMGNHGGFRGGFGSGIRGRGHCRGPGWGRSHGARGGKAKDKEWMPVSKLGCLVKHMKITSLEEICLFSLPITESEIIDFFLGGLSRGLGFEDYAGAEADRSRPANQGNKIGKPYTIRCKVTGCCGSVLVRLIRVPRGTGIVSAPVPKKLLMMAGIDDCYTSARGCTATLSNFAKATFDAISKTYSYLTPDLWRTAVFTKCPYQEFTDHLAKTHTRVSVQRTQAPAVATT

SEQ ID NO: 1787 - DNA, 487 bp, Homo sapiens
acttttaagtcgagtgttcctgtggggccaaaaggatggtttcagagaaatcccaggaagtgagagtgctgggatatgcgaggggcccacggagccctcccctgcgtgtctgagatcacaccctgcgggtaccctgccgtcgtgtgctgaaggaggtgactggatctcgactccagagtttgctcctgagatcgaaaaacaaaacaacccaataatagtcttgatttaagttcctgaactctgcccaccaccaccagcagccatgacttcttggcaagactccaaacccctccctaccttcactctttagagagaaaggctagacttacagggtgaccaataatgctggtttatccaagaaggggattcccaagacacagggctgtcagtgctaaaccagggtgttcctgtccaacttggcttccataagaacttcaatcaaattcacagaccacattcaaatttgtcaattgtcctaataatagct

SEQ ID NO: 1788 - protein, 75 aa, Homo sapiens
LLSRVFLWGQKDGFREIPGSESAGICEGPTEPSPACLRSHPAGTLPSCAEGGDWISTPEFAPEIEKQNNPIIVLI

SEQ ID NO: 1789 - DNA, 923 bp, Homo sapiens
atgcccgtgcttcgcccttacagcagagcgcctaaaaccgctacggtggctctgctggggacaaattattcacgtcccactgttctgcaaacccaatccgggaggtatgacctggctgggacagtttaggaagatggccacgaaggcacctgggggagtagatatatgtttttgagaatgagaggagtaaatcgctggacgaccatgagcaggaagaaaattaggcctccacctcccaaccagtggccctgagttggcaacttagacagcgcgcgccagcgccaggagccccgccttgggggcgtggccgcgcgctggtcggctggggcggggcctgcttctggcctcatctagccccgccccaggcgagggcgccgcacccacaccgcgctgcgcagttttgttctgctccagctgttcgaaggtgatccagacgcaagatggctgtcctctctaaggaatatggttttgtgcttctaactggtgctgccagctttataatggtggcccacctagccatcaatgtttccaaggcccgcaagaagtacaaagtggagtatcctatcatgtacagcacggaccctgaaaatgggcacatcttcaactgcattcagcgagcccaccagaacacgttggaagtgtatcctcccttcttattttttctagctgttggaggtgtttaccacccgcgtatagcttctggcctgggcttggcctggattgttggacgagttctttatgcttatggctattacacgggagaacccagcaagcgtagtcgaggagccctggggtccatcgccctcctgggcttggtgggcacaactgtgtgctctgctttccagcatcttggttgggttaaaagtggcttgggcagtggacccaaatgctgccattaaagaattataggggtttaaaaactc

SEQ ID NO: 1790 - protein, 152 aa, Homo sapiens; identical to SEQ ID NO: 58

SEQ ID NO: 1791 - DNA, 1011 bp, Homo sapiens
atgcccgtgcttcgcccttacagcagagcgcctaaaaccgctacggtggctctgctggggacaaattattcacgtcccactgttctgcaaacccaatccgggaggtatgacctggctgggacagtttaggaagatggccacgaaggcacctgggggagtagatatatgtttttgagaatgagaggagtaaatcgctggacgaccatgagcaggaagaaaattaggcctccacctcccaaccagtggccctgagttggcaacttagacagcgcgcgccagcgccaggagccccgccttgggggcgtggccgcgcgctggtcggctggggcggggcctgcttctggcctcatctagccccgccccaggcgagggcgccgcacccacaccgcgctgcgcagttttgttctgctccagctgttcgaaggtgatccagacgcaagatggctgtcctctctaaggaatatggttttgtgcttctaactggtgctgccagctttataatggtggcccacctagccatcaatgtttccaaggcccgcaagaagtacaaagtggagtatcctatcatgtacagcacggaccctgaaaatgggcacatcttcaactgcattcagcgagcccaccagaacacgttggaagtgtatcctcccttcttattttttctagctgttggaggtgtttaccacccgcgtatagcttctggcctgggcttggcctggattgttggacgagttctttatgcttatggctattacacgggagaacccagcaagcgtagtcgaggagccctggggtccatcgccctcctgggcttggtgggcacaactgtgtgctctgctttccagcatcttggttgggttaaaagtggcttgggcagtggacccaaatgctgccattaaagaattataggggtttaaaaactctcattcattttaaatgacttacctttatttccagttacattttttttctaaatataataaaaacttacctggcatcagcctcatacct

SEQ ID NO: 1792 - protein, 152 aa, Homo sapiens; identical to SEQ ID NO: 58

SEQ ID NO: 1793 - DNA, 1647 bp, Homo sapiens
atgcccgtgcttcgcccttacagcagagcgcctaaaaccgctacggtggctctgctggggacaaattattcacgtcccactgttctgcaaacccaatccgggaggtatgacctggctgggacagtttaggaagatggccacgaaggcacctgggggagtagatatatgtttttgagaatgagaggagtaaatcgctggacgaccatgagcaggaagaaaattaggcctccacctcccaaccagtggccctgagttggcaacttagacagcgcgcgccagcgccaggagccccgccttgggggcgtggccgcgcgctggtcggctggggcggggcctgcttctggcctcatctagccccgccccaggcgagggcgccgcacccacaccgcgctgcgcagttttgttctgctccagctgttcgaaggtgatccagacgcaagatggctgtcctctctaaggaatatggttttgtgcttctaactggtgctgccagctttataatggtggcccacctagccatcaatgtttccaaggcccgcaagaagtacaaagtggagtatcctatcatgtacagcacggaccctgaaaatgggcacatcttcaactgcattcagcgagcccaccagaacacgttggaagtgtatcctcccttcttattttttctagctgttggaggtgtttaccacccgcgtatagcttctggcctgggcttggcctggattgttggacgagttctttatgcttatggctattacacgggagaacccagcaagcgtagtcgaggagccctggggtccatcgccctcctgggcttggtgggcacaactgtgtgctctgctttccagcatcttggttgggttaaaagtggcttgggcagtggacccaaatgctgccattaaagaattataggggtttaaaaactctcattcattttaaatgacttacctttatttccagttacattttttttctaaatataataaaaacttacctggcatcagcctcatacctaaaactcctgactcttaccactcatttccgtttgagtctgtatctgaaatcagtagcctagtcctactagatgagaaaggagccacaagtattgtgccctctcctcacccttccagcagatgcttctgtagtatgtgaggttgagaaaaagtctgattgtggtgatgtaggtatagtcatgccacagtgatgaaaaattaaagaaaaatcttctagctctcaggatatgcattatcacttgctacagatactccaaggccaaaggaatgcttgagcctaaaagttcaagaccagcctgggcaacatagcaaaaccccatctctacaaaaaaatatacaacagttagccaggcatgatggcacatgtctgcagtcccagctacttgggaggctaaggtgggaggatcacttgagcccagggtgtcaaggctgcagtgagttatgatcacactgctgcactccagcgtgggtgacagagcaagaccctgtctcaaataaataaaaattaagtttctattaaagattgtttctgttgcttaaaaactgaagcaatagactaaatgtaagatgaaggttaacagagatgaatgtaacttgctacatttagaaacaaagatctgattgcctacgtacaaat

SEQ ID NO: 1794 - protein, 152 aa, Homo sapiens; identical to SEQ ID NO: 58

SEQ ID NO: 1795 - DNA, 1130 bp, Homo sapiens
atgcccgtgcttcgcccttacagcagagcgcctaaaaccgctacggtggctctgctggggacaaattattcacgtcccactgttctgcaaacccaatccgggaggtatgacctggctgggacagtttaggaagatggccacgaaggcacctgggggagtagatatatgtttttgagaatgagaggagtaaatcgctggacgaccatgagcaggaagaaaattaggcctccacctcccaaccagtggccctgagttggcaacttagacagcgcgcgccagcgccaggagccccgccttgggggcgtggccgcgcgctggtcggctggggcggggcctgcttctggcctcatctagccccgccccaggcgagggcgccgcacccacaccgcgctgcgcagttttgttctgctccagctgttcgaaggtgatccagacgcaagatggctgtcctctctaaggaatatggttttgtgcttctaactggtgctgccagctttataatggtggcccacctagccatcaatgtttccaaggcccgcaagaagtacaaagtggagtatcctatcatgtacagcacggaccctgaaaatgggcacatcttcaactgcattcagcgagcccaccagaacacgttggaagtgtatcctcccttcttattttttctagctgttggaggtgtttaccacccgcgtatagcttctggcctgggcttggcctggattgttggacgagttctttatgcttatggctattacacgggagaggtgtccaatcgtttggcttccctgggccacactggaagaagaagaattgtcttgggccacacataaaatacactaacattaacgacagtcgatgagctaaaagaaaaaaatattgccaaaaaaaaaaaaaacccacgttttaagaaagtttacaaatttgtgtttggctgcattcaaagctgtcctgggctgcatatggactgtgggctgcggattggacaagcttgctttagagggactatcagaaacttatcttctcccaggcagctcctactgcttaaggtgcataggatccccttggacacagggtaacgctattggctttgtccagtatcacatatgtgtcctctgtgcaaagaaatacca

SEQ ID NO: 1796 - protein, 129 aa, Homo sapiens
MAVLSKEYGFVLLTGAASFIMVAHLAINVSKARKKYKVEYPIMYSTDPENGHIFNCIQRAHQNTLEVYPPFLFFLAVGGVYHPRIASGLGLAWIVGRVLYAYGYYTGEVSNRLASLGHTGRRRIVLGHT

SEQ ID NO: 1797 - DNA, 598 bp, Homo sapiens
gagggcgccgcacccacaccgcgctgcgcagttttgttctgctccagctgttcgaaggtgatccaggtgagagatgccctggaggggaaggcgcttccggctctgcagacgcaagatggctgtcctctctaaggaatatggttttgtgcttctaactggtgctgccagctttataatggtggcccacctagccatcaatgtttccaaggcccgcaagaagtacaaagtggagtatcctatcatgtacagcacggaccctgaaaatgggcacatcttcaactgcattcagcgagcccaccagaacacgttggaagtgtatcctcccttcttattttttctagctgttggaggtgtttaccacccgcgtatagcttctggcctgggcttggcctggattgttggacgagttctttatgcttatggctattacacgggagaacccagcaagcgtagtcgaggagccctggggtccatcgccctcctgggcttggtgggcacaactgtgtgctctgctttccagcatcttggttgggttaaaagtggcttgggcagtggacccaaatgctgccattaaagaattataggggtttaaaaactc

SEQ ID NO: 1798 - protein, 166 aa, Homo sapiens
MPWRGRRFRLCRRKMAVLSKEYGFVLLTGAASFIMVAHLAINVSKARKKYKVEYPIMYSTDPENGHIFNCIQRAHQNTLEVYPPFLFFLAVGGVYHPRIASGLGLAWIVGRVLYAYGYYTGEPSKRSRGALGSIALLGLVGTTVCSAFQHLGWVKSGLGSGPKCCH

SEQ ID NO: 1799 - DNA, 686 bp, Homo sapiens
gagggcgccgcacccacaccgcgctgcgcagttttgttctgctccagctgttcgaaggtgatccaggtgagagatgccctggaggggaaggcgcttccggctctgcagacgcaagatggctgtcctctctaaggaatatggttttgtgcttctaactggtgctgccagctttataatggtggcccacctagccatcaatgtttccaaggcccgcaagaagtacaaagtggagtatcctatcatgtacagcacggaccctgaaaatgggcacatcttcaactgcattcagcgagcccaccagaacacgttggaagtgtatcctcccttcttattttttctagctgttggaggtgtttaccacccgcgtatagcttctggcctgggcttggcctggattgttggacgagttctttatgcttatggctattacacgggagaacccagcaagcgtagtcgaggagccctggggtccatcgccctcctgggcttggtgggcacaactgtgtgctctgctttccagcatcttggttgggttaaaagtggcttgggcagtggacccaaatgctgccattaaagaattataggggtttaaaaactctcattcattttaaatgacttacctttatttccagttacattttttttctaaatataataaaaacttacctggcatcagcctcatacct

SEQ ID NO: 1800 - protein, 166 aa, Homo sapiens; identical to SEQ ID NO: 1798

SEQ ID NO: 1801 - DNA, 1322 bp, Homo sapiens
gagggcgccgcacccacaccgcgctgcgcagttttgttctgctccagctgttcgaaggtgatccaggtgagagatgccctggaggggaaggcgcttccggctctgcagacgcaagatggctgtcctctctaaggaatatggttttgtgcttctaactggtgctgccagctttataatggtggcccacctagccatcaatgtttccaaggcccgcaagaagtacaaagtggagtatcctatcatgtacagcacggaccctgaaaatgggcacatcttcaactgcattcagcgagcccaccagaacacgttggaagtgtatcctcccttcttattttttctagctgttggaggtgtttaccacccgcgtatagcttctggcctgggcttggcctggattgttggacgagttctttatgcttatggctattacacgggagaacccagcaagcgtagtcgaggagccctggggtccatcgccctcctgggcttggtgggcacaactgtgtgctctgctttccagcatcttggttgggttaaaagtggcttgggcagtggacccaaatgctgccattaaagaattataggggtttaaaaactctcattcattttaaatgacttacctttatttccagttacattttttttctaaatataataaaaacttacctggcatcagcctcatacctaaaactcctgactcttaccactcatttccgtttgagtctgtatctgaaatcagtagcctagtcctactagatgagaaaggagccacaagtattgtgccctctcctcacccttccagcagatgcttctgtagtatgtgaggttgagaaaaagtctgattgtggtgatgtaggtatagtcatgccacagtgatgaaaaattaaagaaaaatcttctagctctcaggatatgcattatcacttgctacagatactccaaggccaaaggaatgcttgagcctaaaagttcaagaccagcctgggcaacatagcaaaaccccatctctacaaaaaaatatacaacagttagccaggcatgatggcacatgtctgcagtcccagctacttgggaggctaaggtgggaggatcacttgagcccagggtgtcaaggctgcagtgagttatgatcacactgctgcactccagcgtgggtgacagagcaagaccctgtctcaaataaataaaaattaagtttctattaaagattgtttctgttgcttaaaaactgaagcaatagactaaatgtaagatgaaggttaacagagatgaatgtaacttgctacatttagaaacaaagatctgattgcctacgtacaaat

SEQ ID NO: 1802 - protein, 166 aa, Homo sapiens; identical to SEQ ID NO: 1798

SEQ ID NO: 1803 - DNA, 477 bp, Homo sapiens
gcacccacaccgcgctgcgcagttttgttctgctccagctgttcgaaggtgatccaggctctttaatttctccattgagcattgtgtgagctccgctgagcattgtatggagggtcagctgccctggctggagatggttttgaggcttgttccttcgtggaaacatctggatgcagaagttaggctgtacaactatccaggggagctttaagtgagccaagtggaccctcagcaccacctcagagtgttctaagctaccgtctggtgtttgggactcagggaagtccttttggtatgatcagactagccctttatgtgactatccttgtgtgttactctcattaaaatattgatttttgccatgtaaggaagattggaatagcacaggcagccgaataaggattttaatgaaacattggagaatggcttcaagttaatctgtgaatgctttgtcattgtcccatccctggacacatt

SEQ ID NO: 1804 - protein, 34 aa, Homo sapiens
MEGQLPWLEMVLRLVPSWKHLDAEVRLYNYPGEL

SEQ ID NO: 1805 - DNA, 1355 bp, Homo sapiens
acccacaccgcgctgcgcagttttgttctgctccagctgttcgaaggtgatccagtaataaagcatcttgctccctaaggcttcacaccatgaaatagccacagtgctgggggccgtcccaacgtgttctttcttccacagacgcaagatggctgtcctctctaaggaatatggttttgtgcttctaactggtgctgccagctttataatggtggcccacctagccatcaatgtttccaaggcccgcaagaagtacaaagtggagtatcctatcatgtacagcacggaccctgaaaatgggcacatcttcaactgcattcagcgagcccaccagaacacgttggaagtgtatcctcccttcttattttttctagctgttggaggtgtttaccacccgcgtatagcttctggcctgggcttggcctggattgttggacgagttctttatgcttatggctattacacgggagaacccagcaagcgtagtcgaggagccctggggtccatcgccctcctgggcttggtgggcacaactgtgtgctctgctttccagcatcttggttgggttaaaagtggcttgggcagtggacccaaatgctgccattaaagaattataggggtttaaaaactctcattcattttaaatgacttacctttatttccagttacattttttttctaaatataataaaaacttacctggcatcagcctcatacctaaaactcctgactcttaccactcatttccgtttgagtctgtatctgaaatcagtagcctagtcctactagatgagaaaggagccacaagtattgtgccctctcctcacccttccagcagatgcttctgtagtatgtgaggttgagaaaaagtctgattgtggtgatgtaggtatagtcatgccacagtgatgaaaaattaaagaaaaatcttctagctctcaggatatgcattatcacttgctacagatactccaaggccaaaggaatgcttgagcctaaaagttcaagaccagcctgggcaacatagcaaaaccccatctctacaaaaaaatatacaacagttagccaggcatgatggcacatgtctgcagtcccagctacttgggaggctaaggtgggaggatcacttgagcccagggtgtcaaggctgcagtgagttatgatcacactgctgcactccagcgtgggtgacagagcaagaccctgtctcaaataaataaaaattaagtttctattaaagattgtttctgttgcttaaaaactgaagcaatagactaaatgtaagatgaaggttaacagagatgaatgtaacttgctacatttagaaacaaagatctgattgcctacgtacaaat

SEQ ID NO: 1806 - protein, 152 aa, Homo sapiens; identical to SEQ ID NO: 58

SEQ ID NO: 1807 - DNA, 719 bp, Homo sapiens
acccacaccgcgctgcgcagttttgttctgctccagctgttcgaaggtgatccagtaataaagcatcttgctccctaaggcttcacaccatgaaatagccacagtgctgggggccgtcccaacgtgttctttcttccacagacgcaagatggctgtcctctctaaggaatatggttttgtgcttctaactggtgctgccagctttataatggtggcccacctagccatcaatgtttccaaggcccgcaagaagtacaaagtggagtatcctatcatgtacagcacggaccctgaaaatgggcacatcttcaactgcattcagcgagcccaccagaacacgttggaagtgtatcctcccttcttattttttctagctgttggaggtgtttaccacccgcgtatagcttctggcctgggcttggcctggattgttggacgagttctttatgcttatggctattacacgggagaacccagcaagcgtagtcgaggagccctggggtccatcgccctcctgggcttggtgggcacaactgtgtgctctgctttccagcatcttggttgggttaaaagtggcttgggcagtggacccaaatgctgccattaaagaattataggggtttaaaaactctcattcattttaaatgacttacctttatttccagttacattttttttctaaatataataaaaacttacctggcatcagcctcatacct

SEQ ID NO: 1808 - protein, 152 aa, Homo sapiens; identical to SEQ ID NO: 58

SEQ ID NO: 1809 - DNA, 1056 bp, Homo sapiens
gttttgttctgctccagctgttcgaaggtgatccagacgcaagatggctgtcctctctaaggaatatggttttgtgcttctaactggtgctgccagctttataatggtggcccacctagccatcaatgtttccaaggcccgcaagaagtacaaagtggagtatcctatcatgtacagcacggaccctgaaaatgggcacatcttcaactgcattcagcgagcccaccagaacacgtgagtgtcggccctgccgggcaccaaagacatctgcagagtgggtgttttctgtctaacacctcagcccttagtgcgctgtatttgctgagtcatagtgatggtgacaatcatgggcacctcattaaaagtattcaaaaattatgtatgtgaacacattgactattaagcaaacttaagagtggttggaatggtgggatttcgggatattcttttcaaaaaatgtcttcatggttgcattacctactacagttttgcagcatgacccatctaaaccgatgttgactctcccaggcctagggagtgaagaggttttgaatgctgtaaggaaacccactctgactcaccaggaccttccacttccatttgttagatgtgaggtccttttactcagcatgttccaagtgacctctaatcccatgcagagcaaaggagggtggatgatagtgaccaggtcttctccctgcggtgaatgtttatttttacccccaagcttctaacttggcaaggaagatgtaaagattcatagtgctggctgggtgaggtgggctcacacctgtaatcccagcactttgggaggccgaggtgggtggatcacttgaggtcaggagttggagacaagcttggtcaacatggcaaaaccccatctctacaaaacttagccaggcatggtggcacgcacctgtaatcccagctactcaggaagctgaggcatgagaattacttgaacccgggaggcggaggttgcagtgagctgagatcatgccactgcattccagcctgggtgacagagacactccgtctcaaaaaaaaaaaaaaaaa

SEQ ID NO: 1810 - protein, 64 aa, Homo sapiens
MAVLSKEYGFVLLTGAASFIMVAHLAINVSKARKKYKVEYPIMYSTDPENGHIFNCIQRAHQNT

SEQ ID NO: 1811 - DNA, 1334 bp, Homo sapiens
cccgaagttgtggcttctgctgatactttccttgagagtcacgagtttacaagctacataatagcgtcgggggcaagtaagtgagatgccctggaggggaaggcgcttccggctctgcagacgcaagatggctgtcctctctaaggaatatggttttgtgcttctaactggtgctgccagctttataatggtggcccacctagccatcaatgtttccaaggcccgcaagaagtacaaagtggagtatcctatcatgtacagcacggaccctgaaaatgggcacatcttcaactgcattcagcgagcccaccagaacacgttggaagtgtatcctcccttcttattttttctagctgttggaggtgtttaccacccgcgtatagcttctggcctgggcttggcctggattgttggacgagttctttatgcttatggctattacacgggagaacccagcaagcgtagtcgaggagccctggggtccatcgccctcctgggcttggtgggcacaactgtgtgctctgctttccagcatcttggttgggttaaaagtggcttgggcagtggacccaaatgctgccattaaagaattataggggtttaaaaactctcattcattttaaatgacttacctttatttccagttacattttttttctaaatataataaaaacttacctggcatcagcctcatacctaaaactcctgactcttaccactcatttccgtttgagtctgtatctgaaatcagtagcctagtcctactagatgagaaaggagccacaagtattgtgccctctcctcacccttccagcagatgcttctgtagtatgtgaggttgagaaaaagtctgattgtggtgatgtaggtatagtcatgccacagtgatgaaaaattaaagaaaaatcttctagctctcaggatatgcattatcacttgctacagatactccaaggccaaaggaatgcttgagcctaaaagttcaagaccagcctgggcaacatagcaaaaccccatctctacaaaaaaatatacaacagttagccaggcatgatggcacatgtctgcagtcccagctacttgggaggctaaggtgggaggatcacttgagcccagggtgtcaaggctgcagtgagttatgatcacactgctgcactccagcgtgggtgacagagcaagaccctgtctcaaataaataaaaattaagtttctattaaagattgtttctgttgcttaaaaactgaagcaatagactaaatgtaagatgaaggttaacagagatgaatgtaacttgctacatttagaaacaaagatctgattgcctacgtacaaat

SEQ ID NO: 1812 - protein, 166 aa, Homo sapiens; identical to SEQ ID NO: 1798

SEQ ID NO: 1813 - DNA, 618 bp, Homo sapiens
tacataatagcgtcgggggcaagtaagtgtggaagacgagacgcaagatggctgtcctctctaaggaatatggttttgtgcttctaactggtgctgccagctttataatggtggcccacctagccatcaatgtttccaaggcccgcaagaagtacaaagtggagtatcctatcatgtacagcacggaccctgaaaatgggcacatcttcaactgcattcagcgagcccaccagaacacgttggaagtgtatcctcccttcttattttttctagctgttggaggtgtttaccacccgcgtatagcttctggcctgggcttggcctggattgttggacgagttctttatgcttatggctattacacgggagaacccagcaagcgtagtcgaggagccctggggtccatcgccctcctgggcttggtgggcacaactgtgtgctctgctttccagcatcttggttgggttaaaagtggcttgggcagtggacccaaatgctgccattaaagaattataggggtttaaaaactctcattcattttaaatgacttacctttatttccagttacattttttttctaaatataataaaaacttacctggcatcagcctcatacct

SEQ ID NO: 1814 - protein, 152 aa, Homo sapiens; identical to SEQ ID NO: 58

SEQ ID NO: 1815 - DNA, 1305 bp, Homo sapiens
ggacagatcttccatcctcctaacatatagttagcttccactctccaaatattccaccagcaacattgatgaatattgaagactatggactacgcaagatggctgtcctctctaaggaatatggttttgtgcttctaactggtgctgccagctttataatggtggcccacctagccatcaatgtttccaaggcccgcaagaagtacaaagtggagtatcctatcatgtacagcacggaccctgaaaatgggcacatcttcaactgcattcagcgagcccaccagaacacgttggaagtgtatcctcccttcttattttttctagctgttggaggtgtttaccacccgcgtatagcttctggcctgggcttggcctggattgttggacgagttctttatgcttatggctattacacgggagaacccagcaagcgtagtcgaggagccctggggtccatcgccctcctgggcttggtgggcacaactgtgtgctctgctttccagcatcttggttgggttaaaagtggcttgggcagtggacccaaatgctgccattaaagaattataggggtttaaaaactctcattcattttaaatgacttacctttatttccagttacattttttttctaaatataataaaaacttacctggcatcagcctcatacctaaaactcctgactcttaccactcatttccgtttgagtctgtatctgaaatcagtagcctagtcctactagatgagaaaggagccacaagtattgtgccctctcctcacccttccagcagatgcttctgtagtatgtgaggttgagaaaaagtctgattgtggtgatgtaggtatagtcatgccacagtgatgaaaaattaaagaaaaatcttctagctctcaggatatgcattatcacttgctacagatactccaaggccaaaggaatgcttgagcctaaaagttcaagaccagcctgggcaacatagcaaaaccccatctctacaaaaaaatatacaacagttagccaggcatgatggcacatgtctgcagtcccagctacttgggaggctaaggtgggaggatcacttgagcccagggtgtcaaggctgcagtgagttatgatcacactgctgcactccagcgtgggtgacagagcaagaccctgtctcaaataaataaaaattaagtttctattaaagattgtttctgttgcttaaaaactgaagcaatagactaaatgtaagatgaaggttaacagagatgaatgtaacttgctacatttagaaacaaagatctgattgcctacgtacaaat

SEQ ID NO: 1816 - protein, 162 aa, Homo sapiens
MNIEDYGLRKMAVLSKEYGFVLLTGAASFIMVAHLAINVSKARKKYKVEYPIMYSTDPENGHIFNCIQRAHQNTLEVYPPFLFFLAVGGVYHPRIASGLGLAWIVGRVLYAYGYYTGEPSKRSRGALGSIALLGLVGTTVCSAFQHLGWVKSGLGSGPKCCH

SEQ ID NO: 1817 - DNA, 2444 bp, Homo sapiens
atgtggatgatacagtgtactacgatgttacaatggcacagtggctatgatgtcactaagcaataggaatgtttcagctccattacagtcttatggggccattgttaaatatgcagtccatcactgaaacgcatggctgcatgtggtagaaggtttcaattcataaatattaatttatactgctggtttatgactaacccaggaaactgcataatgattaacaaatgctacgatataaccaagtgaattgcaaagtcatctacacctgtattaaagttcagctcagaaaggactgtttggactgtgtgtatctagcactacgtagaagagaaagtcaagggcaaagttcccactctcaagaactttatcttgttgggttcatgaaagggtttctggtgacacagagtaggtatataatcagcaaaatgtggtctgcggttcaaatgagtgctcatgccagagattggttgggtgccagctatcagttcttccaccctgtccctggaagctatctgctacctctggggctggcacaacccagggtgtggctgcgactgcctagggtgtggccactgtgaactgagctgcatccccttcctggtgcacacccgcacacacaaaagtcactctctaaggagtgggaatatctatctcttcgccttggaatcttcagaaaataatgatgtagcaaatgatagtttttttgaatgttgatttaattaagctgattctttctttgaaagagaagatttaatgatttttcactccctattgcatttatgttttccacaactacgacaagagttttctctgtgttctgaattcttctttcttaagatttctctttctggattagtcataaaccagtctttcttaaatacattcagtttcttccctggtttcaatagatattgagggaagaaacggaaacctgaattggttagatgcatactttataccagacactgtgccagatgatagagattatttcaggtgtgtattcaggggacggggtgcgtggtggtggtcattctgaaagacacctgcagttgcagctcaaatcatttattccgtaagtatctatgagcgtgcacactgtgcttgacatggaagatgccagacaaacgtggtcctgctctgttttaagtgaaggttgttatggtgtataaagcaggacacctcacttggtaggagtgcaaggaggtatcagggagggctgttctgctgcccttctcgcaggcagcttttcaggcattgctcctgcacctatgcagacgtgtccatggctcgtgcgggggaccctcagggagaacagtcacgctgctgccccaggcacttgcactgtccctatgactgagtatgcatcctctgcaaaccactgctgtagcatcagactctgggtacccttactgtgaattcactgcctttccaaggtcctaactgttgctggctctgcttgtcatcatccagattcataacgccatacataccttaacaaagtgtgaggagagtaactttcactagggtgcaaatgcccatcaagtttaacctcacagattgcatttatactttaaaagaggagctcagtagtaaatattaatttgtaattatagattctaactgtggattgtagagcagttgctttgctgtgacaggcatctatgcaagaggcacttctcttatcttgccatctacctaccctagcctcttaaaattaagaaaaatagaagtcagtgactaagccaccaaatttgaatgtgttacctgggctagctggagtgttttgggggagaattctaaaacctgctctggtcttagctctgccctcatttactgagcctctatttccttttctataaagtggagctaataggagttttgtgaagagtaaaagtgagctgaaaagtgctgggctgacacaaggtagccctgcacatagccagggagcccagcatcctgtccaaagattagagtctgaaagctcactctactgatttgcaaactttaacctaaagcaaatatgcttaattttattgtccttacatttattgcttctgagagacacctttttttttttttaaggcaaggtcttgctctgttgccccatgctgcagtgaggtggtgcaatcatagctcactacagcctcagcctcctgggctcaggtgatcctcccacttcagcctcctgagtagacatgagagtctccctgtgtggcccaggctgcctggcctcaagagttcaagaatagcctggccaacatggcaaaacctcgtttctactaaaaatacaaaaattagctgggtgtggtggtgcgcatctgtaatcccagctacttgggaggctgaggcaggagaatcacttgaacccgggagatggaggttgcagtgagccgagatcgtgccactgcactccagcccgggcgacaagagtgaaactccatctc

SEQ ID NO: 1818 - protein, 117 aa, Homo sapiens
MLRYNQVNCKVIYTCIKVQLRKDCLDCVYLALRRRESQGQSSHSQELYLVGFMKGFLVTQSRYIISKMWSAVQMSAHARDWLGASYQFFHPVPGSYLLPLGLAQPRVWLRLPRVWPL

SEQ ID NO: 1819 - DNA, 441 bp, Homo sapiens
ccagtaataaagcatcttgctccctaaggcttcacaccatgaaatagccacagtgctgggggccgtcccaacgtgttctttcttccacagacgcaagatggctgtcctctctaaggaatatggttttgtgcttctaactggtgctgccagctttataatggtggcccacctagccatcaatgtttccaaggcccgcaagaagtacaaagtggagtatcctatcatgtacagcacggaccctgaaaatgggcacatcttcaactgcattcagcgagcccaccagaacacgttggaagtgtatcctcccttcttattttttctagctgttggaggtgtttaccacccggacattgggaacagggagacttttccctcgaagaccatgtattctgggagaagcgctccccttctttctagtggagctacacccccagtgtagcc

SEQ ID NO: 1820 - protein, 113 aa, Homo sapiens
MAVLSKEYGFVLLTGAASFIMVAHLAINVSKARKKYKVEYPIMYSTDPENGHIFNCIQRAHQNTLEVYPPFLFFLAVGGVYHPDIGNRETFPSKTMYSGRSAPLLSSGATPPV

SEQ ID NO: 1821 - DNA, 576 bp, Homo sapiens
taataaagcatcttgctccctaaggcttcacaccatgaaatagccacagtgctgggggccgtcccaacgtgttctttcttccacagacgcaagatggctgtcctctctaaggaatatggttttgtgcttctaactggtgctgccagctttataatggtggcccacctagccatcaatgtttccaaggcccgcaagaagtacaaagtggagtatcctatcatgtacagcacggaccctgaaaatgggcacatcttcaactgcattcagcgagcccaccagaacacgttggaagtgtatcctcccttcttattttttctagctgttggaggtgtttaccacccgcgtatagcttctggcctgggcttggcctggattgttggacgagttctttatgcttatggctattacacgggagaacccagcaagcgtagtcgaggagccctggggtccatcgccctcctgggcttggtgggcacaactgtgtgctctgctttccagcatcttggttgggttaaaagtggcttgggcagtggacccaaatgctgccattaaagaattataggggtttaaaaactc

SEQ ID NO: 1822 - protein, 152 aa, Homo sapiens; identical to SEQ ID NO: 58

SEQ ID NO: 1823 - DNA, 507 bp, Homo sapiens
cagacgcaagatggctgtcctctctaaggaatatggttttgtgcttctaactggtgctgccagctttataatggtggcccacctagccatcaatgtttccaaggcccgcaagaagtacaaagtggaggttggaagtgtatcctcccttcttattttttctagctgttggaggtgtttaccacccgcgtatagcttctggcctgggcttggcctggattgttggacgagttctttatgcttatggctattacacgggagaacccagcaagcgtagtcgaggagccctggggtccatcgccctcctgggcttggtgggcacaactgtgtgctctgctttccagcatcttggttgggttaaaagtggcttgggcagtggacccaaatgctgccattaaagaattataggggtttaaaaactctcattcattttaaatgacttacctttatttccagttacattttttttctaaatataataaaaacttacctggcatcagcctcatacct

SEQ ID NO: 1824 - protein, 100 aa, Homo sapiens
MFPRPARSTKWRLEVYPPFLFFLAVGGVYHPRIASGLGLAWIVGRVLYAYGYYTGEPSKRSRGALGSIALLGLVGTTVCSAFQHLGWVKSGLGSGPKCCH

SEQ ID NO: 1825 - DNA, 1143 bp, Homo sapiens
cagacgcaagatggctgtcctctctaaggaatatggttttgtgcttctaactggtgctgccagctttataatggtggcccacctagccatcaatgtttccaaggcccgcaagaagtacaaagtggaggttggaagtgtatcctcccttcttattttttctagctgttggaggtgtttaccacccgcgtatagcttctggcctgggcttggcctggattgttggacgagttctttatgcttatggctattacacgggagaacccagcaagcgtagtcgaggagccctggggtccatcgccctcctgggcttggtgggcacaactgtgtgctctgctttccagcatcttggttgggttaaaagtggcttgggcagtggacccaaatgctgccattaaagaattataggggtttaaaaactctcattcattttaaatgacttacctttatttccagttacattttttttctaaatataataaaaacttacctggcatcagcctcatacctaaaactcctgactcttaccactcatttccgtttgagtctgtatctgaaatcagtagcctagtcctactagatgagaaaggagccacaagtattgtgccctctcctcacccttccagcagatgcttctgtagtatgtgaggttgagaaaaagtctgattgtggtgatgtaggtatagtcatgccacagtgatgaaaaattaaagaaaaatcttctagctctcaggatatgcattatcacttgctacagatactccaaggccaaaggaatgcttgagcctaaaagttcaagaccagcctgggcaacatagcaaaaccccatctctacaaaaaaatatacaacagttagccaggcatgatggcacatgtctgcagtcccagctacttgggaggctaaggtgggaggatcacttgagcccagggtgtcaaggctgcagtgagttatgatcacactgctgcactccagcgtgggtgacagagcaagaccctgtctcaaataaataaaaattaagtttctattaaagattgtttctgttgcttaaaaactgaagcaatagactaaatgtaagatgaaggttaacagagatgaatgtaacttgctacatttagaaacaaagatctgattgcctacgtacaaat

SEQ ID NO: 1826 - protein, 100 aa, Homo sapiens; identical to SEQ ID NO: 1824

SEQ ID NO: 1827 - DNA, 768 bp, Homo sapiens
acatagaacagcagctgagtcttcagtcaatctcatgctcagaggcccatttgagaaaacggcatttcccctagtcctgactttggggcagttctcttttctggcctgccctgagaccggctggcccacatgtccttctcttgagctctgacacaagttccccaagatgcccagggcaagtggggggattccttctatcccacctgtctaggagaaggccaatactcatctcccaggtccacaagccaagccattcatagaagaatcacagatattttattttcccgctgaaactaacttaattctacctaatttgcgtggggagtagttggccaaatcatcaaattgttaactttttgctaacatattgtgtaatcaaccctaggtgttaaaaaaggtttgcttgtttctttcatgcaaatactaatgtagcccttttttcttagcgtatagcttctggcctgggcttggcctggattgttggacgagttctttatgcttatggctattacacgggagaacccagcaagcgtagtcgaggagccctggggtccatcgccctcctgggcttggtgggcacaactgtgtgctctgctttccagcatcttggttgggttaaaagtggcttgggcagtggacccaaatgctgccattaaagaattataggggtttaaaaactctcattcattttaaatgacttacctttatttccagttacattttttttctaaatataataaaaacttacctggcatcagcctcatacct

SEQ ID NO: 1828 - protein, 56 aa, Homo sapiens
MLMAITRENPASVVEEPWGPSPSWAWWAQLCALLSSILVGLKVAWAVDPNAAIKEL

SEQ ID NO: 1829 - DNA, 1283 bp, Homo sapiens
tggcccacatgtccttctcttgagctctgacacaagttccccaagatgcccagggcaagtggggggattccttctatcccacctgtctaggagaaggccaatactcatctcccaggtccacaagccaagccattcatagaagaatcacagatattttattttcccgctgaaactaacttaattctacctaatttgcgtggggagtagttggccaaatcatcaaattgttaactttttgctaacatattgtgtaatcaaccctaggtgttaaaaaaggtttgcttgtttctttcatgcaaatactaatgtagcccttttttcttagcgtatagcttctggcctgggcttggcctggattgttggacgagttctttatgcttatggctattacacgggagaacccagcaagcgtagtcgaggagccctggggtccatcgccctcctgggcttggtgggcacaactgtgtgctctgctttccagcatcttggttgggttaaaagtggcttgggcagtggacccaaatgctgccattaaagaattataggggtttaaaaactctcattcattttaaatgacttacctttatttccagttacattttttttctaaatataataaaaacttacctggcatcagcctcatacctaaaactcctgactcttaccactcatttccgtttgagtctgtatctgaaatcagtagcctagtcctactagatgagaaaggagccacaagtattgtgccctctcctcacccttccagcagatgcttctgtagtatgtgaggttgagaaaaagtctgattgtggtgatgtaggtatagtcatgccacagtgatgaaaaattaaagaaaaatcttctagctctcaggatatgcattatcacttgctacagatactccaaggccaaaggaatgcttgagcctaaaagttcaagaccagcctgggcaacatagcaaaaccccatctctacaaaaaaatatacaacagttagccaggcatgatggcacatgtctgcagtcccagctacttgggaggctaaggtgggaggatcacttgagcccagggtgtcaaggctgcagtgagttatgatcacactgctgcactccagcgtgggtgacagagcaagaccctgtctcaaataaataaaaattaagtttctattaaagattgtttctgttgcttaaaaactgaagcaatagactaaatgtaagatgaaggttaacagagatgaatgtaacttgctacatttagaaacaaagatctgattgcctacgtacaaat

SEQ ID NO: 1830 - protein, 56 aa, Homo sapiens; identical to SEQ ID NO: 1828

SEQ ID NO: 1831 - DNA, 1330 bp, Homo sapiens
tgtagatatccacttgtttcagcaccatttgttaaaaagactgtttttcctccattgaattttggtacccttattgctgttacttattttaaagataccatgtgcatgggactataaaacccaatccatatctgttttgcctggatgataaaagattttaaaacattttgaagaaatgagaatttagtaagatttgagaaccctagaactggcagtgtaacttttcctgttaaagtagtagcctaagaaactctcaataatgcacacattttttttttcttcatagggacatccaacgggctcatagagtggtagctgagcttcaggctgggacgtgcttcattaacaactataacgtcagcccagtggagttgccctttggtggatataagaagtcaggatttggcagagagaacggccgtgtgacaatcgaatattattcacagctgaagactgtgtgtgtggagatgggtgatgtggaatctgctttttgaaaacctgcagtgaaacctattgacatggccacgctgtggaatgatgtgaattggccctgtttacagaggcagtacaactgaatgttattttacatccagaattttggcgttcagtataagagaatggttcatgttactctttctctctccatcagcttcctcactgaaaatgtgcattaagtgccttgtagatactaatcaagaaagctgtgattctcctcaaagcgtatttttgtgaaatcttttaagagccagtaacatacttctagagaacaggaaaagagactaggataatacatcttccacacatttggcccactgataatgttaattctctggcgtatttcaaagaacttgttcctggctgatccaagtgcagtggtatttacaactaattgatcacaaccagtttgtagatttctttgttccttctccattcccactgcttcacttgcctagtcttgaagaaaaaaaacaaaaaacaaaaaaaaaccttgttcctttataggttcctggtagaatcagtagagatgatttcagctcattgacatttttttaagctatatccccttgtcattccattgagaaagctgacaactgggatagggaggggattagataatagatggggtcaaattctgtgtgaatgtgaacttgcctagtaagcactttgtctctgttcactactgcgatagaggaaatctatctccctatcttgggtccttgaactacagcctgctgtcttacaccagtggagctaccctttaaatgtacaaattatttgtatgctaatgtaatatggtgaaattaaaataaatcacactgttaattgtttt

SEQ ID NO: 1832 - protein, 35 aa, Homo sapiens
MLLFLSPSASSLKMCIKCLVDTNQESCDSPQSVFL

SEQ ID NO: 1833 - DNA, 2367 bp, Homo sapiens
cccgcggcccgtcagcctctgccgcggagctgcgtccgccactcatgtttctccgagcaggcctggccgcgctctccccgcttcttcgcagtcttcggccctctcctgtcgccgccatgagcactggcaccttcgtcgtgtcgcagccgctcaattaccgcggcggggcccgcgtggagccggcggacgcctccggtaccgagaaagctttcgagccagcaaccggccgagtgatagctactttcacatgttcaggagaaaaggaagtaaatttggctgttcaaaatgcaaaggctgcttttaaaatatggagtcaaaaatctggcatggagcgttgccgaatccttttggaggctgccaggataataagggaacgggaggatgaaattgctactatggagtgcatcaacaatggcaagtccatctttgaggcccgcttggacattgacatttcctggcagtgcctggagtattatgcgggcttggctgcatccatggctggtgaacacatccagctcccaggtggatcgtttggttataccagaagagaaccacttggggtatgtgtgggaataggagcatggaactacccctttcagattgcctcttggaagtcggctccagcattagcctgtgtgaggctggtgtacctcctgggctcttcaatgtggtgcagggaggggctgccacaggccagtttctgtgtcagcatcccgatgtggccaaagtctccttcactggaagtgtgcccactggcatgaagatcatggagatgtcagctaaaggaatcaaacctgttaccttggaacttggaggcaaatctccactcatcatcttctcagactgtgatatgaacaatgctgtaaagggggcgctgatggccaacttcctcacacaaggccaggtttgctgtaatggcacaagagtatttgtgcagaaagaaattcttgataaatttacagaggaagtggtgaaacagacccaaaggattaaaattggagatccccttctggaagatacaaggatgggtccactcatcaaccgaccacacctggagcgagtccttgggtttgtcaaagtggcaaaggagcagggtgctaaagtgttatgtggtggagatatatatgtacctgaagatcccaaattaaaggatggatattacatgagaccttgtgtattaactaattgcagagacgacatgacctgtgtgaaggaagagatctttgggcctgttatgtccattttatcatttgacactgaagctgaggttctagaaagagccaatgataccacttttggactagcagctggcgtctttaccagggacatccaacgggctcatagagtggtagctgagcttcaggctgggacgtgcttcattaacaactataacgtcagcccagtggagttgccctttggtggatataagaagtcaggatttggcagagagaacggccgtgtgacaatcgaatattattcacagctgaagactgtgtgtgtggagatgggtgatgtggaatctgctttttgaaaacctgcagtgaaacctattgacatggccacgctgtggaatgatgtgaattggccctgtttacagaggcagtacaactgaatgttattttacatccagaattttggcgttcagtataagagaatggttcatgttactctttctctctccatcagcttcctcactgaaaatgtgcattaagtgccttgtagatactaatcaagaaagctgtgattctcctcaaagcgtatttttgtgaaatcttttaagagccagtaacatacttctagagaacaggaaaagagactaggataatacatcttccacacatttggcccactgataatgttaattctctggcgtatttcaaagaacttgttcctggctgatccaagtgcagtggtatttacaactaattgatcacaaccagtttgtagatttctttgttccttctccattcccactgcttcacttgcctagtcttgaagaaaaaaaacaaaaaacaaaaaaaaaccttgttcctttataggttcctggtagaatcagtagagatgatttcagctcattgacatttttttaagctatatccccttgtcattccattgagaaagctgacaactgggatagggaggggattagataatagatggggtcaaattctgtgtgaatgtgaacttgcctagtaagcactttgtctctgttcactactgcgatagaggaaatctatctccctatcttgggtccttgaactacagcctgctgtcttacaccagtggagctaccctttaaatgtacaaattatttgtatgctaatgtaatatggtgaaattaaaataaatcacactgttaattgtttt

SEQ ID NO: 1834 - protein, 322 aa, Homo sapiens
MCGNRSMELPLSDCLLEVGSSISLCEAGVPPGLFNVVQGGAATGQFLCQHPDVAKVSFTGSVPTGMKIMEMSAKGIKPVTLELGGKSPLIIFSDCDMNNAVKGALMANFLTQGQVCCNGTRVFVQKEILDKFTEEVVKQTQRIKIGDPLLEDTRMGPLINRPHLERVLGFVKVAKEQGAKVLCGGDIYVPEDPKLKDGYYMRPCVLTNCRDDMTCVKEEIFGPVMSILSFDTEAEVLERANDTTFGLAAGVFTRDIQRAHRVVAELQAGTCFINNYNVSPVELPFGGYKKSGFGRENGRVTIEYYSQLKTVCVEMGDVESAF

SEQ ID NO: 1835 - DNA, 2698 bp, Homo sapiens
ggatcctaggatgcttacatgcaatgatgaacccgaaaacacttgcaaagtgctacgcaaatattgatcacgaagaaggaagtcctcttcccgcctggagactgtgtggggtatggcggggtggtggggagaatgtggtgtcttgctccaccctcctggcgaggggagggcctggcctggaccgcagaggaatcgagtgactgcccctaaaatctcctagaaccgatcccgcggccccgcccctcccgcggccccgcccctcccgcggcccgtcagcctctgccgcggagctgcgtccgccactcatgtttctccgagcaggcctggccgcgctctccccgcttcttcgcagtcttcggccctctcctgtcgccgccatgagcactggcaccttcgtcgtgtcgcagccgctcaattaccgcggcggggcccgcgtggagccggcggacgcctccggtaccgagaaagctttcgagccagcaaccggccgagtgatagctactttcacatgttcaggagaaaaggaagtaaatttggctgttcaaaatgcaaaggctgcttttaaaatatggagtcaaaaatctggcatggagcgttgccgaatccttttggaggctgccaggataataagggaacgggaggatgaaattgctactatggagtgcatcaacaatggcaagtccatctttgaggcccgcttggacattgacatttcctggcagtgcctggagtattatgcgggcttggctgcatccatggctggtgaacacatccagctcccaggtggatcgtttggttataccagaagagaaccacttggggtatgtgtgggaataggagcatggaactacccctttcagattgcctcttggaagtcggctccagcattagcctgtggtaatgccatggtctttaaaccttctccctttacacctgtttctgcattgctactggctgaaatctacagtgaggctggtgtacctcctgggctcttcaatgtggtgcagggaggggctgccacaggccagtttctgtgtcagcatcccgatgtggccaaagtctccttcactggaagtgtgcccactggcatgaagatcatggagatgtcagctaaaggaatcaaacctgttaccttggaacttggaggcaaatctccactcatcatcttctcagactgtgatatgaacaatgctgtaaagggggcgctgatggccaacttcctcacacaaggccaggtttgctgtaatggcacaagagtatttgtgcagaaagaaattcttgataaatttacagaggaagtggtgaaacagacccaaaggattaaaattggagatccccttctggaagatacaaggatgggtccactcatcaaccgaccacacctggagcgagtccttgggtttgtcaaagtggcaaaggagcagggtgctaaagtgttatgtggtggagatatatatgtacctgaagatcccaaattaaaggatggatattacatgagaccttgtgtattaactaattgcagagacgacatgacctgtgtgaaggaagagatctttgggcctgttatgtccattttatcatttgacactgaagctgaggttctagaaagagccaatgataccacttttggactagcagctggcgtctttaccagggacatccaacgggctcatagagtggtagctgagcttcaggctgggacgtgcttcattaacaactataacgtcagcccagtggagttgccctttggtggatataagaagtcaggatttggcagagagaacggccgtgtgacaatcgaatattattcacagctgaagactgtgtgtgtggagatgggtgatgtggaatctgctttttgaaaacctgcagtgaaacctattgacatggccacgctgtggaatgatgtgaattggccctgtttacagaggcagtacaactgaatgttattttacatccagaattttggcgttcagtataagagaatggttcatgttactctttctctctccatcagcttcctcactgaaaatgtgcattaagtgccttgtagatactaatcaagaaagctgtgattctcctcaaagcgtatttttgtgaaatcttttaagagccagtaacatacttctagagaacaggaaaagagactaggataatacatcttccacacatttggcccactgataatgttaattctctggcgtatttcaaagaacttgttcctggctgatccaagtgcagtggtatttacaactaattgatcacaaccagtttgtagatttctttgttccttctccattcccactgcttcacttgcctagtcttgaagaaaaaaaacaaaaaacaaaaaaaaaccttgttcctttataggttcctggtagaatcagtagagatgatttcagctcattgacatttttttaagctatatccccttgtcattccattgagaaagctgacaactgggatagggaggggattagataatagatggggtcaaattctgtgtgaatgtgaacttgcctagtaagcactttgtctctgttcactactgcgatagaggaaatctatctccctatcttgggtccttgaactacagcctgctgtcttacaccagtggagctaccctttaaatgtacaaattatttgtatgctaatgtaatatggtgaaattaaaataaatcacactgttaattgtttt

SEQ ID NO: 1836 - protein, 518 aa, Homo sapiens
MFLRAGLAALSPLLRSLRPSPVAAMSTGTFVVSQPLNYRGGARVEPADASGTEKAFEPATGRVIATFTCSGEKEVNLAVQNAKAAFKIWSQKSGMERCRILLEAARIIREREDEIATMECINNGKSIFEARLDIDISWQCLEYYAGLAASMAGEHIQLPGGSFGYTRREPLGVCVGIGAWNYPFQIASWKSAPALACGNAMVFKPSPFTPVSALLLAEIYSEAGVPPGLFNVVQGGAATGQFLCQHPDVAKVSFTGSVPTGMKIMEMSAKGIKPVTLELGGKSPLIIFSDCDMNNAVKGALMANFLTQGQVCCNGTRVFVQKEILDKFTEEVVKQTQRIKIGDPLLEDTRMGPLINRPHLERVLGFVKVAKEQGAKVLCGGDIYVPEDPKLKDGYYMRPCVLTNCRDDMTCVKEEIFGPVMSILSFDTEAEVLERANDTTFGLAAGVFTRDIQRAHRVVAELQAGTCFINNYNVSPVELPFGGYKKSGFGRENGRVTIEYYSQLKTVCVEMGDVESAF

SEQ ID NO: 1837 - DNA, 433 bp, Homo sapiens
ctctgccgcggagctgcgtccgccactcatgtttctccgagcaggcctggccgcgctctccccgcttcttcgcagtcttcggccctctcctgtcgccgccatgagcactggcaccttcgtcgtgtcgcagccgctcaattaccgcggcggggcccgcgtggagccggcggacgcctccggtaccgagaaagctttcgagccagcaaccggccgagtgatagctactttcacatgttcaggagaaaaggaagtaaatttggctgttcaaaatgcaaaggctgcttttaaaatatggagtcaaaaatgggaggatgaaattgctactatggagtgcatcaacaatggcaagtccatctttgaggcccgcttggacattgacatttcctggcagtgcctggagtattatgcgggcttggctgcatccatggctggt

SEQ ID NO: 1838 - protein, 134 aa, Homo sapiens
MFLRAGLAALSPLLRSLRPSPVAAMSTGTFVVSQPLNYRGGARVEPADASGTEKAFEPATGRVIATFTCSGEKEVNLAVQNAKAAFKIWSQKWEDEIATMECINNGKSIFEARLDIDISWQCLEYYAGLAASMA

SEQ ID NO: 1839 - DNA, 1208 bp, Homo sapiens
ataccccacacagtctccaggcgggaagaggacttccttcttcgtgatcaatatttgcgtagcactttgcaagtgttttcgggttcatcattgcatacaaccagaggaggaaaagaaaagcaactggatccccttctgccacctccaggtctcctaaaggaagaagtccttgggaacccatactgtgtgatccagggtccttcactggcctctccctcaggtcatccagttgtcaatttgttgctttggcttagtttcaccattagcagtactcttcttggacacaacctccagagtaaaagcaaatgccggatgcggtggctcacacctgtaatcccagcactttgggaggcggaggtgggtggattgcctgagctcaggagttccagaccagcctggacaacatggtggactttccagaaaatatgtagctacccagctacacctgcactggggtcaggatgatccccagggggctcagaacaccagatcaacagtgaagccacagttgccgagctccacatcatacgttatggctgtgattcctgtgatagcttgagtgaggccgctcagaggcctcagggcctgactgtcctgggcatcctaattgaggtgaaatgctgagccttggtgtaggaatcttggttggctctctctgacttctgctggccattttcttcatggctagaaggcttcagaacaagaggctggaaaatcagaagagcgtggtcatcacctcagcatgagccaccactgaggcataaactccctcttagataccttggatatggatgccttcccctcgtgcctccagaggtgctttcccctcatgtctcaccacccctcagggaacctctaaaatggggtgcagggactggccggaattactgtaggagtagtaggcgcttctcctctggacatcccctgcagagaggtatggacccaggctctcattcaaggaagaacagcagagccttcagcccctcaaaacatgtaggaggagatcagggcatccctgtgttgttagtgcagaggacaaactgtgtttagttttaggggaagtttgggatgtaccccaaagtcctccaccatctcacctttatgtccctttccctagatatattgcaggatctccccttaggagaaagagttgctgttggggttatatatttttgctcaacatatttggaaactaaagtttctggagg

SEQ ID NO: 1840 - protein, 50 aa, Homo sapiens
MRWLTPVIPALWEAEVGGLPELRSSRPAWTTWWTFQKICSYPATPALGSG

SEQ ID NO: 1841 - DNA, 1028 bp, Homo sapiens
agtctcgctctgttgcccaggctggagtacagtggtgcaatctcagctcactgcaacctccacctcccaggttcaagtgattcttctcctacctcagtctcccggaatcctttttatatggagcatcttgcaaaattagtgttctgagagtcataacatgggaaacaatgcttaattgttttgaatgtggtccaaggacgcttgcatcagaatcactgtggatgctgattattgatacaaaaaatcatcgccacgtcttgttatgtcagaagctcttctaccagaagctgaaagagaatagcctttcaaggaacatggagaagttaacgtgaggatgtcagaacaagaacacagagggtcccttggtccctaatactttgggggccaccatattatccctggactgcttagcatggaccgttatataatagagaaataaatttatttcctgtatttgccattgctatttttgccttcgataatgcagctgatctgaaaactaattaattcagagataaaaagagaacgtacgttctgactaatcatggtgaatagtctctgttctgttctttattaaaaagcatggatttctctgttgtgatgtcttcctatttaaggtaaaaagataaggtctttcttctttttttctctttttaaatttcaatatcttttgaggtacaagtggtttttggttacatggatgaggtctgtagcagtgaattctgagattttagtgtacccattacccaagcagtgtacactgtacccaatatgtagtcttttatccctcatccctctcccaaccttccctctgggtcctcaaagtccattatatcactctgtatgtctttgcatcctcatagcttagctgaatcaagatatattttaaaggcaaaaatgttaacacttgataatggattggatatgtggcatttagagattggataggttgggattttttaaacgttctgaattgtaatttatgttagaaattgtccaaagcactttcattaaacttctgatttctc

SEQ ID NO: 1842 - protein, 55 aa, Homo sapiens
MRSVAVNSEILVYPLPKQCTLYPICSLLSLIPLPTFPLGPQSPLYHSVCLCILIA

SEQ ID NO: 1843 - DNA, 1989 bp, Homo sapiens
ggaagcggaagtgcgatcttcgggctgtcagagttggtctgttactcggtggtggcggagtctacggaagccgttttcgcttcacttttcctggctgtagagcgctttccccctggcgggtgagagtgcagagacgaaggcataacctgggtcctggtttacaggacagacaagtacaagagactgaaggcagaagtggaaaaacagagtaaaaaattggaaaagaagaaggaaacaataacagagtcagctggtcgacaacagaaaaagaaaatagagagacaagaagagaaactgaagaataacaacagagatctatcaatggttcgaatgaaatccatgtttgctattggcttttgttttactgccctaatgggaatgttcaattccatatttgatggtagagtggtggcaaagcttccttttacccctctttcttacatccaaggactgtctcatcgaaatctgctgggagatgacaccacagactgttccttcattttcctgtatattctctgtactatgtcgattcgacagaacattcagaagattctcggccttgccccttcacgagccgccaccaagcaggcaggtggatttcttggcccaccacctccttctgggaagttctcttgaactcaagaactctttattttctatcattctttctagacacacacacatcagactggcaactgttttgtagcaagagccataggtagccttactacttgggcctctttctagttttgaattatttctaagccttttgggtatgattagagtgaaaatggcagccagcaaacttgatagtgcttttggtcctagatgatttttatcaaataagtggattgattagttaagttcaggtaatgtttatgtaatgaaaaacaaatagcatccttcttgtttcatttacataagtattttctgtgggaccgactctcaaggcactgtgtatgccctgcaagttggctgtctatgagcatttagagatttagaagaaaaatttagtttgtttaacccttgtaactgtttgttttgttgttgtttttttttcaagccaaatacatgacataagatcaataaagaggccaaatttttagctgttttatgtacaaggagagatctgtttcattttgttttgccgtatttctagatataagttttagcatgggccaggaaggactaaaataaaagtttttaaggtactgtactttttgccatacttgactcatatactcaaaatacagagttgtcttggtgtaggaattggaaagcaagagtggaaaggaacgtaataactcgttggagtttaaaaatgagggtcttggcaagtaacactgatgtctgaaaaaaaattaaatataaataaataaataaaaatgagggtcctcagctgttctcttcatatcctattacagtctctcagattcttgtgggggcactcttagatctcccttggagacaaggttatagttatatgttgttaatctcgcagagcttccttttagtcacaatagccttcattttctgccatgccccttcataagggagaaggatgtttgtaccatgatcctccccgcataatctatggaattaggagtcctgtgtggagtcttatcaataaatatgcacattcatcaaatgtctacttaaatgtgagtattctaccagtgagaaaaaacacataattttcaaggtaatcattgttaaaccaacagcaaacttctttcttatcagcaccataaagtccagaagacagtagaaaagtatcttcaaagtgctgaggaaaataagtatcaacttagaattttatgtacaatattggaggcaaaataaagacatgtttagacatacaaaactaagagagttgaattattaaaggttatattccaaggacaaaaaagaggatctgcccaaggtgaaggtatggcatacaagaaacaatggtcaacagagaaataaaatatatggatgaatatatgg

SEQ ID NO: 1844 - protein, 104 aa, Homo sapiens
MVRMKSMFAIGFCFTALMGMFNSIFDGRVVAKLPFTPLSYIQGLSHRNLLGDDTTDCSFIFLYILCTMSIRQNIQKILGLAPSRAATKQAGGFLGPPPPSGKFS

SEQ ID NO: 1845 - DNA, 2266 bp, Homo sapiens
ggaagcggaagtgcgatcttcgggctgtcagagttggtctgttactcggtggtggcggagtctacggaagccgttttcgcttcacttttcctggctgtagagcgctttccccctggcgggtgagagtgcagagacgaaggtgcgagatgagcactatgttcgcggacactctcctcatcgtttttatctctgtgtgcacggctctgctcgcagagggtgagagcgggtatttctcagacgtttgatcagtccccgggaggaagggccccggggtcccctgtgccaccaggggaaagatcgcgagccttacttgcttgagaggctcatctactccacttcagggaatctctgggcaactcgtgaacaggagcaggaggggagtatggagtcgattgccgagttttctttggtctcaggcataacctgggtcctggtttacaggacagacaagtacaagagactgaaggcagaagtggaaaaacagagtaaaaaattggaaaagaagaaggaaacaataacagagtcagctggtcgacaacagaaaaagaaaatagagagacaagaagagaaactgaagaataacaacagagatctatcaatggttcgaatgaaatccatgtttgctattggcttttgttttactgccctaatgggaatgttcaattccatatttgatggtagagtggtggcaaagcttccttttacccctctttcttacatccaaggactgtctcatcgaaatctgctgggagatgacaccacagactgttccttcattttcctgtatattctctgtactatgtcgattcgacagaacattcagaagattctcggccttgccccttcacgagccgccaccaagcaggcaggtggatttcttggcccaccacctccttctgggaagttctcttgaactcaagaactctttattttctatcattctttctagacacacacacatcagactggcaactgttttgtagcaagagccataggtagccttactacttgggcctctttctagttttgaattatttctaagccttttgggtatgattagagtgaaaatggcagccagcaaacttgatagtgcttttggtcctagatgatttttatcaaataagtggattgattagttaagttcaggtaatgtttatgtaatgaaaaacaaatagcatccttcttgtttcatttacataagtattttctgtgggaccgactctcaaggcactgtgtatgccctgcaagttggctgtctatgagcatttagagatttagaagaaaaatttagtttgtttaacccttgtaactgtttgttttgttgttgtttttttttcaagccaaatacatgacataagatcaataaagaggccaaatttttagctgttttatgtacaaggagagatctgtttcattttgttttgccgtatttctagatataagttttagcatgggccaggaaggactaaaataaaagtttttaaggtactgtactttttgccatacttgactcatatactcaaaatacagagttgtcttggtgtaggaattggaaagcaagagtggaaaggaacgtaataactcgttggagtttaaaaatgagggtcttggcaagtaacactgatgtctgaaaaaaaattaaatataaataaataaataaaaatgagggtcctcagctgttctcttcatatcctattacagtctctcagattcttgtgggggcactcttagatctcccttggagacaaggttatagttatatgttgttaatctcgcagagcttccttttagtcacaatagccttcattttctgccatgccccttcataagggagaaggatgtttgtaccatgatcctccccgcataatctatggaattaggagtcctgtgtggagtcttatcaataaatatgcacattcatcaaatgtctacttaaatgtgagtattctaccagtgagaaaaaacacataattttcaaggtaatcattgttaaaccaacagcaaacttctttcttatcagcaccataaagtccagaagacagtagaaaagtatcttcaaagtgctgaggaaaataagtatcaacttagaattttatgtacaatattggaggcaaaataaagacatgtttagacatacaaaactaagagagttgaattattaaaggttatattccaaggacaaaaaagaggatctgcccaaggtgaaggtatggcatacaagaaacaatggtcaacagagaaataaaatatatggatgaatatatgg

SEQ ID NO: 1846 - protein, 176 aa, Homo sapiens
MESIAEFSLVSGITWVLVYRTDKYKRLKAEVEKQSKKLEKKKETITESAGRQQKKKIERQEEKLKNNNRDLSMVRMKSMFAIGFCFTALMGMFNSIFDGRVVAKLPFTPLSYIQGLSHRNLLGDDTTDCSFIFLYILCTMSIRQNIQKILGLAPSRAATKQAGGFLGPPPPSGKFS

SEQ ID NO: 1847 - DNA, 2010 bp, Homo sapiens
ggaagcggaagtgcgatcttcgggctgtcagagttggtctgttactcggtggtggcggagtctacggaagccgttttcgcttcacttttcctggctgtagagcgctttccccctggcgggtgagagtgcagagacgaaggtgcgagatgagcactatgttcgcggacactctcctcatcgtttttatctctgtgtgcacggctctgctcgcagagggcataacctgggtcctggtttacaggacagacaagtacaagagactgaaggcagaagtggaaaaacagagtaaaaaattggaaaagaagaaggaaacaataacagagtcagctggtcgacaacagaaaaagaaaatagagagacaagaagagaaactgaagaataacaacagagatctatcaatggttcgaatgaaatccatgtttgctattggcttttgttttactgccctaatgggaatgttcaattccatgactgtctcatcgaaatctgctgggagatgacaccacagactgttccttcattttcctgtatattctctgtactatgtcgattcgacagaacattcagaagattctcggccttgccccttcacgagccgccaccaagcaggcaggtggatttcttggcccaccacctccttctgggaagttctcttgaactcaagaactctttattttctatcattctttctagacacacacacatcagactggcaactgttttgtagcaagagccataggtagccttactacttgggcctctttctagttttgaattatttctaagccttttgggtatgattagagtgaaaatggcagccagcaaacttgatagtgcttttggtcctagatgatttttatcaaataagtggattgattagttaagttcaggtaatgtttatgtaatgaaaaacaaatagcatccttcttgtttcatttacataagtattttctgtgggaccgactctcaaggcactgtgtatgccctgcaagttggctgtctatgagcatttagagatttagaagaaaaatttagtttgtttaacccttgtaactgtttgttttgttgttgtttttttttcaagccaaatacatgacataagatcaataaagaggccaaatttttagctgttttatgtacaaggagagatctgtttcattttgttttgccgtatttctagatataagttttagcatgggccaggaaggactaaaataaaagtttttaaggtactgtactttttgccatacttgactcatatactcaaaatacagagttgtcttggtgtaggaattggaaagcaagagtggaaaggaacgtaataactcgttggagtttaaaaatgagggtcttggcaagtaacactgatgtctgaaaaaaaattaaatataaataaataaataaaaatgagggtcctcagctgttctcttcatatcctattacagtctctcagattcttgtgggggcactcttagatctcccttggagacaaggttatagttatatgttgttaatctcgcagagcttccttttagtcacaatagccttcattttctgccatgccccttcataagggagaaggatgtttgtaccatgatcctccccgcataatctatggaattaggagtcctgtgtggagtcttatcaataaatatgcacattcatcaaatgtctacttaaatgtgagtattctaccagtgagaaaaaacacataattttcaaggtaatcattgttaaaccaacagcaaacttctttcttatcagcaccataaagtccagaagacagtagaaaagtatcttcaaagtgctgaggaaaataagtatcaacttagaattttatgtacaatattggaggcaaaataaagacatgtttagacatacaaaactaagagagttgaattattaaaggttatattccaaggacaaaaaagaggatctgcccaaggtgaaggtatggcatacaagaaacaatggtcaacagagaaataaaatatatggatgaatatatgg

SEQ ID NO: 1848 - protein, 117 aa, Homo sapiens
MSTMFADTLLIVFISVCTALLAEGITWVLVYRTDKYKRLKAEVEKQSKKLEKKKETITESAGRQQKKKIERQEEKLKNNNRDLSMVRMKSMFAIGFCFTALMGMFNSMTVSSKSAGR

SEQ ID NO: 1849 - DNA, 2091 bp, Homo sapiens
acgagcctttccggtgctatgccccggaagcggaagtgcgatcttcgggctgtcagagttggtctgttactcggtggtggcggagtctacggaagccgttttcgcttcacttttcctggctgtagagcgctttccccctggcgggtgagagtgcagagacgaaggtgcgagatgagcactatgttcgcggacactctcctcatcgtttttatctctgtgtgcacggctctgctcgcagagggcataacctgggtcctggtttacaggacagacaagtacaagagactgaaggcagaagtggaaaaacagagtaaaaaattggaaaagaagaaggaaacaataacagagtcagctggtcgacaacagaaaaagaaaatagagagacaagaagagaaactgaagaataacaacagagatctatcaatggttcgaatgaaatccatgtttgctattggcttttgttttactgccctaatgggaatgttcaattccatatttgatggtagagtggtggcaaagcttccttttacccctctttcttacatccaaggactgtctcatcgaaatctgctgggagatgacaccacagactgttccttcattttcctgtatattctctgtactatgtcgattcgacagaacattcagaagattctcggccttgccccttcacgagccgccaccaagcaggcaggtggatttcttggcccaccacctccttctgggaagttctcttgaactcaagaactctttattttctatcattctttctagacacacacacatcagactggcaactgttttgtagcaagagccataggtagccttactacttgggcctctttctagttttgaattatttctaagccttttgggtatgattagagtgaaaatggcagccagcaaacttgatagtgcttttggtcctagatgatttttatcaaataagtggattgattagttaagttcaggtaatgtttatgtaatgaaaaacaaatagcatccttcttgtttcatttacataagtattttctgtgggaccgactctcaaggcactgtgtatgccctgcaagttggctgtctatgagcatttagagatttagaagaaaaatttagtttgtttaacccttgtaactgtttgttttgttgttgtttttttttcaagccaaatacatgacataagatcaataaagaggccaaatttttagctgttttatgtacaaggagagatctgtttcattttgttttgccgtatttctagatataagttttagcatgggccaggaaggactaaaataaaagtttttaaggtactgtactttttgccatacttgactcatatactcaaaatacagagttgtcttggtgtaggaattggaaagcaagagtggaaaggaacgtaataactcgttggagtttaaaaatgagggtcttggcaagtaacactgatgtctgaaaaaaaattaaatataaataaataaataaaaatgagggtcctcagctgttctcttcatatcctattacagtctctcagattcttgtgggggcactcttagatctcccttggagacaaggttatagttatatgttgttaatctcgcagagcttccttttagtcacaatagccttcattttctgccatgccccttcataagggagaaggatgtttgtaccatgatcctccccgcataatctatggaattaggagtcctgtgtggagtcttatcaataaatatgcacattcatcaaatgtctacttaaatgtgagtattctaccagtgagaaaaaacacataattttcaaggtaatcattgttaaaccaacagcaaacttctttcttatcagcaccataaagtccagaagacagtagaaaagtatcttcaaagtgctgaggaaaataagtatcaacttagaattttatgtacaatattggaggcaaaataaagacatgtttagacatacaaaactaagagagttgaattattaaaggttatattccaaggacaaaaaagaggatctgcccaaggtgaaggtatggcatacaagaaacaatggtcaacagagaaataaaatatatggatgaatatatgg

SEQ ID NO: 1850 - protein, 239 aa, Homo sapiens
MPRKRKCDLRAVRVGLLLGGGGVYGSRFRFTFPGCRALSPWRVRVQRRRCEMSTMFADTLLIVFISVCTALLAEGITWVLVYRTDKYKRLKAEVEKQSKKLEKKKETITESAGRQQKKKIERQEEKLKNNNRDLSMVRMKSMFAIGFCFTALMGMFNSIFDGRVVAKLPFTPLSYIQGLSHRNLLGDDTTDCSFIFLYILCTMSIRQNIQKILGLAPSRAATKQAGGFLGPPPPSGKFS

SEQ ID NO: 1851 - DNA, 2371 bp, Homo sapiens
gctttccgcagccgccgctgggcgctgccggggctgaggccgctgtcgctcgcctgcgagccgctcggagcccggtgacggggctgggtttcccgaaggagccaagagccttcctttgcccgcagcggctggtccggtttacatcccaggcagaggtcagcgtgatgctgctgctccaatccgggcgggcagcgcgctgctattcgccgaggcggaggcggcgaggcgtctggccccagcctccgcccctcccgggccccgccgccgcccgaggtctctgcgaaagggtctcactctatccaataggctggaatgcagtagcatgatcaccacttactgacgctttgacctcccagtctcaagcaatcctcccacttcagcctttcgagtagctgagactacagagtcttgctttgtcaccaggctggaatgcagtggcgcaatcttggctcactacaacctccacctcccggtttcaagcgattcttgtgcctcagcctcctgagtagctgggattacaggcataacctgggtcctggtttacaggacagacaagtacaagagactgaaggcagaagtggaaaaacagagtaaaaaattggaaaagaagaaggaaacaataacagagtcagctggtcgacaacagaaaaagaaaatagagagacaagaagagaaactgaagaataacaacagagatctatcaatggttcgaatgaaatccatgtttgctattggcttttgttttactgccctaatgggaatgttcaattccatatttgatggtagagtggtggcaaagcttccttttacccctctttcttacatccaaggactgtctcatcgaaatctgctgggagatgacaccacagactgttccttcattttcctgtatattctctgtactatgtcgattcgacagaacattcagaagattctcggccttgccccttcacgagccgccaccaagcaggcaggtggatttcttggcccaccacctccttctgggaagttctcttgaactcaagaactctttattttctatcattctttctagacacacacacatcagactggcaactgttttgtagcaagagccataggtagccttactacttgggcctctttctagttttgaattatttctaagccttttgggtatgattagagtgaaaatggcagccagcaaacttgatagtgcttttggtcctagatgatttttatcaaataagtggattgattagttaagttcaggtaatgtttatgtaatgaaaaacaaatagcatccttcttgtttcatttacataagtattttctgtgggaccgactctcaaggcactgtgtatgccctgcaagttggctgtctatgagcatttagagatttagaagaaaaatttagtttgtttaacccttgtaactgtttgttttgttgttgtttttttttcaagccaaatacatgacataagatcaataaagaggccaaatttttagctgttttatgtacaaggagagatctgtttcattttgttttgccgtatttctagatataagttttagcatgggccaggaaggactaaaataaaagtttttaaggtactgtactttttgccatacttgactcatatactcaaaatacagagttgtcttggtgtaggaattggaaagcaagagtggaaaggaacgtaataactcgttggagtttaaaaatgagggtcttggcaagtaacactgatgtctgaaaaaaaattaaatataaataaataaataaaaatgagggtcctcagctgttctcttcatatcctattacagtctctcagattcttgtgggggcactcttagatctcccttggagacaaggttatagttatatgttgttaatctcgcagagcttccttttagtcacaatagccttcattttctgccatgccccttcataagggagaaggatgtttgtaccatgatcctccccgcataatctatggaattaggagtcctgtgtggagtcttatcaataaatatgcacattcatcaaatgtctacttaaatgtgagtattctaccagtgagaaaaaacacataattttcaaggtaatcattgttaaaccaacagcaaacttctttcttatcagcaccataaagtccagaagacagtagaaaagtatcttcaaagtgctgaggaaaataagtatcaacttagaattttatgtacaatattggaggcaaaataaagacatgtttagacatacaaaactaagagagttgaattattaaaggttatattccaaggacaaaaaagaggatctgcccaaggtgaaggtatggcatacaagaaacaatggtcaacagagaaataaaatatatggatgaatatatgg

SEQ ID NO: 1852 - protein, 104 aa, Homo sapiens; identical to SEQ ID NO: 1844

SEQ ID NO: 1853 - DNA, 2242 bp, Homo sapiens
gctttccgcagccgccgctgggcgctgccggggctgaggccgctgtcgctcgcctgcgagccgctcggagcccggtgacggggctgggtttcccgaaggagccaagagccttcctttgcccgcagcggctggtccggtttacatcccaggcagaggtcagcgtgatgctgctgctccaatccgggcgggcagcgcgctgctattcgccgaggcggaggcggcgaggcgtctggccccagcctccgcccctcccgggccccgccgccgcccgaggtctctgcgaaagggtctcactctatccaataggctggaatgcagtagcatgatcaccacttactgacgctttgacctcccagtctcaagcaatcctcccacttcagcctttcgagtagctgagactacagagtcttgctttgtcaccaggctggaatgcagtggcgcaatcttggctcactacaacctccacctcccggtttcaagcgattcttgtgcctcagcctcctgagtagctgggattacaggcataacctgggtcctggtttacaggacagacaagtacaagagactgaaggcagaagtggaaaaacagagtaaaaaattggaaaagaagaaggaaacaataacagagtcagctggtcgacaacagaaaaagaaaatagagagacaagaagagaaactgaagaataacaacagagatctatcaatggttcgaatgaaatccatgtttgctattggcttttgttttactgccctaatgggaatgttcaattccatatttgatggtagagtggtggcaaagcttccttttacccctctttcttacatccaaggactgtctcatcgaaatctgctgggagatgacaccacagactgttccttcattttcctgtatattctctgtactatgtcgattcgacagaacattcagaagattctcggccttgccccttcacgagccgccaccaagcaggcaggtggatttcttggcccaccacctccttctgggaagttctcttgaactcaagaactctttattttctatcattctttctagacacacacacatcagactggcaactgttttgtagcaagagccataggtagccttactacttgggcctctttctagttttgaattatttctaagccttttgggtatgattagagtgaaaatggcagccagcaaacttgatagtgcttttggtcctagatgatttttatcaaataagtggattgattagttaagttcaggtaatgtttatgtaatgaaaaacaaatagcatccttcttgtttcatttacataagtattttctgtgggaccgactctcaaggcactgtgtatgccctgcaagttggctgtctatgagcatttagagatttagaagaaaaatttagtttgtttaacccttgtaactgtttgttttgttgttgtttttttttcaagccaaatacatgacataagatcaataaagaggccaaatttttagctgttttatgtacaaggagagatctgtttcattttgttttgccgtatttctagatataagttttagcatgggccaggaaggactaaaataaaagtttttaaggtactgtactttttgccatacttgactcatatactcaaaatacagagttgtcttggtgtaggaattggaaagcaagagtggaaaggaacgtaataactcgttggagtttaaaaatgagggtcttggcaagtaacactgatgtctgaaaaaaaattaaatataaataaataaataaaaatgagggtcctcagctgttctcttcatatcctattacagtctctcagattcttgtgggggcactcttagatctcccttggagacaaggttatagttatatgttgttaatctcgcagagcttccttttagtcacaatagccttcattttctgccatgccccttcataagggagaaggatgtttgtaccatgatcctccccgcataatctatggaattaggagtcctgtgtggagtcttatcaataaatatgcacattcatcaaatgtctacttaaatgtgagtattctaccagtgagaaaaaacacataattttcaaggtaatcattgttaaaccaacagcaaacttctttcttatcagcaccataaagtccagaagacagtagaaaagtatcttcaaagtgctgaggaaaataagtatcaacttagaattttatgtacaatattggaggcaaaataaagacatgtttagacatac

SEQ ID NO: 1854 - protein, 104 aa, Homo sapiens; identical to SEQ ID NO: 1844

SEQ ID NO: 1855 - DNA, 1860 bp, Homo sapiens
ggaagcggaagtgcgatcttcgggctgtcagagttggtctgttactcggtggtggcggagtctacggaagccgttttcgcttcacttttcctggctgtagagcgctttccccctggcgggtgagagtgcagagacgaaggcataacctgggtcctggtttacaggacagacaagtacaagagactgaaggcagaagtggaaaaacagagtaaaaaattggaaaagaagaaggaaacaataacagagtcagctggtcgacaacagaaaaagaaaatagagagacaagaagagaaactgaagaataacaacagagatctatcaatggttcgaatgaaatccatgtttgctattggcttttgttttactgccctaatgggaatgttcaattccatatttgatggtagagtggtggcaaagcttccttttacccctctttcttacatccaaggactgtctcatcgaaatctgctgggagatgacaccacagactgttccttcattttcctgtatattctctgtactatgtcgattcgacagaacattcagaagattctcggccttgccccttcacgagccgccaccaagcaggcaggtggatttcttggcccaccacctccttctgggaagttctcttgaactcaagaactctttattttctatcattctttctagacacacacacatcagactggcaactgttttgtagcaagagccataggtagccttactacttgggcctctttctagttttgaattatttctaagccttttgggtatgattagagtgaaaatggcagccagcaaacttgatagtgcttttggtcctagatgatttttatcaaataagtggattgattagttaagttcaggtaatgtttatgtaatgaaaaacaaatagcatccttcttgtttcatttacataagtattttctgtgggaccgactctcaaggcactgtgtatgccctgcaagttggctgtctatgagcatttagagatttagaagaaaaatttagtttgtttaacccttgtaactgtttgttttgttgttgtttttttttcaagccaaatacatgacataagatcaataaagaggccaaatttttagctgttttatgtacaaggagagatctgtttcattttgttttgccgtatttctagatataagttttagcatgggccaggaaggactaaaataaaagtttttaaggtactgtactttttgccatacttgactcatatactcaaaatacagagttgtcttggtgtaggaattggaaagcaagagtggaaaggaacgtaataactcgttggagtttaaaaatgagggtcttggcaagtaacactgatgtctgaaaaaaaattaaatataaataaataaataaaaatgagggtcctcagctgttctcttcatatcctattacagtctctcagattcttgtgggggcactcttagatctcccttggagacaaggttatagttatatgttgttaatctcgcagagcttccttttagtcacaatagccttcattttctgccatgccccttcataagggagaaggatgtttgtaccatgatcctccccgcataatctatggaattaggagtcctgtgtggagtcttatcaataaatatgcacattcatcaaatgtctacttaaatgtgagtattctaccagtgagaaaaaacacataattttcaaggtaatcattgttaaaccaacagcaaacttctttcttatcagcaccataaagtccagaagacagtagaaaagtatcttcaaagtgctgaggaaaataagtatcaacttagaattttatgtacaatattggaggcaaaataaagacatgtttagacatac

SEQ ID NO: 1856 - protein, 104 aa, Homo sapiens; identical to SEQ ID NO: 1844

SEQ ID NO: 1857 - DNA, 2137 bp, Homo sapiens
ggaagcggaagtgcgatcttcgggctgtcagagttggtctgttactcggtggtggcggagtctacggaagccgttttcgcttcacttttcctggctgtagagcgctttccccctggcgggtgagagtgcagagacgaaggtgcgagatgagcactatgttcgcggacactctcctcatcgtttttatctctgtgtgcacggctctgctcgcagagggtgagagcgggtatttctcagacgtttgatcagtccccgggaggaagggccccggggtcccctgtgccaccaggggaaagatcgcgagccttacttgcttgagaggctcatctactccacttcagggaatctctgggcaactcgtgaacaggagcaggaggggagtatggagtcgattgccgagttttctttggtctcaggcataacctgggtcctggtttacaggacagacaagtacaagagactgaaggcagaagtggaaaaacagagtaaaaaattggaaaagaagaaggaaacaataacagagtcagctggtcgacaacagaaaaagaaaatagagagacaagaagagaaactgaagaataacaacagagatctatcaatggttcgaatgaaatccatgtttgctattggcttttgttttactgccctaatgggaatgttcaattccatatttgatggtagagtggtggcaaagcttccttttacccctctttcttacatccaaggactgtctcatcgaaatctgctgggagatgacaccacagactgttccttcattttcctgtatattctctgtactatgtcgattcgacagaacattcagaagattctcggccttgccccttcacgagccgccaccaagcaggcaggtggatttcttggcccaccacctccttctgggaagttctcttgaactcaagaactctttattttctatcattctttctagacacacacacatcagactggcaactgttttgtagcaagagccataggtagccttactacttgggcctctttctagttttgaattatttctaagccttttgggtatgattagagtgaaaatggcagccagcaaacttgatagtgcttttggtcctagatgatttttatcaaataagtggattgattagttaagttcaggtaatgtttatgtaatgaaaaacaaatagcatccttcttgtttcatttacataagtattttctgtgggaccgactctcaaggcactgtgtatgccctgcaagttggctgtctatgagcatttagagatttagaagaaaaatttagtttgtttaacccttgtaactgtttgttttgttgttgtttttttttcaagccaaatacatgacataagatcaataaagaggccaaatttttagctgttttatgtacaaggagagatctgtttcattttgttttgccgtatttctagatataagttttagcatgggccaggaaggactaaaataaaagtttttaaggtactgtactttttgccatacttgactcatatactcaaaatacagagttgtcttggtgtaggaattggaaagcaagagtggaaaggaacgtaataactcgttggagtttaaaaatgagggtcttggcaagtaacactgatgtctgaaaaaaaattaaatataaataaataaataaaaatgagggtcctcagctgttctcttcatatcctattacagtctctcagattcttgtgggggcactcttagatctcccttggagacaaggttatagttatatgttgttaatctcgcagagcttccttttagtcacaatagccttcattttctgccatgccccttcataagggagaaggatgtttgtaccatgatcctccccgcataatctatggaattaggagtcctgtgtggagtcttatcaataaatatgcacattcatcaaatgtctacttaaatgtgagtattctaccagtgagaaaaaacacataattttcaaggtaatcattgttaaaccaacagcaaacttctttcttatcagcaccataaagtccagaagacagtagaaaagtatcttcaaagtgctgaggaaaataagtatcaacttagaattttatgtacaatattggaggcaaaataaagacatgtttagacatac

SEQ ID NO: 1858 - protein, 176 aa, Homo sapiens; identical to SEQ ID NO: 1846

SEQ ID NO: 1859 - DNA, 1881 bp, Homo sapiens
ggaagcggaagtgcgatcttcgggctgtcagagttggtctgttactcggtggtggcggagtctacggaagccgttttcgcttcacttttcctggctgtagagcgctttccccctggcgggtgagagtgcagagacgaaggtgcgagatgagcactatgttcgcggacactctcctcatcgtttttatctctgtgtgcacggctctgctcgcagagggcataacctgggtcctggtttacaggacagacaagtacaagagactgaaggcagaagtggaaaaacagagtaaaaaattggaaaagaagaaggaaacaataacagagtcagctggtcgacaacagaaaaagaaaatagagagacaagaagagaaactgaagaataacaacagagatctatcaatggttcgaatgaaatccatgtttgctattggcttttgttttactgccctaatgggaatgttcaattccatgactgtctcatcgaaatctgctgggagatgacaccacagactgttccttcattttcctgtatattctctgtactatgtcgattcgacagaacattcagaagattctcggccttgccccttcacgagccgccaccaagcaggcaggtggatttcttggcccaccacctccttctgggaagttctcttgaactcaagaactctttattttctatcattctttctagacacacacacatcagactggcaactgttttgtagcaagagccataggtagccttactacttgggcctctttctagttttgaattatttctaagccttttgggtatgattagagtgaaaatggcagccagcaaacttgatagtgcttttggtcctagatgatttttatcaaataagtggattgattagttaagttcaggtaatgtttatgtaatgaaaaacaaatagcatccttcttgtttcatttacataagtattttctgtgggaccgactctcaaggcactgtgtatgccctgcaagttggctgtctatgagcatttagagatttagaagaaaaatttagtttgtttaacccttgtaactgtttgttttgttgttgtttttttttcaagccaaatacatgacataagatcaataaagaggccaaatttttagctgttttatgtacaaggagagatctgtttcattttgttttgccgtatttctagatataagttttagcatgggccaggaaggactaaaataaaagtttttaaggtactgtactttttgccatacttgactcatatactcaaaatacagagttgtcttggtgtaggaattggaaagcaagagtggaaaggaacgtaataactcgttggagtttaaaaatgagggtcttggcaagtaacactgatgtctgaaaaaaaattaaatataaataaataaataaaaatgagggtcctcagctgttctcttcatatcctattacagtctctcagattcttgtgggggcactcttagatctcccttggagacaaggttatagttatatgttgttaatctcgcagagcttccttttagtcacaatagccttcattttctgccatgccccttcataagggagaaggatgtttgtaccatgatcctccccgcataatctatggaattaggagtcctgtgtggagtcttatcaataaatatgcacattcatcaaatgtctacttaaatgtgagtattctaccagtgagaaaaaacacataattttcaaggtaatcattgttaaaccaacagcaaacttctttcttatcagcaccataaagtccagaagacagtagaaaagtatcttcaaagtgctgaggaaaataagtatcaacttagaattttatgtacaatattggaggcaaaataaagacatgtttagacatac

SEQ ID NO: 1860 - protein, 117 aa, Homo sapiens; identical to SEQ ID NO: 1848

SEQ ID NO: 1861 - DNA, 1962 bp, Homo sapiens
acgagcctttccggtgctatgccccggaagcggaagtgcgatcttcgggctgtcagagttggtctgttactcggtggtggcggagtctacggaagccgttttcgcttcacttttcctggctgtagagcgctttccccctggcgggtgagagtgcagagacgaaggtgcgagatgagcactatgttcgcggacactctcctcatcgtttttatctctgtgtgcacggctctgctcgcagagggcataacctgggtcctggtttacaggacagacaagtacaagagactgaaggcagaagtggaaaaacagagtaaaaaattggaaaagaagaaggaaacaataacagagtcagctggtcgacaacagaaaaagaaaatagagagacaagaagagaaactgaagaataacaacagagatctatcaatggttcgaatgaaatccatgtttgctattggcttttgttttactgccctaatgggaatgttcaattccatatttgatggtagagtggtggcaaagcttccttttacccctctttcttacatccaaggactgtctcatcgaaatctgctgggagatgacaccacagactgttccttcattttcctgtatattctctgtactatgtcgattcgacagaacattcagaagattctcggccttgccccttcacgagccgccaccaagcaggcaggtggatttcttggcccaccacctccttctgggaagttctcttgaactcaagaactctttattttctatcattctttctagacacacacacatcagactggcaactgttttgtagcaagagccataggtagccttactacttgggcctctttctagttttgaattatttctaagccttttgggtatgattagagtgaaaatggcagccagcaaacttgatagtgcttttggtcctagatgatttttatcaaataagtggattgattagttaagttcaggtaatgtttatgtaatgaaaaacaaatagcatccttcttgtttcatttacataagtattttctgtgggaccgactctcaaggcactgtgtatgccctgcaagttggctgtctatgagcatttagagatttagaagaaaaatttagtttgtttaacccttgtaactgtttgttttgttgttgtttttttttcaagccaaatacatgacataagatcaataaagaggccaaatttttagctgttttatgtacaaggagagatctgtttcattttgttttgccgtatttctagatataagttttagcatgggccaggaaggactaaaataaaagtttttaaggtactgtactttttgccatacttgactcatatactcaaaatacagagttgtcttggtgtaggaattggaaagcaagagtggaaaggaacgtaataactcgttggagtttaaaaatgagggtcttggcaagtaacactgatgtctgaaaaaaaattaaatataaataaataaataaaaatgagggtcctcagctgttctcttcatatcctattacagtctctcagattcttgtgggggcactcttagatctcccttggagacaaggttatagttatatgttgttaatctcgcagagcttccttttagtcacaatagccttcattttctgccatgccccttcataagggagaaggatgtttgtaccatgatcctccccgcataatctatggaattaggagtcctgtgtggagtcttatcaataaatatgcacattcatcaaatgtctacttaaatgtgagtattctaccagtgagaaaaaacacataattttcaaggtaatcattgttaaaccaacagcaaacttctttcttatcagcaccataaagtccagaagacagtagaaaagtatcttcaaagtgctgaggaaaataagtatcaacttagaattttatgtacaatattggaggcaaaataaagacatgtttagacatac

SEQ ID NO: 1862 - protein, 239 aa, Homo sapiens; identical to SEQ ID NO: 1850

SEQ ID NO: 1863 - DNA, 1645 bp, Homo sapiens
ggaagcggaagtgcgatcttcgggctgtcagagttggtctgttactcggtggtggcggagtctacggaagccgttttcgcttcacttttcctggctgtagagcgctttccccctggcgggtgagagtgcagagacgaaggcataacctgggtcctggtttacaggacagacaagtacaagagactgaaggcagaagtggaaaaacagagtaaaaaattggaaaagaagaaggaaacaataacagagtcagctggtcgacaacagaaaaagaaaatagagagacaagaagagaaactgaagaataacaacagagatctatcaatggttcgaatgaaatccatgtttgctattggcttttgttttactgccctaatgggaatgttcaattccatatttgatggtagagtggtggcaaagcttccttttacccctctttcttacatccaaggactgtctcatcgaaatctgctgggagatgacaccacagactgttccttcattttcctgtatattctctgtactatgtcgattcgacagaacattcagaagattctcggccttgccccttcacgagccgccaccaagcaggcaggtggatttcttggcccaccacctccttctgggaagttctcttgaactcaagaactctttattttctatcattctttctagacacacacacatcagactggcaactgttttgtagcaagagccataggtagccttactacttgggcctctttctagttttgaattatttctaagccttttgggtatgattagagtgaaaatggcagccagcaaacttgatagtgcttttggtcctagatgatttttatcaaataagtggattgattagttaagttcaggtaatgtttatgtaatgaaaaacaaatagcatccttcttgtttcatttacataagtattttctgtgggaccgactctcaaggcactgtgtatgccctgcaagttggctgtctatgagcatttagagatttagaagaaaaatttagtttgtttaacccttgtaactgtttgttttgttgttgtttttttttcaagccaaatacatgacataagatcaataaagaggccaaatttttagctgttttatgtacaaggagagatctgtttcattttgttttgccgtatttctagatataagttttagcatgggccaggaaggactaaaataaaagtttttaaggtactgtactttttgccatacttgactcatatactcaaaatacagagttgtcttggtgtaggaattggaaagcaagagtggaaaggaacgtaataactcgttggagtttaaaaatgagggtcttggcaagtaacactgatgtctgaaaaaaaattaaatataaataaataaataaaaatgagggtcctcagctgttctcttcatatcctattacagtctctcagattcttgtgggggcactcttagatctcccttggagacaaggttatagttatatgttgttaatctcgcagagcttccttttagtcacaatagccttcattttctgccatgccccttcataagggagaaggatgtttgtaccatgatcctccccgcataatctatggaattaggagtcctgtgtggagtcttatcaataaatatgcacattcatc

SEQ ID NO: 1864 - protein, 104 aa, Homo sapiens; identical to SEQ ID NO: 1844

SEQ ID NO: 1865 - DNA, 1922 bp, Homo sapiens
ggaagcggaagtgcgatcttcgggctgtcagagttggtctgttactcggtggtggcggagtctacggaagccgttttcgcttcacttttcctggctgtagagcgctttccccctggcgggtgagagtgcagagacgaaggtgcgagatgagcactatgttcgcggacactctcctcatcgtttttatctctgtgtgcacggctctgctcgcagagggtgagagcgggtatttctcagacgtttgatcagtccccgggaggaagggccccggggtcccctgtgccaccaggggaaagatcgcgagccttacttgcttgagaggctcatctactccacttcagggaatctctgggcaactcgtgaacaggagcaggaggggagtatggagtcgattgccgagttttctttggtctcaggcataacctgggtcctggtttacaggacagacaagtacaagagactgaaggcagaagtggaaaaacagagtaaaaaattggaaaagaagaaggaaacaataacagagtcagctggtcgacaacagaaaaagaaaatagagagacaagaagagaaactgaagaataacaacagagatctatcaatggttcgaatgaaatccatgtttgctattggcttttgttttactgccctaatgggaatgttcaattccatatttgatggtagagtggtggcaaagcttccttttacccctctttcttacatccaaggactgtctcatcgaaatctgctgggagatgacaccacagactgttccttcattttcctgtatattctctgtactatgtcgattcgacagaacattcagaagattctcggccttgccccttcacgagccgccaccaagcaggcaggtggatttcttggcccaccacctccttctgggaagttctcttgaactcaagaactctttattttctatcattctttctagacacacacacatcagactggcaactgttttgtagcaagagccataggtagccttactacttgggcctctttctagttttgaattatttctaagccttttgggtatgattagagtgaaaatggcagccagcaaacttgatagtgcttttggtcctagatgatttttatcaaataagtggattgattagttaagttcaggtaatgtttatgtaatgaaaaacaaatagcatccttcttgtttcatttacataagtattttctgtgggaccgactctcaaggcactgtgtatgccctgcaagttggctgtctatgagcatttagagatttagaagaaaaatttagtttgtttaacccttgtaactgtttgttttgttgttgtttttttttcaagccaaatacatgacataagatcaataaagaggccaaatttttagctgttttatgtacaaggagagatctgtttcattttgttttgccgtatttctagatataagttttagcatgggccaggaaggactaaaataaaagtttttaaggtactgtactttttgccatacttgactcatatactcaaaatacagagttgtcttggtgtaggaattggaaagcaagagtggaaaggaacgtaataactcgttggagtttaaaaatgagggtcttggcaagtaacactgatgtctgaaaaaaaattaaatataaataaataaataaaaatgagggtcctcagctgttctcttcatatcctattacagtctctcagattcttgtgggggcactcttagatctcccttggagacaaggttatagttatatgttgttaatctcgcagagcttccttttagtcacaatagccttcattttctgccatgccccttcataagggagaaggatgtttgtaccatgatcctccccgcataatctatggaattaggagtcctgtgtggagtcttatcaataaatatgcacattcatc

SEQ ID NO: 1866 - protein, 176 aa, Homo sapiens; identical to SEQ ID NO: 1846

SEQ ID NO: 1867 - DNA, 1666 bp, Homo sapiens
ggaagcggaagtgcgatcttcgggctgtcagagttggtctgttactcggtggtggcggagtctacggaagccgttttcgcttcacttttcctggctgtagagcgctttccccctggcgggtgagagtgcagagacgaaggtgcgagatgagcactatgttcgcggacactctcctcatcgtttttatctctgtgtgcacggctctgctcgcagagggcataacctgggtcctggtttacaggacagacaagtacaagagactgaaggcagaagtggaaaaacagagtaaaaaattggaaaagaagaaggaaacaataacagagtcagctggtcgacaacagaaaaagaaaatagagagacaagaagagaaactgaagaataacaacagagatctatcaatggttcgaatgaaatccatgtttgctattggcttttgttttactgccctaatgggaatgttcaattccatgactgtctcatcgaaatctgctgggagatgacaccacagactgttccttcattttcctgtatattctctgtactatgtcgattcgacagaacattcagaagattctcggccttgccccttcacgagccgccaccaagcaggcaggtggatttcttggcccaccacctccttctgggaagttctcttgaactcaagaactctttattttctatcattctttctagacacacacacatcagactggcaactgttttgtagcaagagccataggtagccttactacttgggcctctttctagttttgaattatttctaagccttttgggtatgattagagtgaaaatggcagccagcaaacttgatagtgcttttggtcctagatgatttttatcaaataagtggattgattagttaagttcaggtaatgtttatgtaatgaaaaacaaatagcatccttcttgtttcatttacataagtattttctgtgggaccgactctcaaggcactgtgtatgccctgcaagttggctgtctatgagcatttagagatttagaagaaaaatttagtttgtttaacccttgtaactgtttgttttgttgttgtttttttttcaagccaaatacatgacataagatcaataaagaggccaaatttttagctgttttatgtacaaggagagatctgtttcattttgttttgccgtatttctagatataagttttagcatgggccaggaaggactaaaataaaagtttttaaggtactgtactttttgccatacttgactcatatactcaaaatacagagttgtcttggtgtaggaattggaaagcaagagtggaaaggaacgtaataactcgttggagtttaaaaatgagggtcttggcaagtaacactgatgtctgaaaaaaaattaaatataaataaataaataaaaatgagggtcctcagctgttctcttcatatcctattacagtctctcagattcttgtgggggcactcttagatctcccttggagacaaggttatagttatatgttgttaatctcgcagagcttccttttagtcacaatagccttcattttctgccatgccccttcataagggagaaggatgtttgtaccatgatcctccccgcataatctatggaattaggagtcctgtgtggagtcttatcaataaatatgcacattcatc

SEQ ID NO: 1868 - protein, 117 aa, Homo sapiens; identical to SEQ ID NO: 1848

SEQ ID NO: 1869 - DNA, 1747 bp, Homo sapiens
acgagcctttccggtgctatgccccggaagcggaagtgcgatcttcgggctgtcagagttggtctgttactcggtggtggcggagtctacggaagccgttttcgcttcacttttcctggctgtagagcgctttccccctggcgggtgagagtgcagagacgaaggtgcgagatgagcactatgttcgcggacactctcctcatcgtttttatctctgtgtgcacggctctgctcgcagagggcataacctgggtcctggtttacaggacagacaagtacaagagactgaaggcagaagtggaaaaacagagtaaaaaattggaaaagaagaaggaaacaataacagagtcagctggtcgacaacagaaaaagaaaatagagagacaagaagagaaactgaagaataacaacagagatctatcaatggttcgaatgaaatccatgtttgctattggcttttgttttactgccctaatgggaatgttcaattccatatttgatggtagagtggtggcaaagcttccttttacccctctttcttacatccaaggactgtctcatcgaaatctgctgggagatgacaccacagactgttccttcattttcctgtatattctctgtactatgtcgattcgacagaacattcagaagattctcggccttgccccttcacgagccgccaccaagcaggcaggtggatttcttggcccaccacctccttctgggaagttctcttgaactcaagaactctttattttctatcattctttctagacacacacacatcagactggcaactgttttgtagcaagagccataggtagccttactacttgggcctctttctagttttgaattatttctaagccttttgggtatgattagagtgaaaatggcagccagcaaacttgatagtgcttttggtcctagatgatttttatcaaataagtggattgattagttaagttcaggtaatgtttatgtaatgaaaaacaaatagcatccttcttgtttcatttacataagtattttctgtgggaccgactctcaaggcactgtgtatgccctgcaagttggctgtctatgagcatttagagatttagaagaaaaatttagtttgtttaacccttgtaactgtttgttttgttgttgtttttttttcaagccaaatacatgacataagatcaataaagaggccaaatttttagctgttttatgtacaaggagagatctgtttcattttgttttgccgtatttctagatataagttttagcatgggccaggaaggactaaaataaaagtttttaaggtactgtactttttgccatacttgactcatatactcaaaatacagagttgtcttggtgtaggaattggaaagcaagagtggaaaggaacgtaataactcgttggagtttaaaaatgagggtcttggcaagtaacactgatgtctgaaaaaaaattaaatataaataaataaataaaaatgagggtcctcagctgttctcttcatatcctattacagtctctcagattcttgtgggggcactcttagatctcccttggagacaaggttatagttatatgttgttaatctcgcagagcttccttttagtcacaatagccttcattttctgccatgccccttcataagggagaaggatgtttgtaccatgatcctccccgcataatctatggaattaggagtcctgtgtggagtcttatcaataaatatgcacattcatc

SEQ ID NO: 1870 - protein, 239 aa, Homo sapiens; identical to SEQ ID NO: 1850

SEQ ID NO: 1871 - DNA, 2027 bp, Homo sapiens
gctttccgcagccgccgctgggcgctgccggggctgaggccgctgtcgctcgcctgcgagccgctcggagcccggtgacggggctgggtttcccgaaggagccaagagccttcctttgcccgcagcggctggtccggtttacatcccaggcagaggtcagcgtgatgctgctgctccaatccgggcgggcagcgcgctgctattcgccgaggcggaggcggcgaggcgtctggccccagcctccgcccctcccgggccccgccgccgcccgaggtctctgcgaaagggtctcactctatccaataggctggaatgcagtagcatgatcaccacttactgacgctttgacctcccagtctcaagcaatcctcccacttcagcctttcgagtagctgagactacagagtcttgctttgtcaccaggctggaatgcagtggcgcaatcttggctcactacaacctccacctcccggtttcaagcgattcttgtgcctcagcctcctgagtagctgggattacaggcataacctgggtcctggtttacaggacagacaagtacaagagactgaaggcagaagtggaaaaacagagtaaaaaattggaaaagaagaaggaaacaataacagagtcagctggtcgacaacagaaaaagaaaatagagagacaagaagagaaactgaagaataacaacagagatctatcaatggttcgaatgaaatccatgtttgctattggcttttgttttactgccctaatgggaatgttcaattccatatttgatggtagagtggtggcaaagcttccttttacccctctttcttacatccaaggactgtctcatcgaaatctgctgggagatgacaccacagactgttccttcattttcctgtatattctctgtactatgtcgattcgacagaacattcagaagattctcggccttgccccttcacgagccgccaccaagcaggcaggtggatttcttggcccaccacctccttctgggaagttctcttgaactcaagaactctttattttctatcattctttctagacacacacacatcagactggcaactgttttgtagcaagagccataggtagccttactacttgggcctctttctagttttgaattatttctaagccttttgggtatgattagagtgaaaatggcagccagcaaacttgatagtgcttttggtcctagatgatttttatcaaataagtggattgattagttaagttcaggtaatgtttatgtaatgaaaaacaaatagcatccttcttgtttcatttacataagtattttctgtgggaccgactctcaaggcactgtgtatgccctgcaagttggctgtctatgagcatttagagatttagaagaaaaatttagtttgtttaacccttgtaactgtttgttttgttgttgtttttttttcaagccaaatacatgacataagatcaataaagaggccaaatttttagctgttttatgtacaaggagagatctgtttcattttgttttgccgtatttctagatataagttttagcatgggccaggaaggactaaaataaaagtttttaaggtactgtactttttgccatacttgactcatatactcaaaatacagagttgtcttggtgtaggaattggaaagcaagagtggaaaggaacgtaataactcgttggagtttaaaaatgagggtcttggcaagtaacactgatgtctgaaaaaaaattaaatataaataaataaataaaaatgagggtcctcagctgttctcttcatatcctattacagtctctcagattcttgtgggggcactcttagatctcccttggagacaaggttatagttatatgttgttaatctcgcagagcttccttttagtcacaatagccttcattttctgccatgccccttcataagggagaaggatgtttgtaccatgatcctccccgcataatctatggaattaggagtcctgtgtggagtcttatcaataaatatgcacattcatc

SEQ ID NO: 1872 - protein, 104 aa, Homo sapiens; identical to SEQ ID NO: 1844

SEQ ID NO: 1873 - DNA, 1410 bp, Homo sapiens
ggaagcggaagtgcgatcttcgggctgtcagagttggtctgttactcggtggtggcggagtctacggaagccgttttcgcttcacttttcctggctgtagagcgctttccccctggcgggtgagagtgcagagacgaaggcataacctgggtcctggtttacaggacagacaagtacaagagactgaaggcagaagtggaaaaacagagtaaaaaattggaaaagaagaaggaaacaataacagagtcagctggtcgacaacagaaaaagaaaatagagagacaagaagagaaactgaagaataacaacagagatctatcaatggttcgaatgaaatccatgtttgctattggcttttgttttactgccctaatgggaatgttcaattccatatttgatggtagagtggtggcaaagcttccttttacccctctttcttacatccaaggactgtctcatcgaaatctgctgggagatgacaccacagactgttccttcattttcctgtatattctctgtactatgtcgattcgacagaacattcagaagattctcggccttgccccttcacgagccgccaccaagcaggcaggtggatttcttggcccaccacctccttctgggaagttctcttgaactcaagaactctttattttctatcattctttctagacacacacacatcagactggcaactgttttgtagcaagagccataggtagccttactacttgggcctctttctagttttgaattatttctaagccttttgggtatgattagagtgaaaatggcagccagcaaacttgatagtgcttttggtcctagatgatttttatcaaataagtggattgattagttaagttcaggtaatgtttatgtaatgaaaaacaaatagcatccttcttgtttcatttacataagtattttctgtgggaccgactctcaaggcactgtgtatgccctgcaagttggctgtctatgagcatttagagatttagaagaaaaatttagtttgtttaacccttgtaactgtttgttttgttgttgtttttttttcaagccaaatacatgacataagatcaataaagaggccaaatttttagctgttttatgtacaaggagagatctgtttcattttgttttgccgtatttctagatataagttttagcatgggccaggaaggactaaaataaaagtttttaaggtactgtactttttgccatacttgactcatatactcaaaatacagagttgtcttggtgtaggaattggaaagcaagagtggaaaggaacgtaataactcgttggagtttaaaaatgagggtcttggcaagtaacactgatgtctgaaaaaaaattaaatataaataaataaataaaaatgagggtcctcagctgttctcttc

SEQ ID NO: 1874 - protein, 104 aa, Homo sapiens; identical to SEQ ID NO: 1844

SEQ ID NO: 1875 - DNA, 1687 bp, Homo sapiens
ggaagcggaagtgcgatcttcgggctgtcagagttggtctgttactcggtggtggcggagtctacggaagccgttttcgcttcacttttcctggctgtagagcgctttccccctggcgggtgagagtgcagagacgaaggtgcgagatgagcactatgttcgcggacactctcctcatcgtttttatctctgtgtgcacggctctgctcgcagagggtgagagcgggtatttctcagacgtttgatcagtccccgggaggaagggccccggggtcccctgtgccaccaggggaaagatcgcgagccttacttgcttgagaggctcatctactccacttcagggaatctctgggcaactcgtgaacaggagcaggaggggagtatggagtcgattgccgagttttctttggtctcaggcataacctgggtcctggtttacaggacagacaagtacaagagactgaaggcagaagtggaaaaacagagtaaaaaattggaaaagaagaaggaaacaataacagagtcagctggtcgacaacagaaaaagaaaatagagagacaagaagagaaactgaagaataacaacagagatctatcaatggttcgaatgaaatccatgtttgctattggcttttgttttactgccctaatgggaatgttcaattccatatttgatggtagagtggtggcaaagcttccttttacccctctttcttacatccaaggactgtctcatcgaaatctgctgggagatgacaccacagactgttccttcattttcctgtatattctctgtactatgtcgattcgacagaacattcagaagattctcggccttgccccttcacgagccgccaccaagcaggcaggtggatttcttggcccaccacctccttctgggaagttctcttgaactcaagaactctttattttctatcattctttctagacacacacacatcagactggcaactgttttgtagcaagagccataggtagccttactacttgggcctctttctagttttgaattatttctaagccttttgggtatgattagagtgaaaatggcagccagcaaacttgatagtgcttttggtcctagatgatttttatcaaataagtggattgattagttaagttcaggtaatgtttatgtaatgaaaaacaaatagcatccttcttgtttcatttacataagtattttctgtgggaccgactctcaaggcactgtgtatgccctgcaagttggctgtctatgagcatttagagatttagaagaaaaatttagtttgtttaacccttgtaactgtttgttttgttgttgtttttttttcaagccaaatacatgacataagatcaataaagaggccaaatttttagctgttttatgtacaaggagagatctgtttcattttgttttgccgtatttctagatataagttttagcatgggccaggaaggactaaaataaaagtttttaaggtactgtactttttgccatacttgactcatatactcaaaatacagagttgtcttggtgtaggaattggaaagcaagagtggaaaggaacgtaataactcgttggagtttaaaaatgagggtcttggcaagtaacactgatgtctgaaaaaaaattaaatataaataaataaataaaaatgagggtcctcagctgttctcttc

SEQ ID NO: 1876 - protein, 176 aa, Homo sapiens; identical to SEQ ID NO: 1846

SEQ ID NO: 1877 - DNA, 1431 bp, Homo sapiens
ggaagcggaagtgcgatcttcgggctgtcagagttggtctgttactcggtggtggcggagtctacggaagccgttttcgcttcacttttcctggctgtagagcgctttccccctggcgggtgagagtgcagagacgaaggtgcgagatgagcactatgttcgcggacactctcctcatcgtttttatctctgtgtgcacggctctgctcgcagagggcataacctgggtcctggtttacaggacagacaagtacaagagactgaaggcagaagtggaaaaacagagtaaaaaattggaaaagaagaaggaaacaataacagagtcagctggtcgacaacagaaaaagaaaatagagagacaagaagagaaactgaagaataacaacagagatctatcaatggttcgaatgaaatccatgtttgctattggcttttgttttactgccctaatgggaatgttcaattccatgactgtctcatcgaaatctgctgggagatgacaccacagactgttccttcattttcctgtatattctctgtactatgtcgattcgacagaacattcagaagattctcggccttgccccttcacgagccgccaccaagcaggcaggtggatttcttggcccaccacctccttctgggaagttctcttgaactcaagaactctttattttctatcattctttctagacacacacacatcagactggcaactgttttgtagcaagagccataggtagccttactacttgggcctctttctagttttgaattatttctaagccttttgggtatgattagagtgaaaatggcagccagcaaacttgatagtgcttttggtcctagatgatttttatcaaataagtggattgattagttaagttcaggtaatgtttatgtaatgaaaaacaaatagcatccttcttgtttcatttacataagtattttctgtgggaccgactctcaaggcactgtgtatgccctgcaagttggctgtctatgagcatttagagatttagaagaaaaatttagtttgtttaacccttgtaactgtttgttttgttgttgtttttttttcaagccaaatacatgacataagatcaataaagaggccaaatttttagctgttttatgtacaaggagagatctgtttcattttgttttgccgtatttctagatataagttttagcatgggccaggaaggactaaaataaaagtttttaaggtactgtactttttgccatacttgactcatatactcaaaatacagagttgtcttggtgtaggaattggaaagcaagagtggaaaggaacgtaataactcgttggagtttaaaaatgagggtcttggcaagtaacactgatgtctgaaaaaaaattaaatataaataaataaataaaaatgagggtcctcagctgttctcttc

SEQ ID NO: 1878 - protein, 117 aa, Homo sapiens; identical to SEQ ID NO: 1848

SEQ ID NO: 1879 - DNA, 1512 bp, Homo sapiens
acgagcctttccggtgctatgccccggaagcggaagtgcgatcttcgggctgtcagagttggtctgttactcggtggtggcggagtctacggaagccgttttcgcttcacttttcctggctgtagagcgctttccccctggcgggtgagagtgcagagacgaaggtgcgagatgagcactatgttcgcggacactctcctcatcgtttttatctctgtgtgcacggctctgctcgcagagggcataacctgggtcctggtttacaggacagacaagtacaagagactgaaggcagaagtggaaaaacagagtaaaaaattggaaaagaagaaggaaacaataacagagtcagctggtcgacaacagaaaaagaaaatagagagacaagaagagaaactgaagaataacaacagagatctatcaatggttcgaatgaaatccatgtttgctattggcttttgttttactgccctaatgggaatgttcaattccatatttgatggtagagtggtggcaaagcttccttttacccctctttcttacatccaaggactgtctcatcgaaatctgctgggagatgacaccacagactgttccttcattttcctgtatattctctgtactatgtcgattcgacagaacattcagaagattctcggccttgccccttcacgagccgccaccaagcaggcaggtggatttcttggcccaccacctccttctgggaagttctcttgaactcaagaactctttattttctatcattctttctagacacacacacatcagactggcaactgttttgtagcaagagccataggtagccttactacttgggcctctttctagttttgaattatttctaagccttttgggtatgattagagtgaaaatggcagccagcaaacttgatagtgcttttggtcctagatgatttttatcaaataagtggattgattagttaagttcaggtaatgtttatgtaatgaaaaacaaatagcatccttcttgtttcatttacataagtattttctgtgggaccgactctcaaggcactgtgtatgccctgcaagttggctgtctatgagcatttagagatttagaagaaaaatttagtttgtttaacccttgtaactgtttgttttgttgttgtttttttttcaagccaaatacatgacataagatcaataaagaggccaaatttttagctgttttatgtacaaggagagatctgtttcattttgttttgccgtatttctagatataagttttagcatgggccaggaaggactaaaataaaagtttttaaggtactgtactttttgccatacttgactcatatactcaaaatacagagttgtcttggtgtaggaattggaaagcaagagtggaaaggaacgtaataactcgttggagtttaaaaatgagggtcttggcaagtaacactgatgtctgaaaaaaaattaaatataaataaataaataaaaatgagggtcctcagctgttctcttc

SEQ ID NO: 1880 - protein, 239 aa, Homo sapiens; identical to SEQ ID NO: 1850

SEQ ID NO: 1881 - DNA, 1792 bp, Homo sapiens
gctttccgcagccgccgctgggcgctgccggggctgaggccgctgtcgctcgcctgcgagccgctcggagcccggtgacggggctgggtttcccgaaggagccaagagccttcctttgcccgcagcggctggtccggtttacatcccaggcagaggtcagcgtgatgctgctgctccaatccgggcgggcagcgcgctgctattcgccgaggcggaggcggcgaggcgtctggccccagcctccgcccctcccgggccccgccgccgcccgaggtctctgcgaaagggtctcactctatccaataggctggaatgcagtagcatgatcaccacttactgacgctttgacctcccagtctcaagcaatcctcccacttcagcctttcgagtagctgagactacagagtcttgctttgtcaccaggctggaatgcagtggcgcaatcttggctcactacaacctccacctcccggtttcaagcgattcttgtgcctcagcctcctgagtagctgggattacaggcataacctgggtcctggtttacaggacagacaagtacaagagactgaaggcagaagtggaaaaacagagtaaaaaattggaaaagaagaaggaaacaataacagagtcagctggtcgacaacagaaaaagaaaatagagagacaagaagagaaactgaagaataacaacagagatctatcaatggttcgaatgaaatccatgtttgctattggcttttgttttactgccctaatgggaatgttcaattccatatttgatggtagagtggtggcaaagcttccttttacccctctttcttacatccaaggactgtctcatcgaaatctgctgggagatgacaccacagactgttccttcattttcctgtatattctctgtactatgtcgattcgacagaacattcagaagattctcggccttgccccttcacgagccgccaccaagcaggcaggtggatttcttggcccaccacctccttctgggaagttctcttgaactcaagaactctttattttctatcattctttctagacacacacacatcagactggcaactgttttgtagcaagagccataggtagccttactacttgggcctctttctagttttgaattatttctaagccttttgggtatgattagagtgaaaatggcagccagcaaacttgatagtgcttttggtcctagatgatttttatcaaataagtggattgattagttaagttcaggtaatgtttatgtaatgaaaaacaaatagcatccttcttgtttcatttacataagtattttctgtgggaccgactctcaaggcactgtgtatgccctgcaagttggctgtctatgagcatttagagatttagaagaaaaatttagtttgtttaacccttgtaactgtttgttttgttgttgtttttttttcaagccaaatacatgacataagatcaataaagaggccaaatttttagctgttttatgtacaaggagagatctgtttcattttgttttgccgtatttctagatataagttttagcatgggccaggaaggactaaaataaaagtttttaaggtactgtactttttgccatacttgactcatatactcaaaatacagagttgtcttggtgtaggaattggaaagcaagagtggaaaggaacgtaataactcgttggagtttaaaaatgagggtcttggcaagtaacactgatgtctgaaaaaaaattaaatataaataaataaataaaaatgagggtcctcagctgttctcttc

SEQ ID NO: 1882 - protein, 104 aa, Homo sapiens; identical to SEQ ID NO: 1844

SEQ ID NO: 1883 - DNA, 1215 bp, Homo sapiens
ggaagcggaagtgcgatcttcgggctgtcagagttggtctgttactcggtggtggcggagtctacggaagccgttttcgcttcacttttcctggctgtagagcgctttccccctggcgggtgagagtgcagagacgaaggcataacctgggtcctggtttacaggacagacaagtacaagagactgaaggcagaagtggaaaaacagagtaaaaaattggaaaagaagaaggaaacaataacagagtcagctggtcgacaacagaaaaagaaaatagagagacaagaagagaaactgaagaataacaacagagatctatcaatggttcgaatgaaatccatgtttgctattggcttttgttttactgccctaatgggaatgttcaattccatatttgatggtagagtggtggcaaagcttccttttacccctctttcttacatccaaggactgtctcatcgaaatctgctgggagatgacaccacagactgttccttcattttcctgtatattctctgtactatgtcgattcgacagaacattcagaagattctcggccttgccccttcacgagccgccaccaagcaggcaggtggatttcttggcccaccacctccttctgggaagttctcttgaactcaagaactctttattttctatcattctttctagacacacacacatcagactggcaactgttttgtagcaagagccataggtagccttactacttgggcctctttctagttttgaattatttctaagccttttgggtatgattagagtgaaaatggcagccagcaaacttgatagtgcttttggtcctagatgatttttatcaaataagtggattgattagttaagttcaggtaatgtttatgtaatgaaaaacaaatagcatccttcttgtttcatttacataagtattttctgtgggaccgactctcaaggcactgtgtatgccctgcaagttggctgtctatgagcatttagagatttagaagaaaaatttagtttgtttaacccttgtaactgtttgttttgttgttgtttttttttcaagccaaatacatgacataagatcaataaagaggccaaatttttagctgttttatgtacaaggagagatctgtttcattttgttttgccgtatttctagatataagttttagcatgggccaggaaggactaaaataaaagtttttaaggtactgt

SEQ ID NO: 1884 - protein, 104 aa, Homo sapiens; identical to SEQ ID NO: 1844

SEQ ID NO: 1885 - DNA, 1492 bp, Homo sapiens
ggaagcggaagtgcgatcttcgggctgtcagagttggtctgttactcggtggtggcggagtctacggaagccgttttcgcttcacttttcctggctgtagagcgctttccccctggcgggtgagagtgcagagacgaaggtgcgagatgagcactatgttcgcggacactctcctcatcgtttttatctctgtgtgcacggctctgctcgcagagggtgagagcgggtatttctcagacgtttgatcagtccccgggaggaagggccccggggtcccctgtgccaccaggggaaagatcgcgagccttacttgcttgagaggctcatctactccacttcagggaatctctgggcaactcgtgaacaggagcaggaggggagtatggagtcgattgccgagttttctttggtctcaggcataacctgggtcctggtttacaggacagacaagtacaagagactgaaggcagaagtggaaaaacagagtaaaaaattggaaaagaagaaggaaacaataacagagtcagctggtcgacaacagaaaaagaaaatagagagacaagaagagaaactgaagaataacaacagagatctatcaatggttcgaatgaaatccatgtttgctattggcttttgttttactgccctaatgggaatgttcaattccatatttgatggtagagtggtggcaaagcttccttttacccctctttcttacatccaaggactgtctcatcgaaatctgctgggagatgacaccacagactgttccttcattttcctgtatattctctgtactatgtcgattcgacagaacattcagaagattctcggccttgccccttcacgagccgccaccaagcaggcaggtggatttcttggcccaccacctccttctgggaagttctcttgaactcaagaactctttattttctatcattctttctagacacacacacatcagactggcaactgttttgtagcaagagccataggtagccttactacttgggcctctttctagttttgaattatttctaagccttttgggtatgattagagtgaaaatggcagccagcaaacttgatagtgcttttggtcctagatgatttttatcaaataagtggattgattagttaagttcaggtaatgtttatgtaatgaaaaacaaatagcatccttcttgtttcatttacataagtattttctgtgggaccgactctcaaggcactgtgtatgccctgcaagttggctgtctatgagcatttagagatttagaagaaaaatttagtttgtttaacccttgtaactgtttgttttgttgttgtttttttttcaagccaaatacatgacataagatcaataaagaggccaaatttttagctgttttatgtacaaggagagatctgtttcattttgttttgccgtatttctagatataagttttagcatgggccaggaaggactaaaataaaagtttttaaggtactgt

SEQ ID NO: 1886 - protein, 176 aa, Homo sapiens; identical to SEQ ID NO: 1846

SEQ ID NO: 1887 - DNA, 1237 bp, Homo sapiens
ggaagcggaagtgcgatcttcgggctgtcagagttggtctgttactcggtggtggcggagtctacggaagccgttttcgcttcacttttcctggctgtagagcgctttccccctggcgggtgagagtgcagagacgaaggtgcgagatgagcactatgttcgcggacactctcctcatcgtttttatctctgtgtgcacggctctgctcgcagagggcataacctgggtcctggtttacaggacagacaagtacaagagactgaaggcagaagtggaaaaacagagtaaaaaattggaaaagaagaaggaaacaataacagagtcagctggtcgacaacagaaaaagttcgaatgaaatccatgtttgctattggcttttgttttactgccctaatgggaatgttcaattccatatttgatggtagagtggtggcaaagcttccttttacccctctttcttacatccaaggactgtctcatcgaaatctgctgggagatgacaccacagactgttccttcattttcctgtatattctctgtactatgtcgattcgacagaacattcagaagattctcggccttgccccttcacgagccgccaccaagcaggcaggtggatttcttggcccaccacctccttctgggaagttctcttgaactcaagaactctttattttctatcattctttctagacacacacacatcagactggcaactgttttgtagcaagagccataggtagccttactacttgggcctctttctagttttgaattatttctaagccttttgggtatgattagagtgaaaatggcagccagcaaacttgatagtgcttttggtcctagatgatttttatcaaataagtggattgattagttaagttcaggtaatgtttatgtaatgaaaaacaaatagcatccttcttgtttcatttacataagtattttctgtgggaccgactctcaaggcactgtgtatgccctgcaagttggctgtctatgagcatttagagatttagaagaaaaatttagtttgtttaacccttgtaactgtttgttttgttgttgtttttttttcaagccaaatacatgacataagatcaataaagaggccaaatttttagctgttttatgtacaaggagagatctgtttcattttgttttgccgtatttctagatataagttttagcatgggccaggaaggactaaaataaaagtttttaaggtactgt

SEQ ID NO: 1888 - protein, 102 aa, Homo sapiens
MVEWWQSFLLPLFLTSKDCLIEICWEMTPQTVPSFSCIFSVLCRFDRTFRRFSALPLHEPPPSRQVDFLAHHLLLGSSLELKNSLFSIILSRHTHIRLATVL

SEQ ID NO: 1889 - DNA, 1236 bp, Homo sapiens
ggaagcggaagtgcgatcttcgggctgtcagagttggtctgttactcggtggtggcggagtctacggaagccgttttcgcttcacttttcctggctgtagagcgctttccccctggcgggtgagagtgcagagacgaaggtgcgagatgagcactatgttcgcggacactctcctcatcgtttttatctctgtgtgcacggctctgctcgcagagggcataacctgggtcctggtttacaggacagacaagtacaagagactgaaggcagaagtggaaaaacagagtaaaaaattggaaaagaagaaggaaacaataacagagtcagctggtcgacaacagaaaaagaaaatagagagacaagaagagaaactgaagaataacaacagagatctatcaatggttcgaatgaaatccatgtttgctattggcttttgttttactgccctaatgggaatgttcaattccatgactgtctcatcgaaatctgctgggagatgacaccacagactgttccttcattttcctgtatattctctgtactatgtcgattcgacagaacattcagaagattctcggccttgccccttcacgagccgccaccaagcaggcaggtggatttcttggcccaccacctccttctgggaagttctcttgaactcaagaactctttattttctatcattctttctagacacacacacatcagactggcaactgttttgtagcaagagccataggtagccttactacttgggcctctttctagttttgaattatttctaagccttttgggtatgattagagtgaaaatggcagccagcaaacttgatagtgcttttggtcctagatgatttttatcaaataagtggattgattagttaagttcaggtaatgtttatgtaatgaaaaacaaatagcatccttcttgtttcatttacataagtattttctgtgggaccgactctcaaggcactgtgtatgccctgcaagttggctgtctatgagcatttagagatttagaagaaaaatttagtttgtttaacccttgtaactgtttgttttgttgttgtttttttttcaagccaaatacatgacataagatcaataaagaggccaaatttttagctgttttatgtacaaggagagatctgtttcattttgttttgccgtatttctagatataagttttagcatgggccaggaaggactaaaataaaagtttttaaggtactgt

SEQ ID NO: 1890 - protein, 117 aa, Homo sapiens; identical to SEQ ID NO: 1848

SEQ ID NO: 1891 - DNA, 1317 bp, Homo sapiens
acgagcctttccggtgctatgccccggaagcggaagtgcgatcttcgggctgtcagagttggtctgttactcggtggtggcggagtctacggaagccgttttcgcttcacttttcctggctgtagagcgctttccccctggcgggtgagagtgcagagacgaaggtgcgagatgagcactatgttcgcggacactctcctcatcgtttttatctctgtgtgcacggctctgctcgcagagggcataacctgggtcctggtttacaggacagacaagtacaagagactgaaggcagaagtggaaaaacagagtaaaaaattggaaaagaagaaggaaacaataacagagtcagctggtcgacaacagaaaaagaaaatagagagacaagaagagaaactgaagaataacaacagagatctatcaatggttcgaatgaaatccatgtttgctattggcttttgttttactgccctaatgggaatgttcaattccatatttgatggtagagtggtggcaaagcttccttttacccctctttcttacatccaaggactgtctcatcgaaatctgctgggagatgacaccacagactgttccttcattttcctgtatattctctgtactatgtcgattcgacagaacattcagaagattctcggccttgccccttcacgagccgccaccaagcaggcaggtggatttcttggcccaccacctccttctgggaagttctcttgaactcaagaactctttattttctatcattctttctagacacacacacatcagactggcaactgttttgtagcaagagccataggtagccttactacttgggcctctttctagttttgaattatttctaagccttttgggtatgattagagtgaaaatggcagccagcaaacttgatagtgcttttggtcctagatgatttttatcaaataagtggattgattagttaagttcaggtaatgtttatgtaatgaaaaacaaatagcatccttcttgtttcatttacataagtattttctgtgggaccgactctcaaggcactgtgtatgccctgcaagttggctgtctatgagcatttagagatttagaagaaaaatttagtttgtttaacccttgtaactgtttgttttgttgttgtttttttttcaagccaaatacatgacataagatcaataaagaggccaaatttttagctgttttatgtacaaggagagatctgtttcattttgttttgccgtatttctagatataagttttagcatgggccaggaaggactaaaataaaagtttttaaggtactgt

SEQ ID NO: 1892 - protein, 239 aa, Homo sapiens; identical to SEQ ID NO: 1850

SEQ ID NO: 1893 - DNA, 1123 bp, Homo sapiens
ggaagcggaagtgcgatcttcgggctgtcagagttggtctgttactcggtggtggcggagtctacggaagccgttttcgcttcacttttcctggctgtagagcgctttccccctggcgggtgagagtgcagagacgaaggcataacctgggtcctggtttacaggacagacaagtacaagagactgaaggcagaagtggaaaaacagagtaaaaaattggaaaagaagaaggaaacaataacagagtcagctggtcgacaacagaaaaagaaaatagagagacaagaagagaaactgaagaataacaacagagatctatcaatggttcgaatgaaatccatgtttgctattggcttttgttttactgccctaatgggaatgttcaattccatatttgatggtagagtggtggcaaagcttccttttacccctctttcttacatccaaggactgtctcatcgaaatctgctgggagatgacaccacagactgttccttcattttcctgtatattctctgtactatgtcgattcgacagaacattcagaagattctcggccttgccccttcacgagccgccaccaagcaggcaggtggatttcttggcccaccacctccttctgggaagttctcttgaactcaagaactctttattttctatcattctttctagacacacacacatcagactggcaactgttttgtagcaagagccataggtagccttactacttgggcctctttctagttttgaattatttctaagccttttgggtatgattagagtgaaaatggcagccagcaaacttgatagtgcttttggtcctagatgatttttatcaaataagtggattgattagttaagttcaggtaatgtttatgtaatgaaaaacaaatagcatccttcttgtttcatttacataagtattttctgtgggaccgactctcaaggcactgtgtatgccctgcaagttggctgtctatgagcatttagagatttagaagaaaaatttagtttgtttaacccttgtaactgtttgttttgttgttgtttttttttcaagccaaatacatgacataagatcaataaagaggccaaatttttagctgttttatgtacaagg

SEQ ID NO: 1894 - protein, 104 aa, Homo sapiens; identical to SEQ ID NO: 1844

SEQ ID NO: 1895 - DNA, 1400 bp, Homo sapiens
ggaagcggaagtgcgatcttcgggctgtcagagttggtctgttactcggtggtggcggagtctacggaagccgttttcgcttcacttttcctggctgtagagcgctttccccctggcgggtgagagtgcagagacgaaggtgcgagatgagcactatgttcgcggacactctcctcatcgtttttatctctgtgtgcacggctctgctcgcagagggtgagagcgggtatttctcagacgtttgatcagtccccgggaggaagggccccggggtcccctgtgccaccaggggaaagatcgcgagccttacttgcttgagaggctcatctactccacttcagggaatctctgggcaactcgtgaacaggagcaggaggggagtatggagtcgattgccgagttttctttggtctcaggcataacctgggtcctggtttacaggacagacaagtacaagagactgaaggcagaagtggaaaaacagagtaaaaaattggaaaagaagaaggaaacaataacagagtcagctggtcgacaacagaaaaagaaaatagagagacaagaagagaaactgaagaataacaacagagatctatcaatggttcgaatgaaatccatgtttgctattggcttttgttttactgccctaatgggaatgttcaattccatatttgatggtagagtggtggcaaagcttccttttacccctctttcttacatccaaggactgtctcatcgaaatctgctgggagatgacaccacagactgttccttcattttcctgtatattctctgtactatgtcgattcgacagaacattcagaagattctcggccttgccccttcacgagccgccaccaagcaggcaggtggatttcttggcccaccacctccttctgggaagttctcttgaactcaagaactctttattttctatcattctttctagacacacacacatcagactggcaactgttttgtagcaagagccataggtagccttactacttgggcctctttctagttttgaattatttctaagccttttgggtatgattagagtgaaaatggcagccagcaaacttgatagtgcttttggtcctagatgatttttatcaaataagtggattgattagttaagttcaggtaatgtttatgtaatgaaaaacaaatagcatccttcttgtttcatttacataagtattttctgtgggaccgactctcaaggcactgtgtatgccctgcaagttggctgtctatgagcatttagagatttagaagaaaaatttagtttgtttaacccttgtaactgtttgttttgttgttgtttttttttcaagccaaatacatgacataagatcaataaagaggccaaatttttagctgttttatgtacaagg

SEQ ID NO: 1896 - protein, 176 aa, Homo sapiens; identical to SEQ ID NO: 1846

SEQ ID NO: 1897 - DNA, 1144 bp, Homo sapiens
ggaagcggaagtgcgatcttcgggctgtcagagttggtctgttactcggtggtggcggagtctacggaagccgttttcgcttcacttttcctggctgtagagcgctttccccctggcgggtgagagtgcagagacgaaggtgcgagatgagcactatgttcgcggacactctcctcatcgtttttatctctgtgtgcacggctctgctcgcagagggcataacctgggtcctggtttacaggacagacaagtacaagagactgaaggcagaagtggaaaaacagagtaaaaaattggaaaagaagaaggaaacaataacagagtcagctggtcgacaacagaaaaagaaaatagagagacaagaagagaaactgaagaataacaacagagatctatcaatggttcgaatgaaatccatgtttgctattggcttttgttttactgccctaatgggaatgttcaattccatgactgtctcatcgaaatctgctgggagatgacaccacagactgttccttcattttcctgtatattctctgtactatgtcgattcgacagaacattcagaagattctcggccttgccccttcacgagccgccaccaagcaggcaggtggatttcttggcccaccacctccttctgggaagttctcttgaactcaagaactctttattttctatcattctttctagacacacacacatcagactggcaactgttttgtagcaagagccataggtagccttactacttgggcctctttctagttttgaattatttctaagccttttgggtatgattagagtgaaaatggcagccagcaaacttgatagtgcttttggtcctagatgatttttatcaaataagtggattgattagttaagttcaggtaatgtttatgtaatgaaaaacaaatagcatccttcttgtttcatttacataagtattttctgtgggaccgactctcaaggcactgtgtatgccctgcaagttggctgtctatgagcatttagagatttagaagaaaaatttagtttgtttaacccttgtaactgtttgttttgttgttgtttttttttcaagccaaatacatgacataagatcaataaagaggccaaatttttagctgttttatgtacaagg

SEQ ID NO: 1898 - protein, 117 aa, Homo sapiens; identical to SEQ ID NO: 1848

SEQ ID NO: 1899 - DNA, 1225 bp, Homo sapiens
acgagcctttccggtgctatgccccggaagcggaagtgcgatcttcgggctgtcagagttggtctgttactcggtggtggcggagtctacggaagccgttttcgcttcacttttcctggctgtagagcgctttccccctggcgggtgagagtgcagagacgaaggtgcgagatgagcactatgttcgcggacactctcctcatcgtttttatctctgtgtgcacggctctgctcgcagagggcataacctgggtcctggtttacaggacagacaagtacaagagactgaaggcagaagtggaaaaacagagtaaaaaattggaaaagaagaaggaaacaataacagagtcagctggtcgacaacagaaaaagaaaatagagagacaagaagagaaactgaagaataacaacagagatctatcaatggttcgaatgaaatccatgtttgctattggcttttgttttactgccctaatgggaatgttcaattccatatttgatggtagagtggtggcaaagcttccttttacccctctttcttacatccaaggactgtctcatcgaaatctgctgggagatgacaccacagactgttccttcattttcctgtatattctctgtactatgtcgattcgacagaacattcagaagattctcggccttgccccttcacgagccgccaccaagcaggcaggtggatttcttggcccaccacctccttctgggaagttctcttgaactcaagaactctttattttctatcattctttctagacacacacacatcagactggcaactgttttgtagcaagagccataggtagccttactacttgggcctctttctagttttgaattatttctaagccttttgggtatgattagagtgaaaatggcagccagcaaacttgatagtgcttttggtcctagatgatttttatcaaataagtggattgattagttaagttcaggtaatgtttatgtaatgaaaaacaaatagcatccttcttgtttcatttacataagtattttctgtgggaccgactctcaaggcactgtgtatgccctgcaagttggctgtctatgagcatttagagatttagaagaaaaatttagtttgtttaacccttgtaactgtttgttttgttgttgtttttttttcaagccaaatacatgacataagatcaataaagaggccaaatttttagctgttttatgtacaagg

SEQ ID NO: 1900 - protein, 239 aa, Homo sapiens; identical to SEQ ID NO: 1850

SEQ ID NO: 1901 - DNA, 252 bp, Homo sapiens
ggaagcggaagtgcgatcttcgggctgtcagagttggtctgttactcggtggtggcggagtctacggaagccgttttcgcttcacttttcctggctgtagagcgctttccccctggcgggtgagagtgcagagacgaaggcataacctgggtcctggtttacaggacagacaagtacaagagactgaaggcagaagtggaaaaacagagtaaaaaattggaaaagaagaaggaaacaataacagagtcagct

SEQ ID NO: 1902 - protein, 69 aa, Homo sapiens
KRKCDLRAVRVGLLLGGGGVYGSRFRFTFPGCRALSPWRVRVQRRRHNLGPGLQDRQVQETEGRSGKTE

SEQ ID NO: 1903 - DNA, 2581 bp, Homo sapiens
gaacggtgtggccacgagagtctagaggaaaccaacccgcaactcactggagctgaagggctggtagtcaggccgaatctcgcgagaattggaactatttcagagccagaggaggatagtggcggcggcgaactttgcccggtagattttactgactggggtgctggcgcgcgcctttttctcggccagaatccagttattgggatagtcttgacttctacctcagcccaacttctgtggtcgtaatattagtttagcttgggtttgccgtgaagtaagaagactgacttccgcaaaggtactgaacgactgggtgtaggtgccagggcatggacgtgaagctggaaccgcgaaatgagttagttgtgggccgctggcctcaaggagcgaacgtcagcgcgaagaggagaagcttgtgcatacgctctgataagggttttaatagagagatggaatctcgctgtgtcacccaggctggaatgcagtgactcgatcataactcactatgacctcgaactcccaggctaaagcagtcctcaagcaatccttccacctcagccttctgagtagctgggagtagctgattaactaatgcgtgtcaccacgcccagctaatttgtgtatgtgtgtgcacaggtgtagagctaggggtcttgctatgttgctcaggctagtcttgaactcctggcctcaagcagtcttgtcttgacctctcaaaccagtgggactgtaggtgtgagccattgctcctggctgagcactgttttttttaggacagactgtattcattgttgcaatcttcagcttttggaacatcgtctaggacagagaagctgcacaatatgtatttatcgaatgagtgaatgatacttttgggagagaagacagtgggttggagaaatatcttggaagaattggaaattttaggtggaccttgaagaaagggtaaaattcaattaggacacaagcagtgatcaaaagcattgagttgggaacaaagtggtaggatgtgggagttagtatatagtaaaaacaactaaaatatagaaagagattatgtgtttaatagaaataggattgactaaagtgaatccacgttgtatctgtaagaggtccatcgttgaactttatttttttttgttttgtttttgagacagggtctcactctgttatctaggctggagtgcggtggcacaatctcagctcactgcagcctcagcctcccaggttcaagtgattctcctgcttcagcctcccatatagggattacaggcctgcaccaccacacctggctaatttttgtatttttagtacagacgggatttcaccatgttggccaggctggtctcgaactcctgacttcaagtgatccacccgcctcggccttccagagtgctgggattacaggcctgagccactgcacccagccacctgtatttatttttgagacagggtcttgttctgtcgccttggctggagtgcagtggtgcaatcatggctcactgcagccttgacttcccaggctcaatgaatagctgggactacaggtgtgcaccaccatacccggctaatttttgtattttttgtagagatggtgtttcgccatcttgcccaagctggtctcaaactcctggcctcaagtgatccacccgtctaggcctcctacagtgctgggattacagggttgagccaccacacccagcctcatggttgaattttaggagagccgtacatctcctcctgataatacatgcaaaacttcatgtgtccatttttttctgagttgaagtttcatagttttcatccaattctcaaaggtgtttataaaccaataaaggttaagaatcatgttgtgcatttgaaagactaatagaaaggcttaagcttaatgctgtagcaaattagtcttcaaaagttttctaccatagcattcattaggaacagaagagggggaatgagaccctaagatttagagatgaagtctgaaacttaggactttatatttatctgaacatcatatgtaaattttactattatgggactggtattaatgcttccttataaaaatatatttagcctcatcagtgatcagggaaccatatttgggaccagtctgttcagttggcaaaaattaaaaaggccatcatatcagaaaggagaaggtaaaatgatttgttcacagacagcatgatcttttatgtacaaaaccctaaagattccacccaaaaaaccctgttagaactaaaaaacaaagttgcaggatgcaaaaccacacaaaatttagttgcatttcgatgtaaaatttaaaaaggaaatcttaaaaattccatttgcaacagcatcagaactaaaatacttgtgaataaatttaaccaaagaggcaagacttgtacactgacaactacaaacattgctgaagcaaattaaagaatatagaaataagtggaatgacgcactgtgttcatagattgaaacagttaatattaagatgttgatactactcaaagtgatctacagattcattaggtaatccctgtcaaaatcccagtgactttttttcagaaatagaaaaattcatcct

SEQ ID NO: 1904 - protein, 52 aa, Homo sapiens
MDVKLEPRNELVVGRWPQGANVSAKRRSLCIRSDKGFNREMESRCVTQAGMQ

SEQ ID NO: 1905 - DNA, 1211 bp, Homo sapiens
ctcgccgcctccgcctcggcgaatagcagcgcgctgcccgcccggattggagcagcagcatcacgctgacctctgcctgggatgtaaaccggaccagccgctgcgggcaaaggaaggctcttggctccttcgggaaacccagccccgtcaccgggctccgagcggctcgcaggcgagcgacagcggcctcagccccggcagcgcccagcggcggctgcggaaagcggagggagtccgacgcgggcgcgggcggggagcgtgcgtccgttcgcacaggcagcgggaggaggggcggcgcgaaccatggccggggacagcgagcagaccctgcagaaccaccagcagcccaacggcggcgagcccttccttataggcgtcagcgggggaacagctagcggcaagtcttccgtgtgtgctaagatcgtgcagctcctggggcagaatgaggtggactatcgccagaagcaggtggtcatcctgagccaggatagcttctaccgtgtccttacctcggagcagaaggccaaagccctgaagggccagttcaactttgaccacccggatgcctttgacaatgaactcattctcaaaacactcaaagaaatcactgaagggaaaacagtccagatccccgtgtatgactttgtctcccattcccggaaggaggagacagttactgtctatcccgcagacgtggtgctctttgaagggatcctggccttctactcccaggaggtacgagacctgttccagatgaagctttttgtggatacagatgcggacacccggctctcacgcagagtattaagggacatcagcgagagaggcagggatcttgagcagattttatctcagtacattacgttcgtcaagcctgcctttgaggaattctgcttgccaacaaagaagtatgctgatgtgatcatccctagaggtgcagataatctggtggccatcaacctcatcgtgcagcacatccaggacatcctgaatggagggccctccaaacggcagaccaatggctgtctcaacggctacaccccttcacgcaagaggcaggcatcggagtccagcagcaggccgcattgacccgtctccatcggaccccagcccctatctccaagagacagaggaggggtcaggaggcactgctcatctgtacatactgtttcctatgacattactgtatttaagaaaacaccatggagatg

SEQ ID NO: 1906 - protein, 261 aa, Homo sapiens; identical to SEQ ID NO: 64

SEQ ID NO: 1907 - DNA, 1305 bp, Homo sapiens
ctcgccgcctccgcctcggcgaatagcagcgcgctgcccgcccggattggagcagcagcatcacgctgacctctgcctgggatgtaaaccggaccagccgctgcgggcaaaggaaggctcttggctccttcgggaaacccagccccgtcaccgggctccgagcggctcgcaggcgagcgacagcggcctcagccccggcagcgcccagcggcggctgcggaaagcggagggagtccgacgcgggcgcgggcggggagcgtgcgtccgttcgcacaggcagcgggaggaggggcggcgcgaaccatggccggggacagcgagcagaccctgcagaaccaccagcagcccaacggcggcgagcccttccttataggcgtcagcgggggaacagctagcggcaagtcttccgtgtgtgctaagatcgtgcagctcctggggcagaatgaggtggactatcgccagaagcaggtggtcatcctgagccaggatagcttctaccgtgtccttacctcggagcagaaggccaaagccctgaagggccagttcaactttgaccacccggatgcctttgacaatgaactcattctcaaaacactcaaagaaatcactgaagggaaaacagtccagatccccgtgtatgactttgtctcccattcccggaaggaggagacagttactgtctatcccgcagacgtggtgctctttgaagggatcctggccttctactcccaggaggtacgagacctgttccagatgaagctttttgtggatacagatgcggacacccggctctcacgcagagtattaagggacatcagcgagagaggcagggatcttgagcagattttatctcagtacattacgttcgtcaagcctgcctttgaggaattctgcttgccaacaaagaagtatgctgatgtgatcatccctagaggtgcagataatctggtggccatcaacctcatcgtgcagcacatccaggacatcctgaatggagggccctccaaacggcagaccaatggctgtctcaacggctacaccccttcacgcaagaggcaggcatcggagtccagcagcaggccgcattgacccgtctccatcggaccccagcccctatctccaagagacagaggaggggtcaggaggcactgctcatctgtacatactgtttcctatgacattactgtatttaagaaaacaccatggagatgaaatgcctttgattttttttttctttttgtactttggaacgacaaaatgaaacagaacttgaccctgagcttaaataacaaaactgtgccaact

SEQ ID NO: 1908 - protein, 261 aa, Homo sapiens; identical to SEQ ID NO: 64

SEQ ID NO: 1909 - DNA, 1277 bp, Homo sapiens
ctcgccgcctccgcctcggcgaatagcagcgcgctgcccgcccggattggagcagcagcatcacgctgacctctgcctgggatgtaaaccggaccagccgctgcgggcaaaggaaggctcttggctccttcgggaaacccagccccgtcaccgggctccgagcggctcgcaggcgagcgacagcggcctcagccccggcagcgcccagcggcggctgcggaaagcggagggagtccgacgcgggcgcgggcggggagcgtgcgtccgttcgcacaggcagcgggaggaggggcggcgcgaaccatggccggggacagcgagcagaccctgcagaaccaccagcagcccaacggcggcgagcccttccttataggcgtcagcgggggaacagctagcggcaagtcttccgtgtgtgctaagatcgtgcagctcctggggcagaatgaggtggactatcgccagaagcaggtggtcatcctgagccaggatagcttctaccgtgtccttacctcggagcagaaggccaaagccctgaagggccagttcaactttgaccacccggatgcctttgacaatgaactcattctcaaaacactcaaagaaatcactgaagggaaaacagtccagatccccgtgtatgactttgtctcccattcccggaaggaggagacagttactgtctatcccgcagacgtggtgctctttgaagggatcctggccttctactcccaggaggtacgagacctgttccagatgaagctttttgtggatacagatgcggacacccggctctcacgcagagacaaagaagtatgctgatgtgatcatccctagaggtgcagataatctggtggccatcaacctcatcgtgcagcacatccaggacatcctgaatggagggccctccaaacggcagaccaatggctgtctcaacggctacaccccttcacgcaagaggcaggcatcggagtccagcagcaggccgcattgacccgtctccatcggaccccagcccctatctccaagagacagaggaggggtcaggaggcactgctcatctgtacatactgtttcctatgacattactgtatttaagaaaacaccatggagatgaaatgcctttgattttttttttctttttgtactttggaacgacaaaatgaaacagaacttgaccctgagcttaaataacaaaactgtgccaactactactggtgatgcctaattatgaatccaacgtgtaaccagttataaatacatatatatataaaaaagga

SEQ ID NO: 1910 - protein, 171 aa, Homo sapiens
MAGDSEQTLQNHQQPNGGEPFLIGVSGGTASGKSSVCAKIVQLLGQNEVDYRQKQVVILSQDSFYRVLTSEQKAKALKGQFNFDHPDAFDNELILKTLKEITEGKTVQIPVYDFVSHSRKEETVTVYPADVVLFEGILAFYSQEVRDLFQMKLFVDTDADTRLSRRDKEVC

SEQ ID NO: 1911 - DNA, 1377 bp, Homo sapiens
ctcgccgcctccgcctcggcgaatagcagcgcgctgcccgcccggattggagcagcagcatcacgctgacctctgcctgggatgtaaaccggaccagccgctgcgggcaaaggaaggctcttggctccttcgggaaacccagccccgtcaccgggctccgagcggctcgcaggcgagcgacagcggcctcagccccggcagcgcccagcggcggctgcggaaagcggagggagtccgacgcgggcgcgggcggggagcgtgcgtccgttcgcacaggcagcgggaggaggggcggcgcgaaccatggccggggacagcgagcagaccctgcagaaccaccagcagcccaacggcggcgagcccttccttataggcgtcagcgggggaacagctagcggcaagtcttccgtgtgtgctaagatcgtgcagctcctggggcagaatgaggtggactatcgccagaagcaggtggtcatcctgagccaggatagcttctaccgtgtccttacctcggagcagaaggccaaagccctgaagggccagttcaactttgaccacccggatgcctttgacaatgaactcattctcaaaacactcaaagaaatcactgaagggaaaacagtccagatccccgtgtatgactttgtctcccattcccggaaggaggagacagttactgtctatcccgcagacgtggtgctctttgaagggatcctggccttctactcccaggaggtacgagacctgttccagatgaagctttttgtggatacagatgcggacacccggctctcacgcagagtattaagggacatcagcgagagaggcagggatcttgagcagattttatctcagtacattacgttcgtcaagcctgcctttgaggaattctgcttgccaacaaagaagtatgctgatgtgatcatccctagaggtgcagataatctggtggccatcaacctcatcgtgcagcacatccaggacatcctgaatggagggccctccaaacggcagaccaatggctgtctcaacggctacaccccttcacgcaagaggcaggcatcggagtccagcagcaggccgcattgacccgtctccatcggaccccagcccctatctccaagagacagaggaggggtcaggaggcactgctcatctgtacatactgtttcctatgacattactgtatttaagaaaacaccatggagatgaaatgcctttgattttttttttctttttgtactttggaacgacaaaatgaaacagaacttgaccctgagcttaaataacaaaactgtgccaactactactggtgatgcctaattatgaatccaacgtgtaaccagttataaatacatatatatataaaaaaggatc

SEQ ID NO: 1912 - protein, 261 aa, Homo sapiens; identical to SEQ ID NO: 64

SEQ ID NO: 1913 - DNA, 4786 bp, Homo sapiens
ctcgccgcctccgcctcggcgaatagcagcgcgctgcccgcccggattggagcagcagcatcacgctgacctctgcctgggatgtaaaccggaccagccgctgcgggcaaaggaaggctcttggctccttcgggaaacccagccccgtcaccgggctccgagcggctcgcaggcgagcgacagcggcctcagccccggcagcgcccagcggcggctgcggaaagcggagggagtccgacgcgggcgcgggcggggagcgtgcgtccgttcgcacaggcagcgggaggaggggcggcgcgaaccatggccggggacagcgagcagaccctgcagaaccaccagcagcccaacggcggcgagcccttccttataggcgtcagcgggggaacagctagcggcaagtcttccgtgtgtgctaagatcgtgcagctcctggggcagaatgaggtggactatcgccagaagcaggtggtcatcctgagccaggatagcttctaccgtgtccttacctcggagcagaaggccaaagccctgaagggccagttcaactttgaccacccggatgcctttgacaatgaactcattctcaaaacactcaaagaaatcactgaagggaaaacagtccagatccccgtgtatgactttgtctcccattcccggaaggaggagacagttactgtctatcccgcagacgtggtgctctttgaagggatcctggccttctactcccaggaggtacgagacctgttccagatgaagctttttgtggatacagatgcggacacccggctctcacgcagagacaaagaagtatgctgatgtgatcatccctagaggtgcagataatctggtggccatcaacctcatcgtgcagcacatccaggacatcctgaatggagggccctccaaacggcagaccaatggctgtctcaacggctacaccccttcacgcaagaggcaggcatcggagtccagcagcaggccgcattgacccgtctccatcggaccccagcccctatctccaagagacagaggaggggtcaggaggcactgctcatctgtacatactgtttcctatgacattactgtatttaagaaaacaccatggagatgaaatgcctttgattttttttttctttttgtactttggaacgacaaaatgaaacagaacttgaccctgagcttaaataacaaaactgtgccaactactactggtgatgcctaattatgaatccaacgtgtaaccagttataaatacatatatatataaaaaaggatctatttttgtgtaaatgtacaaatactgtaaagctgtttgccataagtattttgcaggagggtctgtacttgagtgttttaggactggagctggaatttcaccaaggggaaattgcctgttgtgtcccagggtggggaggctcgggcatctgtgagagacagggagggtggctaaggtccagttgcttttgagtgccccgtggaacttgatgggaatggggttggaaaaccttgattgcctcctctgtcacatgccactcttggagctggagcttagtgatatgtcaatgagagatactcttgtcttttttttttttcttttcttttttttttttgagttgaaattaggtaaaatctcaactcaaaaatcaaactcagggaagaggcccactgaggagaacaagtcttctgcattttcttcctgccctgctcccaccttctcgcctctggctgcttggatagcttggtgactccttcctcaccctcctgcttctctgtctctccaagaagccagagctgcctctttccttccctggaagagattttatgggatcgcttcctgatagaagatgggaaggagagggcagaactttgcctgctgtcatatctgaagaatcactggttctttctgcatcccaggggcgtaactgatctgactccttgggctttttcctgtattgtggaatatagagtggaccattgcaggctgggtgtgggtgagggcttcggtaactgatgccggcagcagcgcctcatggagtggcaggggagctctgtctgtggaggggtagtagtttccgcttcctggaggtttgcagtgaggtgaggagagtaactttggtcagggattctcactagcagcgtcatggccaggatgctttacttatttgcaataccacctagtggatatggcaactgcagagcataaaaggggctcggaaaagcagtttttacaaagtatttaaaaggagagtatttaaatcataggtacctaagttggagcctgaggttgaaatatttggggtggagatttctagctttcctgagagctgctgcttggtggtagtgttttctctggaagtacagattcctgacattctgggtggaggggagcccaagtgagcctgaaggagttctgattatagagtcccgagcctcagtttctgactgcagaagagccagagatgttcatttcattgttgaccaccctagtgcttggtggactgtgcccttagctatcccactgtggctgccattgccagaaacattttggagaaccttttcttcccattgctctcagagcctgttcgagccattcaggtaaattggtctccattattacctggtcacaccagattttcccccagactcagcaccatccagtctgattccccgtttctgggctcagtttgactctaaatctgttttgctattttaaaaagtcaaacctggtccccagcagagcttgccacccggagactttcaggagaccgtgcaggctctgaagggagctcccagtcacagcagccgcctacttggagcaagggaaggctcccaagatgcctcctttgaaagccggtgctcaccaagatcagttcaggatcaatcattatccttgtagtcatgccttgatcagttctgagatgaagcagggaatgcaggcctgggttagtatcctgaggacacagggcccctggccttgatggcactgggctgtgctcaggtgaagcccacccgtgtctgggagagccttggcttttcagtgggcagcatgctcaactttacttgaagctcccaggtgccaaaccatttagtgccttggctgtttatcccactgccttggaagatggactcctctcatctctgagcctttacctagctgcttcctcatctacctgtggtgttgggaccaagcctccaatatctctgaatagcccactcctagcttggaaacagctataagggctgccctgccccttgtcaaatgatcaccaattcttggtggcttggctggggacaatgaacagtgtctgctggggtctgtgacacactgtttctggaacaaggaagggatggaaggctctacccctccgtggcagcccagcatttggccaactctgtatctgaacttgagctttctatggaacaaacaatggtcttagttttttaagagcctctgggtctctgattccatggagagtcaggagtagaattagtggaccagaaaccatgacatttgccatctaggtactctgctgttcagggtggaggcacagatgagcagagtggggtgatgttggttgtatgtgcatagaagtcccctggctccagagccatccagtggtgcttggttctctcttcctgcccaggtattgtgtgtggaccaagtgtttaggaaacaagcatagaagcattatgtcacaggaaggcctggcctctcactccttcacactaatgagccttctactgacccaagtttctttttctcgggcagcctgggaccactatgagcagagagatgggagtctgtgtaagaaggatgcaagtatcctttgatttggagtggacagagcaggtccttgcaaaggcagtgggttaaacaacgggatgtctgtgggacaggccagggaaggagggcagagacagggtctccagttcaccttgccgcagaactagcctaatcatccctgcttctggtcttggccacttggcaatcatggggaagttgactccccgcctcacttgggcttggagctggatacttgtggccacgcccaggataggttgccagagtttcattaggccgctgggtcgggctggaggcttgtgtacacctcggagcagtcgggcagcaggagggccggaagcctggttggtttgtatatgacctctcttgcccttgtgcactttccttgatttagcaaccttgacctgcactggccctcacagctgttggagggaagtagcctcttgcagggaaatattttcccctgccctggaatctcctatgtgcctgttaaagattccagggccaagaactcggcaggctgaggagcagctaggtaggtgggttatgcggttcaggactgcttctggaagggactgcctgtacttctgtaccaccgttgccctttacactttgctcagggcggggtgggggaagcattcaaacaaaacaaggaagggaactgtctggcaaagcataagtggatgcatccagagctcagtcccctttaatcttttgtctctgggcgttctgctgccttcctcataccggggactggcattccaggtcagcttggctgtggtcttagaggcagggagtgcctacccagtcctgcctcaggagcagggtgagtagctaaatacagacttaggcttttttttccccccttttaagatgcttgctcctctcccttttctttttaccaccctacctttattgttagtggttacaaagtgaccacatattatgtactttgctgtaaataaagacagacaaaaaggc

SEQ ID NO: 1914 - protein, 171 aa, Homo sapiens; identical to SEQ ID NO: 1910

SEQ ID NO: 1915 - DNA, 4884 bp, Homo sapiens
ctcgccgcctccgcctcggcgaatagcagcgcgctgcccgcccggattggagcagcagcatcacgctgacctctgcctgggatgtaaaccggaccagccgctgcgggcaaaggaaggctcttggctccttcgggaaacccagccccgtcaccgggctccgagcggctcgcaggcgagcgacagcggcctcagccccggcagcgcccagcggcggctgcggaaagcggagggagtccgacgcgggcgcgggcggggagcgtgcgtccgttcgcacaggcagcgggaggaggggcggcgcgaaccatggccggggacagcgagcagaccctgcagaaccaccagcagcccaacggcggcgagcccttccttataggcgtcagcgggggaacagctagcggcaagtcttccgtgtgtgctaagatcgtgcagctcctggggcagaatgaggtggactatcgccagaagcaggtggtcatcctgagccaggatagcttctaccgtgtccttacctcggagcagaaggccaaagccctgaagggccagttcaactttgaccacccggatgcctttgacaatgaactcattctcaaaacactcaaagaaatcactgaagggaaaacagtccagatccccgtgtatgactttgtctcccattcccggaaggaggagacagttactgtctatcccgcagacgtggtgctctttgaagggatcctggccttctactcccaggaggtacgagacctgttccagatgaagctttttgtggatacagatgcggacacccggctctcacgcagagtattaagggacatcagcgagagaggcagggatcttgagcagattttatctcagtacattacgttcgtcaagcctgcctttgaggaattctgcttgccaacaaagaagtatgctgatgtgatcatccctagaggtgcagataatctggtggccatcaacctcatcgtgcagcacatccaggacatcctgaatggagggccctccaaacggcagaccaatggctgtctcaacggctacaccccttcacgcaagaggcaggcatcggagtccagcagcaggccgcattgacccgtctccatcggaccccagcccctatctccaagagacagaggaggggtcaggaggcactgctcatctgtacatactgtttcctatgacattactgtatttaagaaaacaccatggagatgaaatgcctttgattttttttttctttttgtactttggaacgacaaaatgaaacagaacttgaccctgagcttaaataacaaaactgtgccaactactactggtgatgcctaattatgaatccaacgtgtaaccagttataaatacatatatatataaaaaaggatctatttttgtgtaaatgtacaaatactgtaaagctgtttgccataagtattttgcaggagggtctgtacttgagtgttttaggactggagctggaatttcaccaaggggaaattgcctgttgtgtcccagggtggggaggctcgggcatctgtgagagacagggagggtggctaaggtccagttgcttttgagtgccccgtggaacttgatgggaatggggttggaaaaccttgattgcctcctctgtcacatgccactcttggagctggagcttagtgatatgtcaatgagagatactcttgtcttttttttttttcttttcttttttttttttgagttgaaattaggtaaaatctcaactcaaaaatcaaactcagggaagaggcccactgaggagaacaagtcttctgcattttcttcctgccctgctcccaccttctcgcctctggctgcttggatagcttggtgactccttcctcaccctcctgcttctctgtctctccaagaagccagagctgcctctttccttccctggaagagattttatgggatcgcttcctgatagaagatgggaaggagagggcagaactttgcctgctgtcatatctgaagaatcactggttctttctgcatcccaggggcgtaactgatctgactccttgggctttttcctgtattgtggaatatagagtggaccattgcaggctgggtgtgggtgagggcttcggtaactgatgccggcagcagcgcctcatggagtggcaggggagctctgtctgtggaggggtagtagtttccgcttcctggaggtttgcagtgaggtgaggagagtaactttggtcagggattctcactagcagcgtcatggccaggatgctttacttatttgcaataccacctagtggatatggcaactgcagagcataaaaggggctcggaaaagcagtttttacaaagtatttaaaaggagagtatttaaatcataggtacctaagttggagcctgaggttgaaatatttggggtggagatttctagctttcctgagagctgctgcttggtggtagtgttttctctggaagtacagattcctgacattctgggtggaggggagcccaagtgagcctgaaggagttctgattatagagtcccgagcctcagtttctgactgcagaagagccagagatgttcatttcattgttgaccaccctagtgcttggtggactgtgcccttagctatcccactgtggctgccattgccagaaacattttggagaaccttttcttcccattgctctcagagcctgttcgagccattcaggtaaattggtctccattattacctggtcacaccagattttcccccagactcagcaccatccagtctgattccccgtttctgggctcagtttgactctaaatctgttttgctattttaaaaagtcaaacctggtccccagcagagcttgccacccggagactttcaggagaccgtgcaggctctgaagggagctcccagtcacagcagccgcctacttggagcaagggaaggctcccaagatgcctcctttgaaagccggtgctcaccaagatcagttcaggatcaatcattatccttgtagtcatgccttgatcagttctgagatgaagcagggaatgcaggcctgggttagtatcctgaggacacagggcccctggccttgatggcactgggctgtgctcaggtgaagcccacccgtgtctgggagagccttggcttttcagtgggcagcatgctcaactttacttgaagctcccaggtgccaaaccatttagtgccttggctgtttatcccactgccttggaagatggactcctctcatctctgagcctttacctagctgcttcctcatctacctgtggtgttgggaccaagcctccaatatctctgaatagcccactcctagcttggaaacagctataagggctgccctgccccttgtcaaatgatcaccaattcttggtggcttggctggggacaatgaacagtgtctgctggggtctgtgacacactgtttctggaacaaggaagggatggaaggctctacccctccgtggcagcccagcatttggccaactctgtatctgaacttgagctttctatggaacaaacaatggtcttagttttttaagagcctctgggtctctgattccatggagagtcaggagtagaattagtggaccagaaaccatgacatttgccatctaggtactctgctgttcagggtggaggcacagatgagcagagtggggtgatgttggttgtatgtgcatagaagtcccctggctccagagccatccagtggtgcttggttctctcttcctgcccaggtattgtgtgtggaccaagtgtttaggaaacaagcatagaagcattatgtcacaggaaggcctggcctctcactccttcacactaatgagccttctactgacccaagtttctttttctcgggcagcctgggaccactatgagcagagagatgggagtctgtgtaagaaggatgcaagtatcctttgatttggagtggacagagcaggtccttgcaaaggcagtgggttaaacaacgggatgtctgtgggacaggccagggaaggagggcagagacagggtctccagttcaccttgccgcagaactagcctaatcatccctgcttctggtcttggccacttggcaatcatggggaagttgactccccgcctcacttgggcttggagctggatacttgtggccacgcccaggataggttgccagagtttcattaggccgctgggtcgggctggaggcttgtgtacacctcggagcagtcgggcagcaggagggccggaagcctggttggtttgtatatgacctctcttgcccttgtgcactttccttgatttagcaaccttgacctgcactggccctcacagctgttggagggaagtagcctcttgcagggaaatattttcccctgccctggaatctcctatgtgcctgttaaagattccagggccaagaactcggcaggctgaggagcagctaggtaggtgggttatgcggttcaggactgcttctggaagggactgcctgtacttctgtaccaccgttgccctttacactttgctcagggcggggtgggggaagcattcaaacaaaacaaggaagggaactgtctggcaaagcataagtggatgcatccagagctcagtcccctttaatcttttgtctctgggcgttctgctgccttcctcataccggggactggcattccaggtcagcttggctgtggtcttagaggcagggagtgcctacccagtcctgcctcaggagcagggtgagtagctaaatacagacttaggcttttttttccccccttttaagatgcttgctcctctcccttttctttttaccaccctacctttattgttagtggttacaaagtgaccacatattatgtactttgctgtaaataaagacagacaaaaaggc

SEQ ID NO: 1916 - protein, 261 aa, Homo sapiens; identical to SEQ ID NO: 64

SEQ ID NO: 1917 - DNA, 433 bp, Homo sapiens
agatgtagtacttataaaatgaatgttacctctcttgggaaacagactttttttcttcgcaactctttggagagcatgtcccttgaggtgtgacattattttagctgtgtaacaattaactggatctgagttgttttacatcagctaaatatcagtctccttgagatttgggaaatatttaagtctcatcagcagtattttggggaagggggtgctcctgcagacagcagctgctgttttctgtttgtttgttcattgattgattgattgagacacagtctcgcttgtgctccaacattggcagtagagtgagactttgtctctaaaaaaccacaacattttaaaatttatttaatgtccctggattcctacaggtattgaattcctatgggtatgggattttgactgtggtcttttcctagtttctataact

SEQ ID NO: 1918 - protein, 45 aa, Homo sapiens
VVLHQLNISLLEIWEIFKSHQQYFGEGGAPADSSCCFLFVCSLID

SEQ ID NO: 1919 - DNA, 841 bp, Homo sapiens
gttgacaagagacattccagcccaccacttcccaagtaaagaattaaaatgcagcatgatggctaaggcaagggcctgcagaagaatgtaaaggagggaggaagagcaggggattcagagcaggaaggaggagacagttactgtctatcccgcagacgtggtgctctttgaagggatcctggccttctactcccaggaggtacgagacctgttccagatgaagctttttgtggatacagatgcggacacccggctctcacgcagagtattaagggacatcagcgagagaggcagggatcttgagcagattttatctcagtacattacgttcgtcaagcctgcctttgaggaattctgcttgccaacaaagaagtatgctgatgtgatcatccctagaggtgcagataatctggtggccatcaacctcatcgtgcagcacatccaggacatcctgaatggagggccctccaaacggcagaccaatggctgtctcaacggctacaccccttcacgcaagaggcaggcatcggagtccagcagcaggccgcattgacccgtctccatcggaccccagcccctatctccaagagacagaggaggggtcaggaggcactgctcatctgtacatactgtttcctatgacattactgtatttaagaaaacaccatggagatgaaatgcctttgattttttttttctttttgtactttggaacgacaaaatgaaacagaacttgaccctgagcttaaataacaaaactgtgccaactactactggtgatgcctaattatgaatccaacgtgtaaccagttataaatacatatatatataaaaaaggatc

SEQ ID NO: 1920 - protein, 111 aa, Homo sapiens
MKLFVDTDADTRLSRRVLRDISERGRDLEQILSQYITFVKPAFEEFCLPTKKYADVIIPRGADNLVAINLIVQHIQDILNGGPSKRQTNGCLNGYTPSRKRQASESSSRPH

SEQ ID NO: 1921 - DNA, 4348 bp, Homo sapiens
gttgacaagagacattccagcccaccacttcccaagtaaagaattaaaatgcagcatgatggctaaggcaagggcctgcagaagaatgtaaaggagggaggaagagcaggggattcagagcaggaaggaggagacagttactgtctatcccgcagacgtggtgctctttgaagggatcctggccttctactcccaggaggtacgagacctgttccagatgaagctttttgtggatacagatgcggacacccggctctcacgcagagtattaagggacatcagcgagagaggcagggatcttgagcagattttatctcagtacattacgttcgtcaagcctgcctttgaggaattctgcttgccaacaaagaagtatgctgatgtgatcatccctagaggtgcagataatctggtggccatcaacctcatcgtgcagcacatccaggacatcctgaatggagggccctccaaacggcagaccaatggctgtctcaacggctacaccccttcacgcaagaggcaggcatcggagtccagcagcaggccgcattgacccgtctccatcggaccccagcccctatctccaagagacagaggaggggtcaggaggcactgctcatctgtacatactgtttcctatgacattactgtatttaagaaaacaccatggagatgaaatgcctttgattttttttttctttttgtactttggaacgacaaaatgaaacagaacttgaccctgagcttaaataacaaaactgtgccaactactactggtgatgcctaattatgaatccaacgtgtaaccagttataaatacatatatatataaaaaaggatctatttttgtgtaaatgtacaaatactgtaaagctgtttgccataagtattttgcaggagggtctgtacttgagtgttttaggactggagctggaatttcaccaaggggaaattgcctgttgtgtcccagggtggggaggctcgggcatctgtgagagacagggagggtggctaaggtccagttgcttttgagtgccccgtggaacttgatgggaatggggttggaaaaccttgattgcctcctctgtcacatgccactcttggagctggagcttagtgatatgtcaatgagagatactcttgtcttttttttttttcttttcttttttttttttgagttgaaattaggtaaaatctcaactcaaaaatcaaactcagggaagaggcccactgaggagaacaagtcttctgcattttcttcctgccctgctcccaccttctcgcctctggctgcttggatagcttggtgactccttcctcaccctcctgcttctctgtctctccaagaagccagagctgcctctttccttccctggaagagattttatgggatcgcttcctgatagaagatgggaaggagagggcagaactttgcctgctgtcatatctgaagaatcactggttctttctgcatcccaggggcgtaactgatctgactccttgggctttttcctgtattgtggaatatagagtggaccattgcaggctgggtgtgggtgagggcttcggtaactgatgccggcagcagcgcctcatggagtggcaggggagctctgtctgtggaggggtagtagtttccgcttcctggaggtttgcagtgaggtgaggagagtaactttggtcagggattctcactagcagcgtcatggccaggatgctttacttatttgcaataccacctagtggatatggcaactgcagagcataaaaggggctcggaaaagcagtttttacaaagtatttaaaaggagagtatttaaatcataggtacctaagttggagcctgaggttgaaatatttggggtggagatttctagctttcctgagagctgctgcttggtggtagtgttttctctggaagtacagattcctgacattctgggtggaggggagcccaagtgagcctgaaggagttctgattatagagtcccgagcctcagtttctgactgcagaagagccagagatgttcatttcattgttgaccaccctagtgcttggtggactgtgcccttagctatcccactgtggctgccattgccagaaacattttggagaaccttttcttcccattgctctcagagcctgttcgagccattcaggtaaattggtctccattattacctggtcacaccagattttcccccagactcagcaccatccagtctgattccccgtttctgggctcagtttgactctaaatctgttttgctattttaaaaagtcaaacctggtccccagcagagcttgccacccggagactttcaggagaccgtgcaggctctgaagggagctcccagtcacagcagccgcctacttggagcaagggaaggctcccaagatgcctcctttgaaagccggtgctcaccaagatcagttcaggatcaatcattatccttgtagtcatgccttgatcagttctgagatgaagcagggaatgcaggcctgggttagtatcctgaggacacagggcccctggccttgatggcactgggctgtgctcaggtgaagcccacccgtgtctgggagagccttggcttttcagtgggcagcatgctcaactttacttgaagctcccaggtgccaaaccatttagtgccttggctgtttatcccactgccttggaagatggactcctctcatctctgagcctttacctagctgcttcctcatctacctgtggtgttgggaccaagcctccaatatctctgaatagcccactcctagcttggaaacagctataagggctgccctgccccttgtcaaatgatcaccaattcttggtggcttggctggggacaatgaacagtgtctgctggggtctgtgacacactgtttctggaacaaggaagggatggaaggctctacccctccgtggcagcccagcatttggccaactctgtatctgaacttgagctttctatggaacaaacaatggtcttagttttttaagagcctctgggtctctgattccatggagagtcaggagtagaattagtggaccagaaaccatgacatttgccatctaggtactctgctgttcagggtggaggcacagatgagcagagtggggtgatgttggttgtatgtgcatagaagtcccctggctccagagccatccagtggtgcttggttctctcttcctgcccaggtattgtgtgtggaccaagtgtttaggaaacaagcatagaagcattatgtcacaggaaggcctggcctctcactccttcacactaatgagccttctactgacccaagtttctttttctcgggcagcctgggaccactatgagcagagagatgggagtctgtgtaagaaggatgcaagtatcctttgatttggagtggacagagcaggtccttgcaaaggcagtgggttaaacaacgggatgtctgtgggacaggccagggaaggagggcagagacagggtctccagttcaccttgccgcagaactagcctaatcatccctgcttctggtcttggccacttggcaatcatggggaagttgactccccgcctcacttgggcttggagctggatacttgtggccacgcccaggataggttgccagagtttcattaggccgctgggtcgggctggaggcttgtgtacacctcggagcagtcgggcagcaggagggccggaagcctggttggtttgtatatgacctctcttgcccttgtgcactttccttgatttagcaaccttgacctgcactggccctcacagctgttggagggaagtagcctcttgcagggaaatattttcccctgccctggaatctcctatgtgcctgttaaagattccagggccaagaactcggcaggctgaggagcagctaggtaggtgggttatgcggttcaggactgcttctggaagggactgcctgtacttctgtaccaccgttgccctttacactttgctcagggcggggtgggggaagcattcaaacaaaacaaggaagggaactgtctggcaaagcataagtggatgcatccagagctcagtcccctttaatcttttgtctctgggcgttctgctgccttcctcataccggggactggcattccaggtcagcttggctgtggtcttagaggcagggagtgcctacccagtcctgcctcaggagcagggtgagtagctaaatacagacttaggcttttttttccccccttttaagatgcttgctcctctcccttttctttttaccaccctacctttattgttagtggttacaaagtgaccacatattatgtactttgctgtaaataaagacagacaaaaaggc

SEQ ID NO: 1922 - protein, 111 aa, Homo sapiens; identical to SEQ ID NO: 1920

SEQ ID NO: 1923 - DNA, 5126 bp, Homo sapiens
ctaagtggtatattatgccaggtatgactccttgcacattctgggctagtagttgctcaataaatttgttgttgttttttaaaaactctgagctgttatgacagtttttagacctgcgtttggacttgggaaatgattaattctaacttcttaaggcaccaccaacaaattaggcagttaattttctccttccgaaggaaaaccacttttcctttttagtatttatcagttaggcatcctaaaatgctcttaatatctagtgtcagtacagattgaacatccctaatctaaaaacccaaaatgtgaaatgctccaaaatctgaaactttttgagtgccagtgtgacgttcaaaggaaatgctcattggagcatttcagattttggattttcatgttagggaggctcattgtagatcctctctccccctgccatattagggatgccctaaatataatgcagatattccaaaatctgaaaaaaatccaaaattcaaaaattctaaacacctaagcatttcatataagggatacttaacctggatatgtaaacttagtgcagccattgtgttctctgttagtgtgttcaagtggactcttgcacatacattcactttatttttggacaaagccttcccacactctccttggtgtaggggagttgcctagagagtggctcactatttcacttacccattggttctgttttctgaacttctctaggttgccttcttatgcacaatgacaatgggcacaccattttctggcagctgacattcctctagactggtgcttctctaccctggctgcatgttagaaatatcttgggagcttctaaatagtgttgaagttctagctccacttcagactcattaaatcagagctccttgggggtaggatccaggaaggaggagacagttactgtctatcccgcagacgtggtgctctttgaagggatcctggccttctactcccaggaggtacgagacctgttccagatgaagctttttgtggatacagatgcggacacccggctctcacgcagagtattaagggacatcagcgagagaggcagggatcttgagcagattttatctcagtacattacgttcgtcaagcctgcctttgaggaattctgcttgccaacaaagaagtatgctgatgtgatcatccctagaggtgcagataatctggtggccatcaacctcatcgtgcagcacatccaggacatcctgaatggagggccctccaaacggcagaccaatggctgtctcaacggctacaccccttcacgcaagaggcaggcatcggagtccagcagcaggccgcattgacccgtctccatcggaccccagcccctatctccaagagacagaggaggggtcaggaggcactgctcatctgtacatactgtttcctatgacattactgtatttaagaaaacaccatggagatgaaatgcctttgattttttttttctttttgtactttggaacgacaaaatgaaacagaacttgaccctgagcttaaataacaaaactgtgccaactactactggtgatgcctaattatgaatccaacgtgtaaccagttataaatacatatatatataaaaaaggatctatttttgtgtaaatgtacaaatactgtaaagctgtttgccataagtattttgcaggagggtctgtacttgagtgttttaggactggagctggaatttcaccaaggggaaattgcctgttgtgtcccagggtggggaggctcgggcatctgtgagagacagggagggtggctaaggtccagttgcttttgagtgccccgtggaacttgatgggaatggggttggaaaaccttgattgcctcctctgtcacatgccactcttggagctggagcttagtgatatgtcaatgagagatactcttgtcttttttttttttcttttcttttttttttttgagttgaaattaggtaaaatctcaactcaaaaatcaaactcagggaagaggcccactgaggagaacaagtcttctgcattttcttcctgccctgctcccaccttctcgcctctggctgcttggatagcttggtgactccttcctcaccctcctgcttctctgtctctccaagaagccagagctgcctctttccttccctggaagagattttatgggatcgcttcctgatagaagatgggaaggagagggcagaactttgcctgctgtcatatctgaagaatcactggttctttctgcatcccaggggcgtaactgatctgactccttgggctttttcctgtattgtggaatatagagtggaccattgcaggctgggtgtgggtgagggcttcggtaactgatgccggcagcagcgcctcatggagtggcaggggagctctgtctgtggaggggtagtagtttccgcttcctggaggtttgcagtgaggtgaggagagtaactttggtcagggattctcactagcagcgtcatggccaggatgctttacttatttgcaataccacctagtggatatggcaactgcagagcataaaaggggctcggaaaagcagtttttacaaagtatttaaaaggagagtatttaaatcataggtacctaagttggagcctgaggttgaaatatttggggtggagatttctagctttcctgagagctgctgcttggtggtagtgttttctctggaagtacagattcctgacattctgggtggaggggagcccaagtgagcctgaaggagttctgattatagagtcccgagcctcagtttctgactgcagaagagccagagatgttcatttcattgttgaccaccctagtgcttggtggactgtgcccttagctatcccactgtggctgccattgccagaaacattttggagaaccttttcttcccattgctctcagagcctgttcgagccattcaggtaaattggtctccattattacctggtcacaccagattttcccccagactcagcaccatccagtctgattccccgtttctgggctcagtttgactctaaatctgttttgctattttaaaaagtcaaacctggtccccagcagagcttgccacccggagactttcaggagaccgtgcaggctctgaagggagctcccagtcacagcagccgcctacttggagcaagggaaggctcccaagatgcctcctttgaaagccggtgctcaccaagatcagttcaggatcaatcattatccttgtagtcatgccttgatcagttctgagatgaagcagggaatgcaggcctgggttagtatcctgaggacacagggcccctggccttgatggcactgggctgtgctcaggtgaagcccacccgtgtctgggagagccttggcttttcagtgggcagcatgctcaactttacttgaagctcccaggtgccaaaccatttagtgccttggctgtttatcccactgccttggaagatggactcctctcatctctgagcctttacctagctgcttcctcatctacctgtggtgttgggaccaagcctccaatatctctgaatagcccactcctagcttggaaacagctataagggctgccctgccccttgtcaaatgatcaccaattcttggtggcttggctggggacaatgaacagtgtctgctggggtctgtgacacactgtttctggaacaaggaagggatggaaggctctacccctccgtggcagcccagcatttggccaactctgtatctgaacttgagctttctatggaacaaacaatggtcttagttttttaagagcctctgggtctctgattccatggagagtcaggagtagaattagtggaccagaaaccatgacatttgccatctaggtactctgctgttcagggtggaggcacagatgagcagagtggggtgatgttggttgtatgtgcatagaagtcccctggctccagagccatccagtggtgcttggttctctcttcctgcccaggtattgtgtgtggaccaagtgtttaggaaacaagcatagaagcattatgtcacaggaaggcctggcctctcactccttcacactaatgagccttctactgacccaagtttctttttctcgggcagcctgggaccactatgagcagagagatgggagtctgtgtaagaaggatgcaagtatcctttgatttggagtggacagagcaggtccttgcaaaggcagtgggttaaacaacgggatgtctgtgggacaggccagggaaggagggcagagacagggtctccagttcaccttgccgcagaactagcctaatcatccctgcttctggtcttggccacttggcaatcatggggaagttgactccccgcctcacttgggcttggagctggatacttgtggccacgcccaggataggttgccagagtttcattaggccgctgggtcgggctggaggcttgtgtacacctcggagcagtcgggcagcaggagggccggaagcctggttggtttgtatatgacctctcttgcccttgtgcactttccttgatttagcaaccttgacctgcactggccctcacagctgttggagggaagtagcctcttgcagggaaatattttcccctgccctggaatctcctatgtgcctgttaaagattccagggccaagaactcggcaggctgaggagcagctaggtaggtgggttatgcggttcaggactgcttctggaagggactgcctgtacttctgtaccaccgttgccctttacactttgctcagggcggggtgggggaagcattcaaacaaaacaaggaagggaactgtctggcaaagcataagtggatgcatccagagctcagtcccctttaatcttttgtctctgggcgttctgctgccttcctcataccggggactggcattccaggtcagcttggctgtggtcttagaggcagggagtgcctacccagtcctgcctcaggagcagggtgagtagctaaatacagacttaggcttttttttccccccttttaagatgcttgctcctctcccttttctttttaccaccctacctttattgttagtggttacaaagtgaccacatattatgtactttgctgtaaataaagacagacaaaaaggc

SEQ ID NO: 1924 - protein, 111 aa, Homo sapiens; identical to SEQ ID NO: 1920

SEQ ID NO: 1925 - DNA, 1619 bp, Homo sapiens
ctaagtggtatattatgccaggtatgactccttgcacattctgggctagtagttgctcaataaatttgttgttgttttttaaaaactctgagctgttatgacagtttttagacctgcgtttggacttgggaaatgattaattctaacttcttaaggcaccaccaacaaattaggcagttaattttctccttccgaaggaaaaccacttttcctttttagtatttatcagttaggcatcctaaaatgctcttaatatctagtgtcagtacagattgaacatccctaatctaaaaacccaaaatgtgaaatgctccaaaatctgaaactttttgagtgccagtgtgacgttcaaaggaaatgctcattggagcatttcagattttggattttcatgttagggaggctcattgtagatcctctctccccctgccatattagggatgccctaaatataatgcagatattccaaaatctgaaaaaaatccaaaattcaaaaattctaaacacctaagcatttcatataagggatacttaacctggatatgtaaacttagtgcagccattgtgttctctgttagtgtgttcaagtggactcttgcacatacattcactttatttttggacaaagccttcccacactctccttggtgtaggggagttgcctagagagtggctcactatttcacttacccattggttctgttttctgaacttctctaggttgccttcttatgcacaatgacaatgggcacaccattttctggcagctgacattcctctagactggtgcttctctaccctggctgcatgttagaaatatcttgggagcttctaaatagtgttgaagttctagctccacttcagactcattaaatcagagctccttgggggtaggatccaggaaggaggagacagttactgtctatcccgcagacgtggtgctctttgaagggatcctggccttctactcccaggaggtacgagacctgttccagatgaagctttttgtggatacagatgcggacacccggctctcacgcagagtattaagggacatcagcgagagaggcagggatcttgagcagattttatctcagtacattacgttcgtcaagcctgcctttgaggaattctgcttgccaacaaagaagtatgctgatgtgatcatccctagaggtgcagataatctggtggccatcaacctcatcgtgcagcacatccaggacatcctgaatggagggccctccaaacggcagaccaatggctgtctcaacggctacaccccttcacgcaagaggcaggcatcggagtccagcagcaggccgcattgacccgtctccatcggaccccagcccctatctccaagagacagaggaggggtcaggaggcactgctcatctgtacatactgtttcctatgacattactgtatttaagaaaacaccatggagatgaaatgcctttgattttttttttctttttgtactttggaacgacaaaatgaaacagaacttgaccctgagcttaaataacaaaactgtgccaactactactggtgatgcctaattatgaatccaacgtgtaaccagttataaatacatatatatataaaaaaggatc

SEQ ID NO: 1926 - protein, 111 aa, Homo sapiens; identical to SEQ ID NO: 1920

SEQ ID NO: 1927 - DNA, 1344 bp, Homo sapiens
gtggccactttgttggtttggggtagagccagaccagacagacgtcgggattctgtacttcctcacaaatgctttctcgtctgtatcctctttcccaaaacttttctttattttccctccttcccttccccttctgtcctttcctccctcctttcaattgcctcaggactggcggggaggggatggagttgttgagagaaaactgtgagtttctgtttttaaagttcagagtgttaggttccataaatgccaggccatgagagcattcctggagacgccttcagagaaaaaaagaaatcacatctgtttttgtctgcctttattcttcattcaacagcaggtttttttaattccaaggagaaggatgtctgccgtgtatttctgtttcatggtgaaagctcagaagtggtcaaaggagacctttgtcccggccgtgatcacccttggctctttggtggtggtccgagggctctgtaagaccatattagccaagtctttagcccccgcttgaagtctgtgggggcaaggaacccagaacccagcccagccagatgttctggcccttgttctctgtcccttgctagcccctgcctggcttggcccattatctgctctgtgctttgcaggaaggaggagacagttactgtctatcccgcagacgtggtgctctttgaagggatcctggccttctactcccaggaggtacgagacctgttccagatgaagctttttgtggatacagatgcggacacccggctctcacgcagagtattaagggacatcagcgagagaggcagggatcttgagcagattttatctcagtacattacgttcgtcaagcctgcctttgaggaattctgcttgccaacaaagaagtatgctgatgtgatcatccctagaggtgcagataatctggtggccatcaacctcatcgtgcagcacatccaggacatcctgaatggagggccctccaaacggcagaccaatggctgtctcaacggctacaccccttcacgcaagaggcaggcatcggagtccagcagcaggccgcattgacccgtctccatcggaccccagcccctatctccaagagacagaggaggggtcaggaggcactgctcatctgtacatactgtttcctatgacattactgtatttaagaaaacaccatggagatgaaatgcctttgattttttttttctttttgtactttggaacgacaaaatgaaacagaacttgaccctgagcttaaataacaaaactgtgccaactactactggtgatgcctaattatgaatccaacgtgtaaccagttataaatacatatatatataaaaaaggatc

SEQ ID NO: 1928 - protein, 111 aa, Homo sapiens; identical to SEQ ID NO: 1920

SEQ ID NO: 1929 - DNA, 4851 bp, Homo sapiens
gtggccactttgttggtttggggtagagccagaccagacagacgtcgggattctgtacttcctcacaaatgctttctcgtctgtatcctctttcccaaaacttttctttattttccctccttcccttccccttctgtcctttcctccctcctttcaattgcctcaggactggcggggaggggatggagttgttgagagaaaactgtgagtttctgtttttaaagttcagagtgttaggttccataaatgccaggccatgagagcattcctggagacgccttcagagaaaaaaagaaatcacatctgtttttgtctgcctttattcttcattcaacagcaggtttttttaattccaaggagaaggatgtctgccgtgtatttctgtttcatggtgaaagctcagaagtggtcaaaggagacctttgtcccggccgtgatcacccttggctctttggtggtggtccgagggctctgtaagaccatattagccaagtctttagcccccgcttgaagtctgtgggggcaaggaacccagaacccagcccagccagatgttctggcccttgttctctgtcccttgctagcccctgcctggcttggcccattatctgctctgtgctttgcaggaaggaggagacagttactgtctatcccgcagacgtggtgctctttgaagggatcctggccttctactcccaggaggtacgagacctgttccagatgaagctttttgtggatacagatgcggacacccggctctcacgcagagtattaagggacatcagcgagagaggcagggatcttgagcagattttatctcagtacattacgttcgtcaagcctgcctttgaggaattctgcttgccaacaaagaagtatgctgatgtgatcatccctagaggtgcagataatctggtggccatcaacctcatcgtgcagcacatccaggacatcctgaatggagggccctccaaacggcagaccaatggctgtctcaacggctacaccccttcacgcaagaggcaggcatcggagtccagcagcaggccgcattgacccgtctccatcggaccccagcccctatctccaagagacagaggaggggtcaggaggcactgctcatctgtacatactgtttcctatgacattactgtatttaagaaaacaccatggagatgaaatgcctttgattttttttttctttttgtactttggaacgacaaaatgaaacagaacttgaccctgagcttaaataacaaaactgtgccaactactactggtgatgcctaattatgaatccaacgtgtaaccagttataaatacatatatatataaaaaaggatctatttttgtgtaaatgtacaaatactgtaaagctgtttgccataagtattttgcaggagggtctgtacttgagtgttttaggactggagctggaatttcaccaaggggaaattgcctgttgtgtcccagggtggggaggctcgggcatctgtgagagacagggagggtggctaaggtccagttgcttttgagtgccccgtggaacttgatgggaatggggttggaaaaccttgattgcctcctctgtcacatgccactcttggagctggagcttagtgatatgtcaatgagagatactcttgtcttttttttttttcttttcttttttttttttgagttgaaattaggtaaaatctcaactcaaaaatcaaactcagggaagaggcccactgaggagaacaagtcttctgcattttcttcctgccctgctcccaccttctcgcctctggctgcttggatagcttggtgactccttcctcaccctcctgcttctctgtctctccaagaagccagagctgcctctttccttccctggaagagattttatgggatcgcttcctgatagaagatgggaaggagagggcagaactttgcctgctgtcatatctgaagaatcactggttctttctgcatcccaggggcgtaactgatctgactccttgggctttttcctgtattgtggaatatagagtggaccattgcaggctgggtgtgggtgagggcttcggtaactgatgccggcagcagcgcctcatggagtggcaggggagctctgtctgtggaggggtagtagtttccgcttcctggaggtttgcagtgaggtgaggagagtaactttggtcagggattctcactagcagcgtcatggccaggatgctttacttatttgcaataccacctagtggatatggcaactgcagagcataaaaggggctcggaaaagcagtttttacaaagtatttaaaaggagagtatttaaatcataggtacctaagttggagcctgaggttgaaatatttggggtggagatttctagctttcctgagagctgctgcttggtggtagtgttttctctggaagtacagattcctgacattctgggtggaggggagcccaagtgagcctgaaggagttctgattatagagtcccgagcctcagtttctgactgcagaagagccagagatgttcatttcattgttgaccaccctagtgcttggtggactgtgcccttagctatcccactgtggctgccattgccagaaacattttggagaaccttttcttcccattgctctcagagcctgttcgagccattcaggtaaattggtctccattattacctggtcacaccagattttcccccagactcagcaccatccagtctgattccccgtttctgggctcagtttgactctaaatctgttttgctattttaaaaagtcaaacctggtccccagcagagcttgccacccggagactttcaggagaccgtgcaggctctgaagggagctcccagtcacagcagccgcctacttggagcaagggaaggctcccaagatgcctcctttgaaagccggtgctcaccaagatcagttcaggatcaatcattatccttgtagtcatgccttgatcagttctgagatgaagcagggaatgcaggcctgggttagtatcctgaggacacagggcccctggccttgatggcactgggctgtgctcaggtgaagcccacccgtgtctgggagagccttggcttttcagtgggcagcatgctcaactttacttgaagctcccaggtgccaaaccatttagtgccttggctgtttatcccactgccttggaagatggactcctctcatctctgagcctttacctagctgcttcctcatctacctgtggtgttgggaccaagcctccaatatctctgaatagcccactcctagcttggaaacagctataagggctgccctgccccttgtcaaatgatcaccaattcttggtggcttggctggggacaatgaacagtgtctgctggggtctgtgacacactgtttctggaacaaggaagggatggaaggctctacccctccgtggcagcccagcatttggccaactctgtatctgaacttgagctttctatggaacaaacaatggtcttagttttttaagagcctctgggtctctgattccatggagagtcaggagtagaattagtggaccagaaaccatgacatttgccatctaggtactctgctgttcagggtggaggcacagatgagcagagtggggtgatgttggttgtatgtgcatagaagtcccctggctccagagccatccagtggtgcttggttctctcttcctgcccaggtattgtgtgtggaccaagtgtttaggaaacaagcatagaagcattatgtcacaggaaggcctggcctctcactccttcacactaatgagccttctactgacccaagtttctttttctcgggcagcctgggaccactatgagcagagagatgggagtctgtgtaagaaggatgcaagtatcctttgatttggagtggacagagcaggtccttgcaaaggcagtgggttaaacaacgggatgtctgtgggacaggccagggaaggagggcagagacagggtctccagttcaccttgccgcagaactagcctaatcatccctgcttctggtcttggccacttggcaatcatggggaagttgactccccgcctcacttgggcttggagctggatacttgtggccacgcccaggataggttgccagagtttcattaggccgctgggtcgggctggaggcttgtgtacacctcggagcagtcgggcagcaggagggccggaagcctggttggtttgtatatgacctctcttgcccttgtgcactttccttgatttagcaaccttgacctgcactggccctcacagctgttggagggaagtagcctcttgcagggaaatattttcccctgccctggaatctcctatgtgcctgttaaagattccagggccaagaactcggcaggctgaggagcagctaggtaggtgggttatgcggttcaggactgcttctggaagggactgcctgtacttctgtaccaccgttgccctttacactttgctcagggcggggtgggggaagcattcaaacaaaacaaggaagggaactgtctggcaaagcataagtggatgcatccagagctcagtcccctttaatcttttgtctctgggcgttctgctgccttcctcataccggggactggcattccaggtcagcttggctgtggtcttagaggcagggagtgcctacccagtcctgcctcaggagcagggtgagtagctaaatacagacttaggcttttttttccccccttttaagatgcttgctcctctcccttttctttttaccaccctacctttattgttagtggttacaaagtgaccacatattatgtactttgctgtaaataaagacagacaaaaaggc

SEQ ID NO: 1930 - protein, 111 aa, Homo sapiens; identical to SEQ ID NO: 1920

SEQ ID NO: 1931 - DNA, 784 bp, Homo sapiens
ttggtttggggtagagccagaccagacagacgtcgggattctgtacttcctcacaaatgctttctcgaaggaggagacagttactgtctatcccgcagacgtggtgctctttgaagggatcctggccttctactcccaggaggtacgagacctgttccagatgaagctttttgtggatacagatgcggacacccggctctcacgcagagtattaagggacatcagcgagagaggcagggatcttgagcagattttatctcagtacattacgttcgtcaagcctgcctttgaggaattctgcttgccaacaaagaagtatgctgatgtgatcatccctagaggtgcagataatctggtggccatcaacctcatcgtgcagcacatccaggacatcctgaatggagggccctccaaacggcagaccaatggctgtctcaacggctacaccccttcacgcaagaggcaggcatcggagtccagcagcaggccgcattgacccgtctccatcggaccccagcccctatctccaagagacagaggaggggtcaggaggcactgctcatctgtacatactgtttcctatgacattactgtatttaagaaaacaccatggagatgaaatgcctttgattttttttttctttttgtactttggaacgacaaaatgaaacagaacttgaccctgagcttaaataacaaaactgtgccaactactactggtgatgcctaattatgaatccaacgtgtaaccagttataaatacatatatatataaaaaaggatc

SEQ ID NO: 1932 - protein, 111 aa, Homo sapiens; identical to SEQ ID NO: 1920

SEQ ID NO: 1933 - DNA, 4291 bp, Homo sapiens
ttggtttggggtagagccagaccagacagacgtcgggattctgtacttcctcacaaatgctttctcgaaggaggagacagttactgtctatcccgcagacgtggtgctctttgaagggatcctggccttctactcccaggaggtacgagacctgttccagatgaagctttttgtggatacagatgcggacacccggctctcacgcagagtattaagggacatcagcgagagaggcagggatcttgagcagattttatctcagtacattacgttcgtcaagcctgcctttgaggaattctgcttgccaacaaagaagtatgctgatgtgatcatccctagaggtgcagataatctggtggccatcaacctcatcgtgcagcacatccaggacatcctgaatggagggccctccaaacggcagaccaatggctgtctcaacggctacaccccttcacgcaagaggcaggcatcggagtccagcagcaggccgcattgacccgtctccatcggaccccagcccctatctccaagagacagaggaggggtcaggaggcactgctcatctgtacatactgtttcctatgacattactgtatttaagaaaacaccatggagatgaaatgcctttgattttttttttctttttgtactttggaacgacaaaatgaaacagaacttgaccctgagcttaaataacaaaactgtgccaactactactggtgatgcctaattatgaatccaacgtgtaaccagttataaatacatatatatataaaaaaggatctatttttgtgtaaatgtacaaatactgtaaagctgtttgccataagtattttgcaggagggtctgtacttgagtgttttaggactggagctggaatttcaccaaggggaaattgcctgttgtgtcccagggtggggaggctcgggcatctgtgagagacagggagggtggctaaggtccagttgcttttgagtgccccgtggaacttgatgggaatggggttggaaaaccttgattgcctcctctgtcacatgccactcttggagctggagcttagtgatatgtcaatgagagatactcttgtcttttttttttttcttttcttttttttttttgagttgaaattaggtaaaatctcaactcaaaaatcaaactcagggaagaggcccactgaggagaacaagtcttctgcattttcttcctgccctgctcccaccttctcgcctctggctgcttggatagcttggtgactccttcctcaccctcctgcttctctgtctctccaagaagccagagctgcctctttccttccctggaagagattttatgggatcgcttcctgatagaagatgggaaggagagggcagaactttgcctgctgtcatatctgaagaatcactggttctttctgcatcccaggggcgtaactgatctgactccttgggctttttcctgtattgtggaatatagagtggaccattgcaggctgggtgtgggtgagggcttcggtaactgatgccggcagcagcgcctcatggagtggcaggggagctctgtctgtggaggggtagtagtttccgcttcctggaggtttgcagtgaggtgaggagagtaactttggtcagggattctcactagcagcgtcatggccaggatgctttacttatttgcaataccacctagtggatatggcaactgcagagcataaaaggggctcggaaaagcagtttttacaaagtatttaaaaggagagtatttaaatcataggtacctaagttggagcctgaggttgaaatatttggggtggagatttctagctttcctgagagctgctgcttggtggtagtgttttctctggaagtacagattcctgacattctgggtggaggggagcccaagtgagcctgaaggagttctgattatagagtcccgagcctcagtttctgactgcagaagagccagagatgttcatttcattgttgaccaccctagtgcttggtggactgtgcccttagctatcccactgtggctgccattgccagaaacattttggagaaccttttcttcccattgctctcagagcctgttcgagccattcaggtaaattggtctccattattacctggtcacaccagattttcccccagactcagcaccatccagtctgattccccgtttctgggctcagtttgactctaaatctgttttgctattttaaaaagtcaaacctggtccccagcagagcttgccacccggagactttcaggagaccgtgcaggctctgaagggagctcccagtcacagcagccgcctacttggagcaagggaaggctcccaagatgcctcctttgaaagccggtgctcaccaagatcagttcaggatcaatcattatccttgtagtcatgccttgatcagttctgagatgaagcagggaatgcaggcctgggttagtatcctgaggacacagggcccctggccttgatggcactgggctgtgctcaggtgaagcccacccgtgtctgggagagccttggcttttcagtgggcagcatgctcaactttacttgaagctcccaggtgccaaaccatttagtgccttggctgtttatcccactgccttggaagatggactcctctcatctctgagcctttacctagctgcttcctcatctacctgtggtgttgggaccaagcctccaatatctctgaatagcccactcctagcttggaaacagctataagggctgccctgccccttgtcaaatgatcaccaattcttggtggcttggctggggacaatgaacagtgtctgctggggtctgtgacacactgtttctggaacaaggaagggatggaaggctctacccctccgtggcagcccagcatttggccaactctgtatctgaacttgagctttctatggaacaaacaatggtcttagttttttaagagcctctgggtctctgattccatggagagtcaggagtagaattagtggaccagaaaccatgacatttgccatctaggtactctgctgttcagggtggaggcacagatgagcagagtggggtgatgttggttgtatgtgcatagaagtcccctggctccagagccatccagtggtgcttggttctctcttcctgcccaggtattgtgtgtggaccaagtgtttaggaaacaagcatagaagcattatgtcacaggaaggcctggcctctcactccttcacactaatgagccttctactgacccaagtttctttttctcgggcagcctgggaccactatgagcagagagatgggagtctgtgtaagaaggatgcaagtatcctttgatttggagtggacagagcaggtccttgcaaaggcagtgggttaaacaacgggatgtctgtgggacaggccagggaaggagggcagagacagggtctccagttcaccttgccgcagaactagcctaatcatccctgcttctggtcttggccacttggcaatcatggggaagttgactccccgcctcacttgggcttggagctggatacttgtggccacgcccaggataggttgccagagtttcattaggccgctgggtcgggctggaggcttgtgtacacctcggagcagtcgggcagcaggagggccggaagcctggttggtttgtatatgacctctcttgcccttgtgcactttccttgatttagcaaccttgacctgcactggccctcacagctgttggagggaagtagcctcttgcagggaaatattttcccctgccctggaatctcctatgtgcctgttaaagattccagggccaagaactcggcaggctgaggagcagctaggtaggtgggttatgcggttcaggactgcttctggaagggactgcctgtacttctgtaccaccgttgccctttacactttgctcagggcggggtgggggaagcattcaaacaaaacaaggaagggaactgtctggcaaagcataagtggatgcatccagagctcagtcccctttaatcttttgtctctgggcgttctgctgccttcctcataccggggactggcattccaggtcagcttggctgtggtcttagaggcagggagtgcctacccagtcctgcctcaggagcagggtgagtagctaaatacagacttaggcttttttttccccccttttaagatgcttgctcctctcccttttctttttaccaccctacctttattgttagtggttacaaagtgaccacatattatgtactttgctgtaaataaagacagacaaaaaggc

SEQ ID NO: 1934 - protein, 111 aa, Homo sapiens; identical to SEQ ID NO: 1920

SEQ ID NO: 1935 - DNA, 491 bp, Homo sapiens
agttactattcaggaatacagagatgtgcataaaactcttcagcaccatagctggcaccttagcacatgttcaataagcatgtgttctatgatgattacgaccacaacagaacctgaggacgcgttgggagggcagtgcctccctgacagagcagctcaacaccgtgggagcgcgggaacctcgaattcagagccctcggaccaccaccaaagagccaagggtgatcacggccgggacaaaggtctcctttgaccacttctgagctttcaccatgaaacagaaatacacggcagacatccttctccttggaattaaaaaaacctgctgttgaatgaagaataaaggcagacaaaaacagatgtgatttctttttttctctgaaggcgtctccaggaatgctctcatggcctggcatttatggaacctaacactctgaactttaaaaacagaaactcacagttttctctcaacaactccatcccctccccgc

SEQ ID NO: 1936 - protein, 57 aa, Homo sapiens
MCSMMITTTTEPEDALGGQCLPDRAAQHRGSAGTSNSEPSDHHQRAKGDHGRDKGLL

SEQ ID NO: 1937 - DNA, 4644 bp, Homo sapiens
ggcaaacctctgtgcatgaggtaggtggaaatggttaaccatggctgggtcctcagcctggcctgggctccatgctgcagagggggcatgggtgggagctgggagcagtgagctgatgcctgatcagtgggtcgctggacttctgaacgcaggtaagtgcatgcaaggaggcagcgtgcagcccagccctctcggggcccagattgcttcttgttaacagtgagctctccaggagtgccctgcttttttaaaaaattcacactgaaattttgtttggagcaaatgttgcttgaaacaagaaggctgttggcctccatggacagccttttgtttcaaagagcattgtgtcattgccaagtttgaccattgtaagatgtcagaatgtaacttgtcttttccgaagccgctgctgatctgctcttggtcaagcctctcaggattccagcttgagaatcatctagagtaattgtggagcctgtgggagctaggtccaccccatgaagggcgggtgtgtgctggctcctacaccgttttttgattcttgttttcccttctcttacagtattaagggacatcagcgagagaggcagggatcttgagcagattttatctcagtacattacgttcgtcaagcctgcctttgaggaattctgcttgccaacaaagaagtatgctgatgtgatcatccctagaggtgcagataatctggtggccatcaacctcatcgtgcagcacatccaggacatcctgaatggagggccctccaaacggcagaccaatggctgtctcaacggctacaccccttcacgcaagaggcaggcatcggagtccagcagcaggccgcattgacccgtctccatcggaccccagcccctatctccaagagacagaggaggggtcaggaggcactgctcatctgtacatactgtttcctatgacattactgtatttaagaaaacaccatggagatgaaatgcctttgattttttttttctttttgtactttggaacgacaaaatgaaacagaacttgaccctgagcttaaataacaaaactgtgccaactactactggtgatgcctaattatgaatccaacgtgtaaccagttataaatacatatatatataaaaaaggatctatttttgtgtaaatgtacaaatactgtaaagctgtttgccataagtattttgcaggagggtctgtacttgagtgttttaggactggagctggaatttcaccaaggggaaattgcctgttgtgtcccagggtggggaggctcgggcatctgtgagagacagggagggtggctaaggtccagttgcttttgagtgccccgtggaacttgatgggaatggggttggaaaaccttgattgcctcctctgtcacatgccactcttggagctggagcttagtgatatgtcaatgagagatactcttgtcttttttttttttcttttcttttttttttttgagttgaaattaggtaaaatctcaactcaaaaatcaaactcagggaagaggcccactgaggagaacaagtcttctgcattttcttcctgccctgctcccaccttctcgcctctggctgcttggatagcttggtgactccttcctcaccctcctgcttctctgtctctccaagaagccagagctgcctctttccttccctggaagagattttatgggatcgcttcctgatagaagatgggaaggagagggcagaactttgcctgctgtcatatctgaagaatcactggttctttctgcatcccaggggcgtaactgatctgactccttgggctttttcctgtattgtggaatatagagtggaccattgcaggctgggtgtgggtgagggcttcggtaactgatgccggcagcagcgcctcatggagtggcaggggagctctgtctgtggaggggtagtagtttccgcttcctggaggtttgcagtgaggtgaggagagtaactttggtcagggattctcactagcagcgtcatggccaggatgctttacttatttgcaataccacctagtggatatggcaactgcagagcataaaaggggctcggaaaagcagtttttacaaagtatttaaaaggagagtatttaaatcataggtacctaagttggagcctgaggttgaaatatttggggtggagatttctagctttcctgagagctgctgcttggtggtagtgttttctctggaagtacagattcctgacattctgggtggaggggagcccaagtgagcctgaaggagttctgattatagagtcccgagcctcagtttctgactgcagaagagccagagatgttcatttcattgttgaccaccctagtgcttggtggactgtgcccttagctatcccactgtggctgccattgccagaaacattttggagaaccttttcttcccattgctctcagagcctgttcgagccattcaggtaaattggtctccattattacctggtcacaccagattttcccccagactcagcaccatccagtctgattccccgtttctgggctcagtttgactctaaatctgttttgctattttaaaaagtcaaacctggtccccagcagagcttgccacccggagactttcaggagaccgtgcaggctctgaagggagctcccagtcacagcagccgcctacttggagcaagggaaggctcccaagatgcctcctttgaaagccggtgctcaccaagatcagttcaggatcaatcattatccttgtagtcatgccttgatcagttctgagatgaagcagggaatgcaggcctgggttagtatcctgaggacacagggcccctggccttgatggcactgggctgtgctcaggtgaagcccacccgtgtctgggagagccttggcttttcagtgggcagcatgctcaactttacttgaagctcccaggtgccaaaccatttagtgccttggctgtttatcccactgccttggaagatggactcctctcatctctgagcctttacctagctgcttcctcatctacctgtggtgttgggaccaagcctccaatatctctgaatagcccactcctagcttggaaacagctataagggctgccctgccccttgtcaaatgatcaccaattcttggtggcttggctggggacaatgaacagtgtctgctggggtctgtgacacactgtttctggaacaaggaagggatggaaggctctacccctccgtggcagcccagcatttggccaactctgtatctgaacttgagctttctatggaacaaacaatggtcttagttttttaagagcctctgggtctctgattccatggagagtcaggagtagaattagtggaccagaaaccatgacatttgccatctaggtactctgctgttcagggtggaggcacagatgagcagagtggggtgatgttggttgtatgtgcatagaagtcccctggctccagagccatccagtggtgcttggttctctcttcctgcccaggtattgtgtgtggaccaagtgtttaggaaacaagcatagaagcattatgtcacaggaaggcctggcctctcactccttcacactaatgagccttctactgacccaagtttctttttctcgggcagcctgggaccactatgagcagagagatgggagtctgtgtaagaaggatgcaagtatcctttgatttggagtggacagagcaggtccttgcaaaggcagtgggttaaacaacgggatgtctgtgggacaggccagggaaggagggcagagacagggtctccagttcaccttgccgcagaactagcctaatcatccctgcttctggtcttggccacttggcaatcatggggaagttgactccccgcctcacttgggcttggagctggatacttgtggccacgcccaggataggttgccagagtttcattaggccgctgggtcgggctggaggcttgtgtacacctcggagcagtcgggcagcaggagggccggaagcctggttggtttgtatatgacctctcttgcccttgtgcactttccttgatttagcaaccttgacctgcactggccctcacagctgttggagggaagtagcctcttgcagggaaatattttcccctgccctggaatctcctatgtgcctgttaaagattccagggccaagaactcggcaggctgaggagcagctaggtaggtgggttatgcggttcaggactgcttctggaagggactgcctgtacttctgtaccaccgttgccctttacactttgctcagggcggggtgggggaagcattcaaacaaaacaaggaagggaactgtctggcaaagcataagtggatgcatccagagctcagtcccctttaatcttttgtctctgggcgttctgctgccttcctcataccggggactggcattccaggtcagcttggctgtggtcttagaggcagggagtgcctacccagtcctgcctcaggagcagggtgagtagctaaatacagacttaggcttttttttccccccttttaagatgcttgctcctctcccttttctttttaccaccctacctttattgttagtggttacaaagtgaccacatattatgtactttgctgtaaataaagacagacaaaaaggc

SEQ ID NO: 1938 - protein, 117 aa, Homo sapiens [sequence omitted]

SEQ ID NO: 1939 - DNA, 413 bp, Homo sapiens
tctgagaccgggaggaagggaaggaagagcttgggacttaacctggtcttggttgagatacactgggaaggctggaatctctgaagacattgaagatttagaacaaagaagtatgctgatgtgatcatccctagaggtgcagataatctggtggccatcaacctcatcgtgcagcacatccaggacatcctgaatggagggccctccaaacggcagaccaatggctgtctcaacggctacaccccttcacgcaagaggcaggcatcggagtccagcagcaggccgcattgacccgtctccatcggaccccagcccctatctccaagagacagaggaggggtcaggaggcactgctcatctgtacatactgtttcctatgacattactgtatttaagaaaacaccatggagatg

SEQ ID NO: 1940 - protein, 72 aa, Homo sapiens
MEGPPNGRPMAVSTATPLHARGRHRSPAAGRIDPSPSDPSPYLQETEEGSGGTAHLYILFPMTLLYLRKHHG

SEQ ID NO: 1941 - DNA, 1984 bp, Homo sapiens
ctttttcctgtattgtggaatatagagtggaccattgcaggctgggtgtgggtgagggcttcggtaactgatgccggcagcagcgcctcatggagtggcaggggagctctgtctgtggaggggtagtagtttccgcttcctggaggtttgcagtgaggtgaggagagtaactttggtcagggattctcactagcagcgtcatggccaggatgctttacttatttgcaataccacctagtggatatggcaactgcagagcataaaaggggctcggaaaagcagtttttacaaagtatttaaaaggagagtatttaaatcataggtacctaagttggagcctgaggttgaaatatttggggtggagatttctagctttcctgagagctgctgcttggtggtagtgttttctctggaagtacagattcctgacattctgggtggaggggagcccaagtgagcctgaaggagttctgattatagagtcccgagcctcagtttctgactgcagaagagccagagatgttcatttcattgttgaccaccctagtgcttggtggactgtgcccttagctatcccactcatttggccaactctgtatctgaacttgagctttctatggaacaaacaatggtcttagttttttaagagcctctgggtctctgattccatggagagtcaggagtagaattagtggaccagaaaccatgacatttgccatctaggtactctgctgttcagggtggaggcacagatgagcagagtggggtgatgttggttgtatgtgcatagaagtcccctggctccagagccatccagtggtgcttggttctctcttcctgcccaggtattgtgtgtggaccaagtgtttaggaaacaagcatagaagcattatgtcacaggaaggcctggcctctcactccttcacactaatgagccttctactgacccaagtttctttttctcgggcagcctgggaccactatgagcagagagatgggagtctgtgtaagaaggatgcaagtatcctttgatttggagtggacagagcaggtccttgcaaaggcagtgggttaaacaacgggatgtctgtgggacaggccagggaaggagggcagagacagggtctccagttcaccttgccgcagaactagcctaatcatccctgcttctggtcttggccacttggcaatcatggggaagttgactccccgcctcacttgggcttggagctggatacttgtggccacgcccaggataggttgccagagtttcattaggccgctgggtcgggctggaggcttgtgtacacctcggagcagtcgggcagcaggagggccggaagcctggttggtttgtatatgacctctcttgcccttgtgcactttccttgatttagcaaccttgacctgcactggccctcacagctgttggagggaagtagcctcttgcagggaaatattttcccctgccctggaatctcctatgtgcctgttaaagattccagggccaagaactcggcaggctgaggagcagctaggtaggtgggttatgcggttcaggactgcttctggaagggactgcctgtacttctgtaccaccgttgccctttacactttgctcagggcggggtgggggaagcattcaaacaaaacaaggaagggaactgtctggcaaagcataagtggatgcatccagagctcagtcccctttaatcttttgtctctgggcgttctgctgccttcctcataccggggactggcattccaggtcagcttggctgtggtcttagaggcagggagtgcctacccagtcctgcctcaggagcagggtgagtagctaaatacagacttaggcttttttttccccccttttaagatgcttgctcctctcccttttctttttaccaccctacctttattgttagtggttacaaagtgaccacatattatgtactttgctgtaaataaagacagacaaaaaggc

SEQ ID NO: 1942 - protein, 117 aa, Homo sapiens [sequence omitted]

SEQ ID NO: 1943 - DNA, 538 bp, Homo sapiens
agcattatgtcacaggaaggcctggcctctcactccttcacactaatgagccttctactgacccaagtttctttttctcgggcagcagctaggtaggtgggttatgcggttcaggactgcttctggaagggactgcctgtacttctgtaccaccgttgccctttacactttgctcagggcggggtgggggaagcattcaaacaaaacaaggaagggaactgtctggcaaagcataagtggatgcatccagagctcagtcccctttaatcttttgtctctgggcgttctgctgccttcctcataccggggactggcattccaggtcagcttggctgtggtcttagaggcagggagtgcctacccagtcctgcctcaggagcagggtgagtagctaaatacagacttaggcttttttttccccccttttaagatgcttgctcctctcccttttctttttaccaccctacctttattgttagtggttacaaagtgaccacatattatgtactttgctgtaaataaagacagacaaaaaggc

SEQ ID NO: 1944 - protein, 95 aa, Homo sapiens
MRFRTASGRDCLYFCTTVALYTLLRAGWGKHSNKTRKGTVWQSISGCIQSSVPFNLLSLGVLLPSSYRGLAFQVSLAVVLEAGSAYPVLPQEQGE

SEQ ID NO: 1945 - DNA, 3421 bp, Homo sapiens
ggtaggtgggttatgcggttcaggactgcttctggaagggactgcctgtacttctgtaccaccgttgccctttacactttgctcagggcggggtgggggaagcattcaaacaaaacaaggaagggaactgtctggcaaagcataagtggatgcatccagagctcagtcccctttaatcttttgtctctgggcgttctgctgccttcctcataccggggactggcattccaggtcagcttggctgtggtcttagaggcagggagtgcctacccagtcctgcctcaggagcaggatggagtttcactctttcacccaggctggagtgcaatggcacgatctcggctcactgcagcctctgccttccagtttcaagcgattctcctgcctcagcctcccaagtagctgggattacaggcgcccgccaccatgccggctaatttttgtatttttgatagagacggggtttcaccatgttgtccaggctggtcttgaactcctgaccttgtgatccacctgcctcagctccccaaaatgctaggattacaagcaagagccaccgtgcccagcccaccatctccattttgcaaaggaggaaactgagacacagtgacaccaaggatgacaactggagtaaaccatggaggcaggattctcaccctaacagatacctcaacaggccaaatttaagtacttgtggaaggaaaactaccatgtcttgagcacctagcgtacttcaggcaccatgttaggtactttgtatgggttaactaatttggtcatcgtaagtccttgtgaagggggcactgtaagtcctgtgttacaaatgcaacaacttagatggagagaagttaagtaatgtgtctctctttgcccagcttgtaagtggcagagctgggacttaaacccagaggagacatacacatgactgtgttgtgttgtcaatttttaaaagttacattacttaattgattggttaattcttttaacgtgtgatgtttgaaatgtgtaggcatctaagacagtatgtgggcagggggtgggcagggagacacacaaagatgactctgacctggctactagcaggcataagccgtaagtaaatgactacagtgcaaggaggaatgggaggagtgccgctcaggctggagagcattctggggtgctggggatggcagagggtacttgtgtctgctgcttttaccttctgcaccctggggagggtggttcagaagtcagcctgccccaacgcaaagcccaggctgcagatgctttgacccaattctgctcaagctgttggtcatctccttccaacactcaagagactggcttttgtccctggatggatcatctctgctctgatgattctggcatccatgtgagaaccagcaggggaacagctatgcaacagaggcctctggaacctcacgctctttagatgttaaattgaaatcaggtgctttatgactcgtctgtattcaggagcccatcaacgctgcatgggaactgctgtggattcaaaaggaacaccagtgtcatccctgcatggccctttactccactgtgctccatgttctcctcactccctcccaagggagttttctcccatctgcagaccctgctgggtggggcagaaagagcactgggtttggactcagaagatccaggcccactatctggtctgtcactcagcagcatgactgtcacgaaggctctcctaggcctcagtcttctgagcagtaaaatgggataataatgccttcttgcagagctgccatgtgggttacatgagaagtatgtggaacggtaggtgtcacacttactgcaatttccaggcctcacggactggcatacagctatggccaagtcattcccacccttcaatcctctgtgaagggcttcctgactgttccagcctgcctgacttctggagggatgtaggactgacccgaagtatttggccaaccacggggaggggcagagggggcagacactgggtgaatctgggctttgggctgtgtggggctagtgggctcctccagtgtacaattcttgagaggcttcccagtactggtagaataccacccaaacctctaatgtgctccacacagtcctgcatcctctggcctctgactccccagcttcatctcacaccacactcccccatgctctcagtgttccactgcaaacagctttccacccccaatagctttccttatggtcctccaacatgccaggctcttccctgcctcagagcctcggcagacactgtctggaaggtactttttcccactgctcccttgggcaactgagtaatccttaggtctaaacccaagtgtcacttcctctgggatacctcccctgatccatgcaccacctcctcccacgctgaacgaaactaggtctctgctatagaactgcatcttctcctgattcatagaacttatcaccatttgtaattatatacatgtgaacctatttatgatttaatgtgtctctcttcgtgtggattggaacaccttaactgatcactgctactgacgaggatccaccacagcctcggatatagtggtattccatcagcgtgtatgaagagtgaatgtctacatgaaacaggtagcgacaaggggcaagaggatggaggagagtgggaagggagtggtggcagtgatgtgcctgagaggtaccacggtgggcagcagggaaaaagcagagggctctaggaagtgaaagaatgggtcaggaggaagacctgagagtgggctgtttgcatttaagatttcagaggggcagccatgaagcatggcctgttttgaggctcctaggaaggggaagatgcagccttgtgatggagttttgtacagttagggcatccagagtgccctgggactgggaactggcaaggaaataagagagagctctggaatggggggtgagggggagggtaccgatggtgcctatgtccctgtgttatggggtggccctgcactccagatgtcaccagtatcccttggactcagtaggagggagctctctccagggaaaagggaactctgttaacataaccgcggtgggggttaaagagcagctttccctcagtggtacagagccctgtggctggcagcgctgcacagactcctcgagactcagctcccactgtccctgagccacactggggctcttcgccctcctggcagcaattataaagttgaacagcagaggcaggggaggatcgaaagccaaacaggaagccaataattgcctcttgcagaaatagctctttcaaaataaaagtgaggtcctgaggttcctacccaggtcagttatacaatgctgctcctgtcctcccagagccctgtaatcttcttcccagtgtctactttctggccctgaactccagtacaggtcaaaagatgtccatgtg

SEQ ID NO: 1946 - protein, 129 aa, Homo sapiens
MRFRTASGRDCLYFCTTVALYTLLRAGWGKHSNKTRKGTVWQSISGCIQSSVPFNLLSLGVLLPSSYRGLAFQVSLAVVLEAGSAYPVLPQEQDGVSLFHPGWSAMARSRLTAASAFQFQAILLPQPPK

SEQ ID NO: 1947 - DNA, 2063 bp, Homo sapiens
agatgctcagtccctggtatgatgagtttctagatgaagaggactactggtttctcctttttacgacataactaaaatgtcctttgaggagctttgctacaagaacccaaagatggccatacagaagatcagtgatgactacaaaatatactgtgagaaagcacctaaaatagattttaaaatggaaattatcaaggaaacaaagacagtttcacgctcaaataggaaaatgtccttgctcaaaagaactcttgtaaggaagccatcaatgagacccagaaacttgacagaagtcctcttaaatacacagcacttggagttcttcagggagttcctcaaggaacggaaggctaaaatcccattgcaatttctcacagctgtacagaagatcagtatagagaccaatgaaaagatttgcaagtctctcatagaaaatgtaatcaagactttcttccaaggccaactctctcctgaagaaatgctgcagtgtgatgcccctattatcaaagaaatcgcttccatgcgtcatgtcaccacaagcacactgttaacgctccagggacatgttatgaaatctatagaagaaaagtggtttaaagattatcaagacctgttcccacctcaccatcaggaggtggaagtgcaaagtgaagtacaaatttcgtctaggaagccctcaaagatagtgtcaacttacctacaggaatcccagaagaaaggctggatgagaatgatcagctttatcaggagtttttgcaagtaccgcagatttatgttgaatcctagtaagcgccaggaatttgaagactatcttcaccaggaaatgcaaaatagcaaggaaaatttcaccacagcacacaacacatcgggacgttcagctccaccctccacaaatgtccggagtgcagaccaagagaatggagaaataacccttgtaaagcgtcgtatatttggccacaggattatcactgtcaactttgcgatcaatgatctatatttcttttctgaaatggagaaatttaatgatctggtcagttcagcccacatgctgcaggtcaaccgggcatataatgagaatgatgtgatcctaatgcggtccaaaatgaacattatccaaaaactcttcctgaattctgacatccctccaaagctgagggtgaatgtccctgagttccagaaggatgccatccttgctgccatcacagagggctacctagatcggagcgtcttccatggggctatcatgtctgtcttccccgttgttatgtacttctggaaaaggttttgtttctggaaggcaacccgctcttacttacagtatagggggaagaagttcaaggacagaaaaagccctcctaaatctacggacaagtatcctttctcgagtggaggagacaatgccatcttaaggttcaccttgctcagaggtattgagtggttgcagcctcaacgggaagcaataagttcagttcaaaattcttcatcaagcaaacttactcagccaagactcgtggtatctgccatgcagctgcatcccgtccagggacaaaaattatcctacatcaaaaaagagaagtaatcaagcgagacccccagcagagataaatcatctcttagaggcctcctaacactgacagaaacttttctggtcaaaaatgaaaggtcctggtaccatcttccccagaaacgatcaagaagggcaatgggttgacagcccagatatggcaggaccagactgcaatgggaatctcatacagcccattcagactaaagggtgatggaaagaagcagaggaaagcagaaacagcaagagtgactgagacctgctgtcatctatatagaagcctttctgatacatgtcagagagtgacatgaagtctcccctctttatacacacgtatgaaaatacatctatccctcattttgagagcctccaactgatccaagtgtcatccggaggaggaggtggcccgtatgtgcaggacctcagggtgccagccctcacccatacacctccagggctgcaggtcattagccagaataaaggatgtccacattcacaa

SEQ ID NO: 1948 - protein, 500 aa, Homo sapiens; identical to SEQ ID NO: 66

SEQ ID NO: 1949 - DNA, 5666 bp, Homo sapiens
gtatatgaatctttgaacccagactttggacaactaaactctatctctgtttttccttacttcacagacataactaaaatgtcctttgaggagctttgctacaagaacccaaagatggccatacagaagatcagtgatgactacaaaatatactgtgagaaagcacctaaaatagattttaaaatggaaattatcaaggaaacaaagacagtttcacgctcaaataggaaaatgtccttgctcaaaagaactcttgtaaggaagccatcaatgagacccagaaacttgacagaagtcctcttaaatacacagcacttggagttcttcagggagttcctcaaggaacggaaggctaaaatcccattgcaatttctcacagctgtacagaagatcagtatagagaccaatgaaaagatttgcaagtctctcatagaaaatgtaatcaagactttcttccaaggccaactctctcctgaagaaatgctgcagtgtgatgcccctattatcaaagaaatcgcttccatgcgtcatgtcaccacaagcacactgttaacgctccagggacatgttatgaaatctatagaagaaaagtggtttaaagattatcaagacctgttcccacctcaccatcaggaggtggaagtgcaaagtgaagtacaaatttcgtctaggaagccctcaaagatagtgtcaacttacctacaggaatcccagaagaaaggctggatgagaatgatcagctttatcaggagtttttgcaagtaccgcagatttatgttgaatcctagtaagcgccaggaatttgaagactatcttcaccaggaaatgcaaaatagcaaggaaaatttcaccacagcacacaacacatcgggacgttcagctccaccctccacaaatgtccggagtgcagaccaagagaatggagaaataacccttgtaaagcgtcgtatatttggccacaggattatcactgtcaactttgcgatcaatgatctatatttcttttctgaaatggagaaatttaatgatctggtcagttcagcccacatgctgcaggtcaaccgggcatataatgagaatgatgtgatcctaatgcggtccaaaatgaacattatccaaaaactcttcctgaattctgacatccctccaaagctgagggtgaatgtccctgagttccagaaggatgccatccttgctgccatcacagagggctacctagatcggagcgtcttccatggggctatcatgtctgtcttccccgttgttatgtacttctggaaaaggtaactgtttctccttattcagtgactgttaggtcaggaaaacacacttagtttggagagagttttctgccttcctctagcactctgtttcgtagtttccagtttctagggggaactaagatggtgttttcaaaatcctattcacctcactccatccctcacacagaacaccaaacactgaatccacagatggaaggcagagtaagactgagagccaaacgcctggtttcccacccctcctctttctatgcttgcttggagcaagaatgtgaggttttcttaggcctgggtttctcacaagaaggtaagagtgaaccacagccccttggggagaaattctgtcaagactaacacaactgcttgtgcttaagaagctacatgaagaaagtaagccagaagtgttttgctctgttatgcccaaatccccagaattaccactgagggagcacagttgctagatactccaattatcaagaggagctagacattgaaatgtgtatttcatctctcccaaggttaaagtggcaaatatggcaactaacaaaactaaaacatggtgaagaaactgtgaaggccaaaaaccaaaaatgaaacaagcaaaatatatgcagatattttgtggccaaatgcaatctgtggcccacttgtttctaacctgtcctgtggagatttggcctgagccttcccagctggttatttattcctgtggtctgccagagttccagctcatatcttccacatggtgaatggcagtgccttgggtggtagtgaccagaggacacctggctgaaatgttcccagacaaagctaatcaggacacttagattatcatgtgacttggactcttagaagttcccatcttccaccaaaaaaaaaagttactttattaaaatagaagtgtgaaattgcttaccaatctctcacctttattttaaaatccttgagataataaactatttaatacagaaccaagagaagtacaaaaatctaagttcaagacaagcaatttaaccttttgaacatcaaatgttgtctagaacttaactctagttctcctagcaaggactaagtagatattcacccagagacttttggagggattgggaacctctgggaaatatatgcttctcttgaatgagccagtgtttagctgtctcccatgtgcttagaaaaatgagacatgctttagggattctttggattcctgttcctcctgcagtttctttacttactttcctacatacttacaaagaaatttatgttatgcaaactgtgtttacatatattatcttaaacgaacctctccacaaccctacacagtgggtggggaggagtattattatccctgttttacagatgaggagactgaggttcagagtggttgagggacttgcctagaatcacttggtaagtggtaaaaccagcattagaaaccaggtctcttggtctctcatcaccataaataatgcatgtgcggcatactgggaggtccactggggaaggagacccagttcagcaagtgaaatgggaaaagcctattgagatagaacagactgtccctcaaggagaggggaggagggcagcaggcaaaaccaccagatccaaagtgccatagaaaataaattcagtcttagccaagattgacctccaagggatccaatccaaggactggttgaaggtagggataacaaggggcttggggccaggaaggaagagatgatggggaatattgcacaggcttctagagaacataaaggtcataaagagtacataaatctgagttcacaagagaaaccaggtctattccagggaagggcccgctgggaatagagtgaggtggtcaaggctgtcagtaagtggcagggtggaaactaggattaggacctgagcaaaagcccttcagacactctggccataccaggtggggttagatagggatgtcagagtctgatgctggggtgcaccccaggggttaacctcaccccaggcctcaggatagtaggccctttacaggctccattcactgatggttccagaaagaagccccaacaaactgcccatgccaggcccgcgctggagccaggtctggacaaagaggaggcctcagaacaaaggccactggcaggtagaaccccaaggccaggatgctttcctcttctctgttggacacccacattctctgaggactggcccggccctgtttcccctgtgctcggtgctccagccccctccactgggggttccctcctatgaccagaagccattcttcccacaggttttgtttctggaaggcaacccgctcttacttacagtatagggggaagaagttcaaggacagaaaaagccctcctaaatctacggacaagtatcctttctcgagtggaggagacaatgccatcttaaggttcaccttgctcagaggtattgagtggttgcagcctcaacgggaagcaataagttcagttcaaaattcttcatcaagcaaacttactcagccaagactcgtggtatctgccatgcagctgcatcccgtccaggggtaggcatgagctggaaatcctcttcttcagtccagagctgctatgtccaagcatgcaataggagatggtataaactttccagagactagcctcataccctgcctctccttggcatgcagaacctagaaactgagcttgctgcctctggtgggaagttaaagaggtgtttctctgtgggggtcctttctcacctccaactaggacaggcacttttaagaagttggagtctctgacccacttttcagtagaacaatactgctgtggaagtgtcccagatgatctttgatttttatttttcatttttatagatttaaggagtacaagtgcagttttgttacatggatatattgggaggtagtgaagtctagggttttagtgtagtcatgatccaaatagtatacattgtgcccattaggtaatttctcacccttacccacctcccactctcgcactcttccaagtctccagtgtctattatttcgcggtcaatgtccaggtgtacatattatttagctctcacgtgtaactgagaacatgcaatacttcactttccatttctgagttatttcacttaagataatggtctccagttccatccatgttgctgcaaaagacatgattttatctttttatgactgtttagtattacattgtgtatatgtatcctacattctctttattcagatgatcttttattgccagcttcctaaatattccaggctgctcagggcagggtgcataaggtgggaaagaaagaagatctgttcttctgcttggcaggatattggcaataagaacagaagggacttgagtctgttaaaatctgcttcagcctaactcacttctgcacaagcttccaagtgaaactgatgctaagttagggctctgggagaatccccaggggtcatgaaaaccatagctgaggagtgccaaagagttatttgaaggccaaggtggtagacagcagcctctgaatgacaggcttggtgtccttgccagccaagtcacttctcaggcctgtttccagacttgtccttccaacagggacttgaagctgcccaggaattatttgcccgtcccagtgcccagaagacaaaccagatactttgaagctctttacactggaaaagcaatgcatggcttcagagtttataaggccttggggaagaaggtgagactaagaatgtgagaagccctattctgaagcctgaaggtttcagttttggctattgccattcctaaaggaaatgacagtgacaaaccaacagagaatgcaacctcaattactgcatcataattgtgataactggctgttttctctcccttcagacaaaaattatcctacatcaaaaaagagaagtaatcaagcgagacccccagcagagataaatcatctcttagaggcctcctaacactgacagaaacttttctggtcaaaaatgaaaggtcctggtaccatcttccccagaaacgatcaagaagggcaatgggttgacagcccagatatggcaggaccagactgcaatgggaatctcatacagcccattcagactaaagggtgatggaaagaagcagaggaaagcagaaacagcaagagtgactgagacctgctgtcatctatatagaagcctttctgatacatgtcagagagtgacatgaagtctcccctctttatacacacgtatgaaaatacatctatccctcattttgagagcctccaactgatccaagtgtcatccggaggaggaggtggcccgtatgtgcaggacctcagggtgccagccctcacccatacacctccagggctgcaggtcattagccagaataaaggatgtccacattc

SEQ ID NO: 1950 - protein, 402 aa, Homo sapiens
MSFEELCYKNPKMAIQKISDDYKIYCEKAPKIDFKMEIIKETKTVSRSNRKMSLLKRTLVRKPSMRPRNLTEVLLNTQHLEFFREFLKERKAKIPLQFLTAVQKISIETNEKICKSLIENVIKTFFQGQLSPEEMLQCDAPIIKEIASMRHVTTSTLLTLQGHVMKSIEEKWFKDYQDLFPPHHQEVEVQSEVQISSRKPSKIVSTYLQESQKKGWMRMISFIRSFCKYRRFMLNPSKRQEFEDYLHQEMQNSKENFTTAHNTSGRSAPPSTNVRSADQENGEITLVKRRIFGHRIITVNFAINDLYFFSEMEKFNDLVSSAHMLQVNRAYNENDVILMRSKMNIIQKLFLNSDIPPKLRVNVPEFQKDAILAAITEGYLDRSVFHGAIMSVFPVVMYFWKR

SEQ ID NO: 1951 - DNA, 1439 bp, Homo sapiens
atttcccccaaacccacagtccaaacaagcctcagtgtgatggagctggtggggccagtgggttggccagccctgggtgctgatggactgatttgctggagttcagggaactacttattagctgtagagtccttggcaaatcacaacattctgggccttttaactcaccaggttgcttgtgagggatgagttgcatagctgatatgtcagtccctggcatcgtgtattccatatgtctataacaaaagcaatatatacccagactacactagtccataagctttacccactaactgggaggacattctgctaagattccttttgtcaattgcaccaaaagaatgagtgccttgacccctaatgctgcatatgttacaattctctcacttaattttcccaatgatcttgcaaaacagggattatcatccccatttaagaactgaggaacctgagactcagagagtgtgagctactggcccaagattattcaatttatacctagcactttataaatttatgtggtgttattggtacctctcatttgggcaccttaaaacttaactatccttccagggctcttccagatgaggcccaaaacatatataggggttccaggaatctcattcattcattcagtatttattgagcatctagtataagtctgggcactggatgcatgaattccactccttccagaaccaactgcattggttttccatgaccttaaggcagtagttctcaactggggggcaattttgcactgaagagagcatttggcagagtctgaagaagtttttggtgtcacaggggcgatggctgtcttttcttgactttgtatcttcactgccaagcaaaaagtctgccaagtgggaatgtttaataaatattcattgaataatgaatgaaccatcttcgtacatgaataataatactgtcttacgtttttctggtgctttataatgtatacattacatctgagtattttattttatttaattttcaaaacaatcctttaaggtcaacattgttatccctattttgctgatgaggaaactaaggttagaaacattttgatttcctctaggacgtatagctaggaagtgttactatcttgatttgaacaaattttctggtgctaagtctgatgttctttccatgaatcattgtggtggttgagatggagctttgtaatgggaataaaacagtaccttaggttctttctgaaaaggaggtatctagcaatggataaatagataccactgaatgaaattaaatgttgattaggaacaaatttaaggcttaaaaaatactttatgagcagcaagattgctttaacttttaaaatgaagctttggttctctgatttgtaatgagcacctggacatgtcaattaaaatgcccatttgtgaagcttactcaataaaactttaaattgtctt

SEQ ID NO: 1952 - protein, 49 aa, Homo sapiens [sequence omitted]

SEQ ID NO: 1953 - DNA, 2186 bp, Homo sapiens
gaatatatgaatatattcaaatttatattttgccttttggtatgaatatttcatcaggatttattttgtgttgctaccacatttttgtgttattttttgtttttttagattaatgaatgtgttatgaaaaaaatgaataagttttatgaaaaaagaggcaatttctaccagaacactgtgggtgatctgctaaagttcatccggaatttgggagaacacattgatgaagaaaagcataaaaagatgaaattaaaaattggagacccttccctgtattttcagaagacatttccagatctggtgatctatgtctacacaaaactacagaacacagaatatagaaagcatttcccccaaacccacagtccaaacaagcctcagtgtgatggagctggtggggccagtgggttggccagccctgggtgctgatggactgatttgctggagttcagggaactacttattagctgtagagtccttggcaaatcacaacattctgggccttttaactcaccaggttgcttgtgagggatgagttgcatagctgatatgtcagtccctggcatcgtgtattccatatgtctataacaaaagcaatatatacccagactacactagtccataagctttacccactaactgggaggacattctgctaagattccttttgtcaattgcaccaaaagaatgagtgccttgacccctaatgctgcatatgttacaattctctcacttaattttcccaatgatcttgcaaaacagggattatcatccccatttaagaactgaggaacctgagactcagagagtgtgagctactggcccaagattattcaatttatacctagcactttataaatttatgtggtgttattggtacctctcatttgggcaccttaaaacttaactatccttccagggctcttccagatgaggcccaaaacatatataggggttccaggaatctcattcattcattcagtatttattgagcatctagtataagtctgggcactggatgcatgaattccactccttccagaaccaactgcattggttttccatgaccttaaggcagtagttctcaactggggggcaattttgcactgaagagagcatttggcagagtctgaagaagtttttggtgtcacagctttgtggggagcatgctatggcatttagtgggtaaagaccagggatgctgccaaacctgccttgcacaggacagcccctgcaacaaagaattatccagacaaaaatatcaatggtgctgaggttgagaaaacctgacttaaggggctgggatgcttttgaactagcttaaggcccaggactgtggagtgtgtggaccaccccacagaggagggactcagatttatttactcttgctggatctgtagtgatggagttccttctggtgtcagccccacaggaggctcccaggcctccctcacttcccatacccagtctaggagctccttctggctcccaagcacccagagctttcctccgccttttagttttggttcctccactggaatgtaggctcctcacgggcgatggctgtcttttcttgactttgtatcttcactgccaagcaaaaagtctgccaagtgggaatgtttaataaatattcattgaataatgaatgaaccatcttcgtacatgaataataatactgtcttacgtttttctggtgctttataatgtatacattacatctgagtattttattttatttaattttcaaaacaatcctttaaggtcaacattgttatccctattttgctgatgaggaaactaaggttagaaacattttgatttcctctaggacgtatagctaggaagtgttactatcttgatttgaacaaattttctggtgctaagtctgatgttctttccatgaatcattgtggtggttgagatggagctttgtaatgggaataaaacagtaccttaggttctttctgaaaaggaggtatctagcaatggataaatagataccactgaatgaaattaaatgttgattaggaacaaatttaaggcttaaaaaatactttatgagcagcaagattgctttaacttttaaaatgaagctttggttctctgatttgtaatgagcacctggacatgtcaattaaaatgcccatttgtgaagcttactcaataaaactttaaattgtctt

SEQ ID NO: 1954 - protein, 101 aa, Homo sapiens [sequence omitted]

SEQ ID NO: 1955 - DNA, 4150 bp, Homo sapiens
caggtggaatgtcagaagactgagaacattgttccttcttcatactgctgctctgttgccagagaatcccaatttacactcaaagcttctttgattaagtgctaggagataaatttgcattttctcaaggaaaaggctaaaagtggtagcaggtggcatttaccgtcatggagagcagggatcataacaacccccaggagggacccacgtcctccagcggtagaagggctgcagtggaagacaatcacttgctgattaaagctgttcaaaacgaagatgttgacctggtccagcaattgctggaaggtggagccaatgttaatttccaggaagaggaagggggctggacacctctgcataacgcagtacaaatgagcagggaggacattgtggaacttctgcttcgtcatggtgctgaccctgttctgaggaagaagaatggggccacgccttttatcctcgcagcgattgcggggagcgtgaagctgctgaaacttttcctttctaaaggagcagatgtcaatgagtgtgatttttatggcttcacagccttcatggaagccgctgtgtatggtaaggtcaaagccctaaaattcctttataagagaggagcaaatgtgaatttgaggcgaaagacaaaggaggatcaagagcggctgaggaaaggaggggccacagctctcatggacgctgctgaaaaaggacacgtagaggtcttgaagattctccttgatgagatgggggcagatgtaaacgcctgtgacaatatgggcagaaatgccttgatccatgctctcctgagctctgacgatagtgatgtggaggctattacgcatctgctgctggaccatggggctgatgtcaatgtgaggggagaaagagggaagactcccctgatcctggcagtggagaagaagcacttgggtttggtgcagaggcttctggagcaagagcacatagagattaatgacacagacagtgatggcaaaacagcactgctgcttgctgttgaactcaaactgaagaaaatcgccgagttgctgtgcaaacgtggagccagtacagattgtggggatcttgttatgacagcgaggcggaattatgaccattcccttgtgaaggttcttctctctcatggagccaaagaagattttcaccctcctgctgaagactggaagcctcagagctcacactggggggcagccctgaaggatctccacagaatataccgccctatgattggcaaactcaagttctttattgatgaaaaatacaaaattgctgatacttcagaaggaggcatctacctggggttctatgagaagcaagaagtagctgtgaagacgttctgtgagggcagcccacgtgcacagcgggaagtctcttgtctgcaaagcagccgagagaacagtcacttggtgacattctatgggagtgagagccacaggggccacttgtttgtgtgtgtcaccctctgtgagcagactctggaagcgtgtttggatgtgcacagaggggaagatgtggaaaatgaggaagatgaatttgcccgaaatgtcctgtcatctatatttaaggctgttcaagaactacacttgtcctgtggatacacccaccaggatctgcaaccacaaaacatcttaatagattctaagaaagctgctcacctggcagattttgataagagcatcaagtgggctggagatccacaggaagtcaagagagatctagaggaccttggacggctggtcctctatgtggtaaagaagggaagcatctcatttgaggatctgaaagctcaaagtaatgaagaggtggttcaactttctccagatgaggaaactaaggacctcattcatcgtctcttccatcctggggaacatgtgagggactgtctgagtgacctgctgggtcatcccttcttttggacttgggagagccgctataggacgcttcggaatgtgggaaatgaatccgacatcaaaacacgaaaatctgaaagtgagatcctcagactactgcaacctgggccttctgaacattccaaaagttttgacaagtggacgactaagattaatgaatgtgttatgaaaaaaatgaataagttttatgaaaaaagaggcaatttctaccagaacactgtgggtgatctgctaaagttcatccggaatttgggagaacacattgatgaagaaaagcataaaaagatgaaattaaaaattggagacccttccctgtattttcagaagacatttccagatctggtgatctatgtctacacaaaactacagaacacagaatatagaaagcatttcccccaaacccacagtccaaacaagcctcagtgtgatggagctggtggggccagtgggttggccagccctgggtgctgatggactgatttgctggagttcagggaactacttattagctgtagagtccttggcaaatcacaacattctgggccttttaactcaccaggttgcttgtgagggatgagttgcatagctgatatgtcagtccctggcatcgtgtattccatatgtctataacaaaagcaatatatacccagactacactagtccataagctttacccactaactgggaggacattctgctaagattccttttgtcaattgcaccaaaagaatgagtgccttgacccctaatgctgcatatgttacaattctctcacttaattttcccaatgatcttgcaaaacagggattatcatccccatttaagaactgaggaacctgagactcagagagtgtgagctactggcccaagattattcaatttatacctagcactttataaatttatgtggtgttattggtacctctcatttgggcaccttaaaacttaactatccttccagggctcttccagatgaggcccaaaacatatataggggttccaggaatctcattcattcattcagtatttattgagcatctagtataagtctgggcactggatgcatgaattccactccttccagaaccaactgcattggttttccatgaccttaaggcagtagttctcaactggggggcaattttgcactgaagagagcatttggcagagtctgaagaagtttttggtgtcacagctttgtggggagcatgctatggcatttagtgggtaaagaccagggatgctgccaaacctgccttgcacaggacagcccctgcaacaaagaattatccagacaaaaatatcaatggtgctgaggttgagaaaacctgacttaaggggctgggatgcttttgaactagcttaaggcccaggactgtggagtgtgtggaccaccccacagaggagggactcagatttatttactcttgctggatctgtagtgatggagttccttctggtgtcagccccacaggaggctcccaggcctccctcacttcccatacccagtctaggagctccttctggctcccaagcacccagagctttcctccgccttttagttttggttcctccactggaatgtaggctcctcacgggcgatggctgtcttttcttgactttgtatcttcactgccaagcaaaaagtctgccaagtgggaatgtttaataaatattcattgaataatgaatgaaccatcttcgtacatgaataataatactgtcttacgtttttctggtgctttataatgtatacattacatctgagtattttattttatttaattttcaaaacaatcctttaaggtcaacattgttatccctattttgctgatgaggaaactaaggttagaaacattttgatttcctctaggacgtatagctaggaagtgttactatcttgatttgaacaaattttctggtgctaagtctgatgttctttccatgaatcattgtggtggttgagatggagctttgtaatgggaataaaacagtaccttaggttctttctgaaaaggaggtatctagcaatggataaatagataccactgaatgaaattaaatgttgattaggaacaaatttaaggcttaaaaaatactttatgagcagcaagattgctttaacttttaaaatgaagctttggttctctgatttgtaatgagcacctggacatgtcaattaaaatgcccatttgtgaagcttactcaataaaactttaaattgtctt

SEQ ID NO: 1956 - protein, 741 aa, Homo sapiens; identical to SEQ ID NO: 68

SEQ ID NO: 1957 - DNA, 1381 bp, Homo sapiens
aatgtgaatttgaggcgaaagacaaaggaggatcaagagcggctgaggaaaggaggggccacagctctcatggacgctgctgaaaaaggacacgtagaggtcttgaagattctccttgatgagatgggggcagatgtaaacgcctgtgacaatatgggcagaaatgccttgatccatgctctcctgagctctgacgatagtgatgtggaggctattacgcatctgctgctggaccatggggctgatgtcaatgtgaggggagaaagagggaagactcccctgatcctggcagtggagaagaagcacttgggtttggtgcagaggcttctggagcaagagcacatagagattaatgacacagacagtgatggcaaaacagcactgctgcttgctgttgaactcaaactgaagaaaatcgccgagttgctgtgcaaacgtggagccagtacagattgtggggatcttgttatgacagcgaggcggaattatgaccattcccttgtgaaggttcttctctctcatggagccaaagaagattttcaccctcctgctgaagactggaagcctcagagctcacactggggggcagccctgaaggatctccacagaatataccgccctatgattggcaaactcaagttctttattgatgaaaaatacaaaattgctgatacttcagaaggaggcatctacctggggttctatgagaagcaagaagtagctgtgaagacgttctgtgagggcagcccacgtgcacagcgggaagtctcttgtctgcaaagcagccgagagaacagtcacttggtgacattctatgggagtgagagccacaggggccacttgtttgtgtgtgtcaccctctgtgagcagactctggaagcgtgtttggatgtgcacagaggggaagatgtggaaaatgaggaagatgaatttgcccgaaatgtcctgtcatctatatttaaggctgttcaagaactacacttgtcctgtggatacacccaccaggatctgcaaccacaaaacatcttaatagattctaagaaagctgctcacctggcagattttgataagagcatcaagtgggctggagatccacaggaagtcaagagagatctagaggaccttggacggctggtcctctatgtggtaaagaagggaagcatctcatttgaggatctgaaagctcaaagtaatgaagaggtggttcaactttctccagatgaggaaactaaggacctcattcatcgtctcttccatcctggggaacatgtgagggactgtctgagtgacctgctgggtcatcccttcttttggacttgggagaggtaagtaaaactttgtgcagatgccacaggcctccaggatggaaagggtaaggtgg

SEQ ID NO: 1958 - protein, 419 aa, Homo sapiens
MDAAEKGHVEVLKILLDEMGADVNACDNMGRNALIHALLSSDDSDVEAITHLLLDHGADVNVRGERGKTPLILAVEKKHLGLVQRLLEQEHIEINDTDSDGKTALLLAVELKLKKIAELLCKRGASTDCGDLVMTARRNYDHSLVKVLLSHGAKEDFHPPAEDWKPQSSHWGAALKDLHRIYRPMIGKLKFFIDEKYKIADTSEGGIYLGFYEKQEVAVKTFCEGSPRAQREVSCLQSSRENSHLVTFYGSESHRGHLFVCVTLCEQTLEACLDVHRGEDVENEEDEFARNVLSSIFKAVQELHLSCGYTHQDLQPQNILIDSKKAAHLADFDKSIKWAGDPQEVKRDLEDLGRLVLYVVKKGSISFEDLKAQSNEEVVQLSPDEETKDLIHRLFHPGEHVRDCLSDLLGHPFFWTWER

SEQ ID NO: 1959 - DNA, 1513 bp, Homo sapiens
gacgcagcaggaggaaactgctcgggctgcaagcagtcttccaggctttgcggctgccaaaggaataattgagacgtctgagttgagcaggtggaatgtcagaagactgagaacattgttccttcttcatactgctgctctgttgccagagaatcccaatttacactcaaagcttctttgattaagtgctaggagataaatttgcattttctcaaggaaaaggctaaaagtggtagcaggtggcatttaccgtcatggagagcagggatcataacaacccccaggagggacccacgtcctccagcggtagaagggctgcagtggaagacaatcacttgctgattaaagctgttcaaaacgaagatgttgacctggtccagcaattgctggaaggtggagccaatgttaatttccaggaagaggaagggggctggacacctctgcataacgcagtacaaatgagcagggaggacattgtggaacttctgcttcgtcatggtgctgaccctgttctgaggaagaagaatggggccacgccttttatcctcgcagcgattgcggggagcgtgaagctgctgaaacttttcctttctaaaggagcagatgtcaatgagtgtgatttttatggcttcacagccttcatggaagccgctgtgtatggtaaggtcaaagccctaaaattcctttataagagaggagcaaatgtgaatttgaggcgaaagacaaaggaggatcaagagcggctgaggaaaggaggggccacagctctcatggacgctgctgaaaaaggacacgtagaggtcttgaagattctccttgatgagatgggggcagatgtaaacgcctgtgacaatatgggcagaaatgccttgatccatgctctcctgagctctgacgatagtgatgtggaggctattacgcatctgctgctggaccatggggctgatgtcaatgtgaggggagaaagagggaagactcccctgatcctggcagtggagaagaagcacttgggtttggtgcagaggcttctggagcaagagcacatagagattaatgacacagacagtgatggcaaaacagcactgctgcttgctgttgaactcaaactgaagaaaatcgccgagttgctgtgcaaacgtggagccagtacagattgtggggatcttgttatgacagcgaggcggaattatgaccattcccttgtgaaggttcttctctctcatggagccaaagaagattttcaccctcctgctgaagactggaagcctcagagctcacactggggggcagccctgaaggatctccacagaatataccgccctatgattggcaaactcaagttctttattgatgaaaaatacaaaattgctgatacttcagaaggaggcatctacctggggttctatgagaagcaagaagtagctgtgaagacgttctgtgagggcagcccacgtgcacagcgggaagtctcttgtctgcaaagcagccgagagaacagtcacttggtgacatt

SEQ ID NO: 1960 - protein, 418 aa, Homo sapiens
MESRDHNNPQEGPTSSSGRRAAVEDNHLLIKAVQNEDVDLVQQLLEGGANVNFQEEEGGWTPLHNAVQMSREDIVELLLRHGADPVLRKKNGATPFILAAIAGSVKLLKLFLSKGADVNECDFYGFTAFMEAAVYGKVKALKFLYKRGANVNLRRKTKEDQERLRKGGATALMDAAEKGHVEVLKILLDEMGADVNACDNMGRNALIHALLSSDDSDVEAITHLLLDHGADVNVRGERGKTPLILAVEKKHLGLVQRLLEQEHIEINDTDSDGKTALLLAVELKLKKIAELLCKRGASTDCGDLVMTARRNYDHSLVKVLLSHGAKEDFHPPAEDWKPQSSHWGAALKDLHRIYRPMIGKLKFFIDEKYKIADTSEGGIYLGFYEKQEVAVKTFCEGSPRAQREVSCLQSSRENSHLV

SEQ ID NO: 1961 - DNA, 525 bp, Homo sapiens
atggtgccaagctcgggcactcatctgcctgcctgtcccaggcctgtgggctgtgtgtcacctgtgctaaggccctgggctcagagagcttccatccgagctggaagcaacactgcagagaagctaaatagcccaccccagcctctgccggggacccaggaggaagcagtaacggcgaggtgtgcagccacgggggctggtgaggtaagagcacccccatatccaggtgaggacaaagtcatccatgggacatgtagctctagaataaggctatttgcaccaggagttttcaagccattttgcttcagagctcgttttgcagcagcaaactccaggccagagcccagacctcagctgtactgtgttctgtgtgcagggaagcccatgaactttgacagctatggagacatacatgtccctgctgtgatcctgaagaccttcctactagtcaagtacagtagtgggaagggagaaagcgtagaacaaggacttcgatctgtgaccgtgaacaatcaactgagataa

SEQ ID NO: 1962 - protein, 174 aa, Homo sapiens
MVPSSGTHLPACPRPVGCVSPVLRPWAQRASIRAGSNTAEKLNSPPQPLPGTQEEAVTARCAATGAGEVRAPPYPGEDKVIHGTCSSRIRLFAPGVFKPFCFRARFAAANSRPEPRPQLYCVLCAGKPMNFDSYGDIHVPAVILKTFLLVKYSSGKGESVEQGLRSVTVNNQLR

SEQ ID NO: 1963 - DNA, 336 bp, Homo sapiens
agggcactccaacagccctgatcccaagtgtgaagctgtggcctcagctggacatcctgtctggtcttggttagcggaaaggcaacagaatgaatgtccactccagagataatcaaagatgtgatgggggtatgcaacatgaaagaacagagcatcaatgtattgttcctgccggcgagacacttgaaacgttatttatgtagtaaaacaaacacacatctattattaactacaatgtataattcacatgaatttctcagataaaacataagacttcaaagaaagtcatgcctgaaatttgcagctacgagctttacctacagtcttctaaaagca

SEQ ID NO: 1964 - protein, 56 aa, Homo sapiens
MSTPEIIKDVMGVCNMKEQSINVLFLPARHLKRYLCSKTNTHLLLTTMYNSHEFLR

SEQ ID NO: 1965 - DNA, 1619 bp, Homo sapiens
ggagctcccctccctcgctcgctcctcgcaagctcccgctcgctccctgcccactcccggggggacgttccgtgccgcggccgccgcggccgctgcttctttcacactttagttgggagctgcgcgccgcgctcagttactggagagctggccgcgcgccgccgcctcccgcacgcttgcacgcgggcccggcttcggggttttgggttcttactccaagcggcggggaggagggggagccccggacacactgtggggaggaggaggaagaagaggaggagggaggaagaaaaaagacgaggaggacaggggcggggggcgggaggcttgccaccttcagcccccccgcgaacgcccaaggtgcacacatcttgaccaactcagcagcaaggtggattttctttgtgtttaaagaaaaaaaatgtccctgtgtctgtagagatgatttgcagttcagcccggctgaagctgaccgaatgagactatgggctgtgcctccgccaagcatgttgccactgttcaaaatgaagaggaagcccagaaagggaaaaactaccagaacggagatgtgtttggcgatgagtataggatcaaaccagtggaagaggtcaaatacatgaaaaatggggcagaagaagagcagaaaatagcagccaggaaccaagaaaacttggaaaaaagtgccagctcaaatgtaagacttaaaactaataaagaggttccgggattagttcatcaacccagagcaaacatgcacatctctgaaagccaacaagaattcttcagaatgctggatgaaaaaattgaaaagggtcgggattactgttcggaagaagaggatatcacatagcaccaattttaccactcaaaccaggagctactactgtgtaaataggttacaccccagttgaaatctttgcaaaggtcggttctattcagcgaacagcactatagcaaaagaagatcgttccatattgtacgccccattaaattacagtgtttcttaatgaacttgcaaaggaatattgctaaaaacaaacaaaaaaaactgttatcgaactttctttgttgctgctagttaaaacttgttgcaacttttcacttctcttgtgtccaggtatgcagcaaaattctgcaatttcaccttaaagatactgttggttttacagatgctctccaacctattttctataagatgaggtagtggtgaactcagataacaaacttctcttctaaactggttctgcttctaagacaagcatctcctgccctctctccttcctccccatctctcgcacgcagtctagagatggactgagccttgcttctcactggcagtgttgagctttggagatgggatggttgctatgccaagccttgtttctctgctcagaagaagtagagaagctattatcaattaaaagcatgctgtgatgtgactcctggaagtgacgtaggagtgagtggcaggttgtttgatttaataggtatcttaatcaagaattaagcttgcaacattggctttgctcagatgcagatggaagtgtgatcacaatcattttgaatccctcttcctcacttttttttctaagaaaataaacattttactgtttttatgg

SEQ ID NO: 1966 - protein, 121 aa, Homo sapiens; identical to SEQ ID NO: 70

SEQ ID NO: 1967 - DNA, 3323 bp, Homo sapiens
ggagctcccctccctcgctcgctcctcgcaagctcccgctcgctccctgcccactcccggggggacgttccgtgccgcggccgccgcggccgctgcttctttcacactttagttgggagctgcgcgccgcgctcagttactggagagctggccgcgcgccgccgcctcccgcacgcttgcacgcgggcccggcttcggggttttgggttcttactccaagcggcggggaggagggggagccccggacacactgtggggaggaggaggaagaagaggaggagggaggaagaaaaaagacgaggaggacaggggcggggggcgggaggcttgccaccttcagcccccccgcgaacgcccaaggtgcacacatcttgaccaactcagcagcaaggtggattttctttgtgtttaaagaaaaaaaatgtccctgtgtctgtagagatgatttgcagttcagcccggctgaagctgaccgaatgagactatgggctgtgcctccgccaagcatgttgccactgttcaaaatgaagaggaagcccagaaagggaaaaactaccagaacggagatgtgtttggcgatgagtataggatcaaaccagtggaagaggtcaaatacatgaaaaatggggcagaagaagagcagaaaatagcagccaggaaccaagaaaacttggaaaaaagtgccagctcaaatgtaagacttaaaactaataaagaggttccgggattagttcatcaacccagagcaaacatgcacatctctgaaagccaacaagaattcttcagaatgctggatgaaaaaattgaaaagggtcgggattactgttcggaagaagaggatatcacatagcaccaattttaccactcaaaccaggagctactactgtgtaaataggttacaccccagttgaaatctttgcaaaggtcggttctattcagcgaacagcactatagcaaaagaagatcgttccatattgtacgccccattaaattacagtgtttcttaatgaacttgcaaaggaatattgctaaaaacaaacaaaaaaaactgttatcgaactttctttgttgctgctagttaaaacttgttgcaacttttcacttctcttgtgtccaggtatgcagcaaaattctgcaatttcaccttaaagatactgttggttttacagatgctctccaacctattttctataagatgaggtagtggtgaactcagataacaaacttctcttctaaactggttctgcttctaagacaagcatctcctgccctctctccttcctccccatctctcgcacgcagtctagagatggactgagccttgcttctcactggcagtgttgagctttggagatgggatggttgctatgccaagccttgtttctctgctcagaagaagtagagaagctattatcaattaaaagcatgctgtgatgtgactcctggaagtgacgtaggagtgagtggcaggttgtttgatttaataggtatcttaatcaagaattaagcttgcaacattggctttgctcagatgcagatggaagtgtgatcacaatcattttgaatccctcttcctcacttttttttctaagaaaataaacattttactgtttttatggatccttgtcttctcccattcatccagctcagtgttttaagatgatcctgggtgcagaagttgagccctcctttgcattgacactgataattagcctatagggctccctacccttccattaagaatctaccaagcattagcaaggctgaaagtggtctaagaggtgaggggacatcctatgactttttaggaaggcctgaaaccaccttgttacctttcattttgttagcaaataaaccatcctattttgtaactctcccccttcaaaatgctacatgagccttgccacttcctttttctcttacttccagcacactagacatagcaaaagtgtttgcctactcaaaaacataatacttttatgctgatgatggtatttggagatgtgaaagccaaaagcccctggcagtggtggggaatgttgactgagtgttcagcagagtttatttttccatactatatgaagagaatgatctcttctcaaagacagaagtgatatttttaacaaatattgtcacaagtaaatagcaatcaaaaggagaaaataacttttgtatttttttaatgtgtttgatagctttgacgagggttctctttgttactttcaggggagggcatcctattaaatgccacgccagcagtccgggtctgggtttgtcccacaaaatcacaggagcactgtatgttcctctcttttggagttgtgactttgaagggcctcaatattagccacactgccgcctgcagaaggtggagagttaagatgttctatgtcaatttgctcttgccgaaaagatgagcctcgattttaaaatctatccacatccaactgatggcaccattgatgtgcaaataatgagattccctatctccttttagacctgggacggcaaaagggaagggaaggaaacttagcagagtgctattgactatagattcacatattagcaacaaaatcccgtaattcttttggccaacagcagctattttggggagcagctgtggctgttacataaatagagatgcagccaaaattttaggccttttatcctgcttctagcagaaaaatgcagggagagtcaagtagtctagggtttcaggttgcctcccctcatatggtttttggccaagtgactaaaacagttttccacaactgtaaacaaactgctaagccccacctcaaacttgttcactggggactttgcttaccgttctgtgggtgaccttttccgggatttcttgttcttatcaagcaagaattaagcacatgctaaacgtcttccatttgacttctctactcggtgtctcagacagtgtcttcccagaaaaccaccaccctctacccaaagatgaaacatgctcatgtcatttttctcatggtcacatttaacagttttgacatgttatacttgcgcatagatccaagcgtttcttgggaacctgacttttgagtgtttaataaagccggaagtggtgttgccctgaaccagcagattttcacctgggttctggctccggtgtttaacactggatacatctttgatgtgcgaaagtgagttcatcttcagacacatttggtacatccagaaatagatccaagaaatggggtggttgagtgggtccgcacgaaatgcttgattatgtcagcaacacccaacactgtctgttttccatttgttggttttaatcataaaattgtcaagtg

SEQ ID NO: 1968 - protein, 121 aa, Homo sapiens; identical to SEQ ID NO: 70

SEQ ID NO: 1969 - DNA, 8192 bp, Homo sapiens
ggagctcccctccctcgctcgctcctcgcaagctcccgctcgctccctgcccactcccggggggacgttccgtgccgcggccgccgcggccgctgcttctttcacactttagttgggagctgcgcgccgcgctcagttactggagagctggccgcgcgccgccgcctcccgcacgcttgcacgcgggcccggcttcggggttttgggttcttactccaagcggcggggaggagggggagccccggacacactgtggggaggaggaggaagaagaggaggagggaggaagaaaaaagacgaggaggacaggggcggggggcgggaggcttgccaccttcagcccccccgcgaacgcccaaggtgcacacatcttgaccaactcagcagcaaggtggattttctttgtgtttaaagaaaaaaaatgtccctgtgtctgtagagatgatttgcagttcagcccggctgaagctgaccgaatgagactatgggctgtgcctccgccaagcatgttgccactgttcaaaatgaagaggaagcccagaaagggaaaaactaccagaacggagatgtgtttggcgatgagtataggatcaaaccagtggaagaggtcaaatacatgaaaaatggggcagaagaagagcagaaaatagcagccaggaaccaagaaaacttggaaaaaagtgccagctcaaatgtaagacttaaaactaataaagaggttccgggattagttcatcaacccagagcaaacatgcacatctctgaaagccaacaagaattcttcagaatgctggatgaaaaaattgaaaagggtcgggattactgttcggaagaagaggatatcacatagcaccaattttaccactcaaaccaggagctactactgtgtaaataggttacaccccagttgaaatctttgcaaaggtcggttctattcagcgaacagcactatagcaaaagaagatcgttccatattgtacgccccattaaattacagtgtttcttaatgaacttgcaaaggaatattgctaaaaacaaacaaaaaaaactgttatcgaactttctttgttgctgctagttaaaacttgttgcaacttttcacttctcttgtgtccaggtatgcagcaaaattctgcaatttcaccttaaagatactgttggttttacagatgctctccaacctattttctataagatgaggtagtggtgaactcagataacaaacttctcttctaaactggttctgcttctaagacaagcatctcctgccctctctccttcctccccatctctcgcacgcagtctagagatggactgagccttgcttctcactggcagtgttgagctttggagatgggatggttgctatgccaagccttgtttctctgctcagaagaagtagagaagctattatcaattaaaagcatgctgtgatgtgactcctggaagtgacgtaggagtgagtggcaggttgtttgatttaataggtatcttaatcaagaattaagcttgcaacattggctttgctcagatgcagatggaagtgtgatcacaatcattttgaatccctcttcctcacttttttttctaagaaaataaacattttactgtttttatggatccttgtcttctcccattcatccagctcagtgttttaagatgatcctgggtgcagaagttgagccctcctttgcattgacactgataattagcctatagggctccctacccttccattaagaatctaccaagcattagcaaggctgaaagtggtctaagaggtgaggggacatcctatgactttttaggaaggcctgaaaccaccttgttacctttcattttgttagcaaataaaccatcctattttgtaactctcccccttcaaaatgctacatgagccttgccacttcctttttctcttacttccagcacactagacatagcaaaagtgtttgcctactcaaaaacataatacttttatgctgatgatggtatttggagatgtgaaagccaaaagcccctggcagtggtggggaatgttgactgagtgttcagcagagtttatttttccatactatatgaagagaatgatctcttctcaaagacagaagtgatatttttaacaaatattgtcacaagtaaatagcaatcaaaaggagaaaataacttttgtatttttttaatgtgtttgatagctttgacgagggttctctttgttactttcaggggagggcatcctattaaatgccacgccagcagtccgggtctgggtttgtcccacaaaatcacaggagcactgtatgttcctctcttttggagttgtgactttgaagggcctcaatattagccacactgccgcctgcagaaggtggagagttaagatgttctatgtcaatttgctcttgccgaaaagatgagcctcgattttaaaatctatccacatccaactgatggcaccattgatgtgcaaataatgagattccctatctccttttagacctgggacggcaaaagggaagggaaggaaacttagcagagtgctattgactatagattcacatattagcaacaaaatcccgtaattcttttggccaacagcagctattttggggagcagctgtggctgttacataaatagagatgcagccaaaattttaggccttttatcctgcttctagcagaaaaatgcagggagagtcaagtagtctagggtttcaggttgcctcccctcatatggtttttggccaagtgactaaaacagttttccacaactgtaaacaaactgctaagccccacctcaaacttgttcactggggactttgcttaccgttctgtgggtgaccttttccgggatttcttgttcttatcaagcaagaattaagcacatgctaaacgtcttccatttgacttctctactcggtgtctcagacagtgtcttcccagaaaaccaccaccctctacccaaagatgaaacatgctcatgtcatttttctcatggtcacatttaacagttttgacatgttatacttgcgcatagatccaagcgtttcttgggaacctgacttttgagtgtttaataaagccggaagtggtgttgccctgaaccagcagattttcacctgggttctggctccggtgtttaacactggatacatctttgatgtgcgaaagtgagttcatcttcagacacatttggtacatccagaaatagatccaagaaatggggtggttgagtgggtccgcacgaaatgcttgattatgtcagcaacacccaacactgtctgttttccatttgttggttttaatcataaaattgtcaagtgattcgtgtttgtactttatttttttgtgccttctgaaaggatctaaaacaaaaatattttgcctttttttccccacgtgtatctgaacattaagcagattggctcagacacaatgaaaaggataatccaatgtacgtgctggtgcactctgctagttgttatctctgtagggctcaggaagctggaaggaggaagggagggtaagtggcctggtgagtggaggtagaaaaatgatgagaaatgaactgagagcattaagcagagagggttgataggctggccgtgtccggggtgaaattggaaatccagctgcctagtggccagtgggtggggcaagactgtcaacgagatttacagctggcttacacatgccttatgtcctctgagttgtagagttgtaaaagttcagcagtgtgtgcacagctttcttttggttggcagagattcaggatcatggagtactgctctcataattgaagacgtgtttgttattggcagagaaccttaaaaaaggcctttacctcagcgatgcttcctagccccaggcttgcagagaacacagagtggtgttgtggtctatttagggacaaagaaggtataaagtccagagatgagaaaactgggtcagccctcagaaactgcagcagccacgcacacagaagcctgctggaagacaggtctctctccgtccacagtgcccatcatctgagcctgggctgggatgactcaacttagcaaagacggacccaggaggagtgctggttcttcagtctttgtactggccccatcctctcctcactgtaatgtgaggaagcacctctgtgtcagggctcacctgggcatccaaagcggccacgcccacaatccgacagcccccaggagcaggtccagggatgatgcagcccccttcttggtcccatgtgatgtcatcctgctttgttatcttcttataactttatcctgctataactttatcctcttcccagcctcatccctgtttttctgttagggcaagactcttccataagcctgctaaaaaacagagatgatacctcttacaaactttacctcatagcctgtgaagcaggttggcatgtggattacaagtcctgctttgacactgggcaagaatttaagattgttctatctctactagtcatagaaaagaaacattgttaaacatgttgagttttaaaggaagaaatattttcaaattcttaatccaagaaaatactgagttggaatcttagacttcgggactctgacacgttctttatgaaaggcaaaataattggtatctaaagttctctccttcctgcctcccctaaagaaaaaggatattagattgcacactataattttacataagatctgccttccacacttccctgctggaaggcattctcagagctttatgtcttcgtacctctcagagattggactttttcttgtttaaaaccccaaccaaaaaaaataataaggcatgattggtggggagggaatgtgtatttaggggcataataaaaaggtggctcgaagcaggaactttggcctcatggtgtcatgggtggatgcctggactccagtgtgcctgtgaggggctgggttaggcagtcggctgtcacactcacatgtgcctgcaataaaccttttggaatttcatgaacgaggtctatgaattgccttttgccaatgaatggatgtatttttccaaggggggaatagtatccttgactttggcagtcacctttttgtatgtctctagaaaggggtcaaaaaactatggtaaagatgaggcttatgagtgaatacctctgggacaaaccttaggactcacaagctatgccatgtttttcaggagactcttgtaccttatctggaatctaatcttgggagaagaggaaaaaggagctaatatttgtcatttatactcactctgtgccagatactgtgctaggcattttataattgttttgtgtcatcctcatgataatcctgtgaagtagatctattacccccgtgttctaaataatagatcttaagtgtggaatgcatctatccaacataaatgcccatgttgaaagaaggaaagatgtcattcaagtatttttcaaattctttttattatgactatgcccttcgcaacactgtgaaaacaacccctgggggcatctgccttccagaatctctctctggcttctcaccagcttggtttcctcatggggagtgttttatttggcctcccctatctgagctgcacacacaccaggggaggccactggctaacagtaggacttcagtgccctgaggaaaaggctttgggaatttaggcacacgtttctctccttggaatccttctagcatctggaaaaggaacctggtatttctgcagttagataccagatgcaaccagaacaggctttcgagtgctgtgatttctttcctgggttcccaagtcttgttgtttcatcacaaactgtatctttttaaggttaaaagtcttgaccttcatgggggtctgggacaatccgatctccaagcatggaggaaaggcaatgcctggaccactgacttgcattgaaatcctttcttgtgggctagggtttgatgtctctttttcatctttggactggggatctgcatcttccaggtccatttaagcactgaaactagatgcaaatctctttcgagaccttacatgttttagatagtcatgtaatgacttggatagacatttaaataacttgttccaaggtcggaagagcccaagaactcctcagagttcctcttcttgcttcttgaatcacatcctctaaagatgactcatgtctccatagcaactgttaaaggtgctgcctagacgggacccgctcccacctttacttactttgctcgaaggaaccaaaacaatgtccttgtgtaaaggggctgtcatatccagttttcctttgaaatctggcccccaagatcctgcttctttctaacctggcagctgtcatgtcccttcaagatgatgtgggaaatggcccttacaacttgggaaccacagaaattgctgtatttcgggaagattcacctctaaactgaaggcttcattctgatagtgtctgccctctctaccctgatttcgcccttctttgcttccatttttagcccaaggctttgaatttgattgagtaagacttagaggcagtataaagaacaccataaacttaggcagaggtcccttagggtctctagagttgaaaataattctacagccttagggggacctcttggcattgactctaaagggagagaatagcccctgtgtcctggcatttcagtctagaccttcaaggactgttctctcttgacaggcaagcaagcaaagaaagttttgcaatagatttcaagccagtttttccattcaaaccaagatgcaaattcataaaattactcttttcctggaatagatccaggcagctgccttattagaactttagattcggatctattttcttaacacacatacacatacacgcgcatacatacatatacagagagatacgtggagaaaggaaatttactctatcattgcaatacttcaagaaagagctgtattttgcctttctgtaatctccaagatagtgtctaggaaagtaatagtataactatagggataccgaaacaggaaaaaccagccatcactcttgagaaagtttgagttcgactcacatgggagaatcgaggtctgctactcgtcttgctttgtgccccatctgtgcctggatgccctactacatctgcttgactcgtctgggctgctagccggggtgttgtggctgacatcctttcctggccttacacacataatagacacatccctaacggcgtgtgcctggtccagccacatacagccaccacatgtgtcacacactgtccccctcatccatgtggacttgactggcatttcagcagctccactgggatgctctaaccccagtgtgtggagttggggtcccttcatctaggttgacccaggtatagcatttttagcattgcctttccagtcttgatgattcattcattgaactcatttatttctggagcccctggtacactccaggcactgcgctaattgccagcaaagcacaactgaactaaatccaccttcaaggaacctagccataacgagggaggcagcatggaagtaccctacaggggaaagtcctgagtgctgtgggagcatctcaccgtggcagccagcccagttttggcaatcaggggcttcctgaaagaggtgacatcaaagcccggatgtgtcagaggactgagggagagtgttactaaaggactttcaggctgagaggatagcacaggactcagcccaaaggagggccagtgtggactgtccagggccagcctgcagtacagaggctggagcttggacttgtagagggagagagaagagcaagggacgtggacggggcagtgagccaggctagccacagagggttcccggggctttgctggggattcagggagcataaataagagctttaggtggtgctgtgtcctctgcagcccactgctgaggtcctccagacaggtaaggtgtggtcacaatcagggccggggtttccctgctcactgcggcagtgcaggggtgcttgctgagatgattcatcccagggtgtcctctgtcccttacccagccccaactcctcttcctctgccaaaagctatttgaattcaaggactttaacctgggccggatctggtttggagacaaaggggacagctctgggtcagcatgaccttctttagagccactaaggcgaaaaataccgtttgggaccaggctggcctagacccagggatgagaat

SEQ ID NO: 1970 - protein, 121 aa, Homo sapiens; identical to SEQ ID NO: 70

SEQ ID NO: 1971 - DNA, 706 bp, Homo sapiens
atttgcaaatcaaacataaagcctgaaaggaaacattacttttcattaaatagacggccagccgaatgaacagagaagaagtccggacagcttttcaatgtgatggattctgtggcaaggattacatcattggggggttttatatttctataattttagattagttattttagttcccttacccccatttttaaatattcctgtcagctaaaacaaggattttcttaggaaatgatgaagccaggtttaatttctacttagtgagaagactgcattaccaccccactgttaaggtgcaggtattgtcagtagggcaaggatgggttttcttttgtaaggaatgcatttgaagggatagattacagactcagggtaatgtgaacctgtttccatgcttgggaatgtcctcccaggtgatggacatcccttaggggaagcctcaggtaggataagcaaagcctaggttcttatttgcttgtttcttaaagaaacacaataataaagacaaaaatggtgtatggatcaaacagatgaaaccagaagagtgttaatatccagaaatgtattctctaaggctctgcctaattatattaaaagtaatttgcaaatctggccctgagttttctgtaaccatatgaaaacaagaaacactatcagtcacaagattctgttatagcctgggcaacatagtgagaccccatctctg

SEQ ID NO: 1972 - protein, 32 aa, Homo sapiens
MNREEVRTAFQCDGFCGKDYIIGGFYISIILD

SEQ ID NO: 1973 - DNA, 1033 bp, Homo sapiens
actggcaaccaccattctactttctgtctccatgaatttgactactccaggctgctgtgcattttagagaagttcttatgtgatactgaaaaaagtgccagctcaaatgtaagacttaaaactaataaagaggttccgggattagttcatcaacccagagcaaacatgcacatctctgaaagccaacaagaattcttcagaatgctggatgaaaaaattgaaaagggtcgggattactgttcggaagaagaggatatcacatagcaccaattttaccactcaaaccaggagctactactgtgtaaataggttacaccccagttgaaatctttgcaaaggtcggttctattcagcgaacagcactatagcaaaagaagatcgttccatattgtacgccccattaaattacagtgtttcttaatgaacttgcaaaggaatattgctaaaaacaaacaaaaaaaactgttatcgaactttctttgttgctgctagttaaaacttgttgcaacttttcacttctcttgtgtccaggtatgcagcaaaattctgcaatttcaccttaaagatactgttggttttacagatgctctccaacctattttctataagatgaggtagtggtgaactcagataacaaacttctcttctaaactggttctgcttctaagacaagcatctcctgccctctctccttcctccccatctctcgcacgcagtctagagatggactgagccttgcttctcactggcagtgttgagctttggagatgggatggttgctatgccaagccttgtttctctgctcagaagaagtagagaagctattatcaattaaaagcatgctgtgatgtgactcctggaagtgacgtaggagtgagtggcaggttgtttgatttaataggtatcttaatcaagaattaagcttgcaacattggctttgctcagatgcagatggaagtgtgatcacaatcattttgaatccctcttcctcacttttttttctaagaaaataaacattttactgtttttatgg

SEQ ID NO: 1974 - protein, 38 aa, Homo sapiens
MKKLKRVGITVRKKRISHSTNFTTQTRSYYCVNRLHPS

SEQ ID NO: 1975 - DNA, 2737 bp, Homo sapiens
actggcaaccaccattctactttctgtctccatgaatttgactactccaggctgctgtgcattttagagaagttcttatgtgatactgaaaaaagtgccagctcaaatgtaagacttaaaactaataaagaggttccgggattagttcatcaacccagagcaaacatgcacatctctgaaagccaacaagaattcttcagaatgctggatgaaaaaattgaaaagggtcgggattactgttcggaagaagaggatatcacatagcaccaattttaccactcaaaccaggagctactactgtgtaaataggttacaccccagttgaaatctttgcaaaggtcggttctattcagcgaacagcactatagcaaaagaagatcgttccatattgtacgccccattaaattacagtgtttcttaatgaacttgcaaaggaatattgctaaaaacaaacaaaaaaaactgttatcgaactttctttgttgctgctagttaaaacttgttgcaacttttcacttctcttgtgtccaggtatgcagcaaaattctgcaatttcaccttaaagatactgttggttttacagatgctctccaacctattttctataagatgaggtagtggtgaactcagataacaaacttctcttctaaactggttctgcttctaagacaagcatctcctgccctctctccttcctccccatctctcgcacgcagtctagagatggactgagccttgcttctcactggcagtgttgagctttggagatgggatggttgctatgccaagccttgtttctctgctcagaagaagtagagaagctattatcaattaaaagcatgctgtgatgtgactcctggaagtgacgtaggagtgagtggcaggttgtttgatttaataggtatcttaatcaagaattaagcttgcaacattggctttgctcagatgcagatggaagtgtgatcacaatcattttgaatccctcttcctcacttttttttctaagaaaataaacattttactgtttttatggatccttgtcttctcccattcatccagctcagtgttttaagatgatcctgggtgcagaagttgagccctcctttgcattgacactgataattagcctatagggctccctacccttccattaagaatctaccaagcattagcaaggctgaaagtggtctaagaggtgaggggacatcctatgactttttaggaaggcctgaaaccaccttgttacctttcattttgttagcaaataaaccatcctattttgtaactctcccccttcaaaatgctacatgagccttgccacttcctttttctcttacttccagcacactagacatagcaaaagtgtttgcctactcaaaaacataatacttttatgctgatgatggtatttggagatgtgaaagccaaaagcccctggcagtggtggggaatgttgactgagtgttcagcagagtttatttttccatactatatgaagagaatgatctcttctcaaagacagaagtgatatttttaacaaatattgtcacaagtaaatagcaatcaaaaggagaaaataacttttgtatttttttaatgtgtttgatagctttgacgagggttctctttgttactttcaggggagggcatcctattaaatgccacgccagcagtccgggtctgggtttgtcccacaaaatcacaggagcactgtatgttcctctcttttggagttgtgactttgaagggcctcaatattagccacactgccgcctgcagaaggtggagagttaagatgttctatgtcaatttgctcttgccgaaaagatgagcctcgattttaaaatctatccacatccaactgatggcaccattgatgtgcaaataatgagattccctatctccttttagacctgggacggcaaaagggaagggaaggaaacttagcagagtgctattgactatagattcacatattagcaacaaaatcccgtaattcttttggccaacagcagctattttggggagcagctgtggctgttacataaatagagatgcagccaaaattttaggccttttatcctgcttctagcagaaaaatgcagggagagtcaagtagtctagggtttcaggttgcctcccctcatatggtttttggccaagtgactaaaacagttttccacaactgtaaacaaactgctaagccccacctcaaacttgttcactggggactttgcttaccgttctgtgggtgaccttttccgggatttcttgttcttatcaagcaagaattaagcacatgctaaacgtcttccatttgacttctctactcggtgtctcagacagtgtcttcccagaaaaccaccaccctctacccaaagatgaaacatgctcatgtcatttttctcatggtcacatttaacagttttgacatgttatacttgcgcatagatccaagcgtttcttgggaacctgacttttgagtgtttaataaagccggaagtggtgttgccctgaaccagcagattttcacctgggttctggctccggtgtttaacactggatacatctttgatgtgcgaaagtgagttcatcttcagacacatttggtacatccagaaatagatccaagaaatggggtggttgagtgggtccgcacgaaatgcttgattatgtcagcaacacccaacactgtctgttttccatttgttggttttaatcataaaattgtcaagtg

SEQ ID NO: 1976 - protein, 38 aa, Homo sapiens; identical to SEQ ID NO: 1974

SEQ ID NO: 1977 - DNA, 4878 bp, Homo sapiens
actggcaaccaccattctactttctgtctccatgaatttgactactccaggctgctgtgcattttagagaagttcttatgtgatactgaaaaaagtgccagctcaaatgtaagacttaaaactaataaagaggttccgggattagttcatcaacccagagcaaacatgcacatctctgaaagccaacaagaattcttcagaatgctggatgaaaaaattgaaaagggtcgggattactgttcggaagaagaggatatcacatagcaccaattttaccactcaaaccaggagctactactgtgtaaataggttacaccccagttgaaatctttgcaaaggtcggttctattcagcgaacagcactatagcaaaagaagatcgttccatattgtacgccccattaaattacagtgtttcttaatgaacttgcaaaggaatattgctaaaaacaaacaaaaaaaactgttatcgaactttctttgttgctgctagttaaaacttgttgcaacttttcacttctcttgtgtccaggtatgcagcaaaattctgcaatttcaccttaaagatactgttggttttacagatgctctccaacctattttctataagatgaggtagtggtgaactcagataacaaacttctcttctaaactggttctgcttctaagacaagcatctcctgccctctctccttcctccccatctctcgcacgcagtctagagatggactgagccttgcttctcactggcagtgttgagctttggagatgggatggttgctatgccaagccttgtttctctgctcagaagaagtagagaagctattatcaattaaaagcatgctgtgatgtgactcctggaagtgacgtaggagtgagtggcaggttgtttgatttaataggtatcttaatcaagaattaagcttgcaacattggctttgctcagatgcagatggaagtgtgatcacaatcattttgaatccctcttcctcacttttttttctaagaaaataaacattttactgtttttatggatccttgtcttctcccattcatccagctcagtgttttaagatgatcctgggtgcagaagttgagccctcctttgcattgacactgataattagcctatagggctccctacccttccattaagaatctaccaagcattagcaaggctgaaagtggtctaagaggtgaggggacatcctatgactttttaggaaggcctgaaaccaccttgttacctttcattttgttagcaaataaaccatcctattttgtaactctcccccttcaaaatgctacatgagccttgccacttcctttttctcttacttccagcacactagacatagcaaaagtgtttgcctactcaaaaacataatacttttatgctgatgatggtatttggagatgtgaaagccaaaagcccctggcagtggtggggaatgttgactgagtgttcagcagagtttatttttccatactatatgaagagaatgatctcttctcaaagacagaagtgatatttttaacaaatattgtcacaagtaaatagcaatcaaaaggagaaaataacttttgtatttttttaatgtgtttgatagctttgacgagggttctctttgttactttcaggggagggcatcctattaaatgccacgccagcagtccgggtctgggtttgtcccacaaaatcacaggagcactgtatgttcctctcttttggagttgtgactttgaagggcctcaatattagccacactgccgcctgcagaaggtggagagttaagatgttctatgtcaatttgctcttgccgaaaagatgagcctcgattttaaaatctatccacatccaactgatggcaccattgatgtgcaaataatgagattccctatctccttttagacctgggacggcaaaagggaagggaaggaaacttagcagagtgctattgactatagattcacatattagcaacaaaatcccgtaattcttttggccaacagcagctattttggggagcagctgtggctgttacataaatagagatgcagccaaaattttaggccttttatcctgcttctagcagaaaaatgcagggagagtcaagtagtctagggtttcaggttgcctcccctcatatggtttttggccaagtgactaaaacagttttccacaactgtaaacaaactgctaagccccacctcaaacttgttcactggggactttgcttaccgttctgtgggtgaccttttccgggatttcttgttcttatcaagcaagaattaagcacatgctaaacgtcttccatttgacttctctactcggtgtctcagacagtgtcttcccagaaaaccaccaccctctacccaaagatgaaacatgctcatgtcatttttctcatggtcacatttaacagttttgacatgttatacttgcgcatagatccaagcgtttcttgggaacctgacttttgagtgtttaataaagccggaagtggtgttgccctgaaccagcagattttcacctgggttctggctccggtgtttaacactggatacatctttgatgtgcgaaagtgagttcatcttcagacacatttggtacatccagaaatagatccaagaaatggggtggttgagtgggtccgcacgaaatgcttgattatgtcagcaacacccaacactgtctgttttccatttgttggttttaatcataaaattgtcaagtgattcgtgtttgtactttatttttttgtgccttctgaaaggatctaaaacaaaaatattttgcctttttttccccacgtgtatctgaacattaagcagattggctcagacacaatgaaaaggataatccaatgtacgtgctggtgcactctgctagttgttatctctgtagggctcaggaagctggaaggaggaagggagggtaagtggcctggtgagtggaggtagaaaaatgatgagaaatgaactgagagcattaagcagagagggttgataggctggccgtgtccggggtgaaattggaaatccagctgcctagtggccagtgggtggggcaagactgtcaacgagatttacagctggcttacacatgccttatgtcctctgagttgtagagttgtaaaagttcagcagtgtgtgcacagctttcttttggttggcagagattcaggatcatggagtactgctctcataattgaagacgtgtttgttattggcagagaaccttaaaaaaggcctttacctcagcgatgcttcctagccccaggcttgcagagaacacagagtggtgttgtggtctatttagggacaaagaaggtataaagtccagagatgagaaaactgggtcagccctcagaaactgcagcagccacgcacacagaagcctgctggaagacaggtctctctccgtccacagtgcccatcatctgagcctgggctgggatgactcaacttagcaaagacggacccaggaggagtgctggttcttcagtctttgtactggccccatcctctcctcactgtaatgtgaggaagcacctctgtgtcagggctcacctgggcatccaaagcggccacgcccacaatccgacagcccccaggagcaggtccagggatgatgcagcccccttcttggtcccatgtgatgtcatcctgctttgttatcttcttataactttatcctgctataactttatcctcttcccagcctcatccctgtttttctgttagggcaagactcttccataagcctgctaaaaaacagagatgatacctcttacaaactttacctcatagcctgtgaagcaggttggcatgtggattacaagtcctgctttgacactgggcaagaatttaagattgttctatctctactagtcatagaaaagaaacattgttaaacatgttgagttttaaaggaagaaatattttcaaattcttaatccaagaaaatactgagttggaatcttagacttcgggactctgacacgttctttatgaaaggcaaaataattggtatctaaagttctctccttcctgcctcccctaaagaaaaaggatattagattgcacactataattttacataagatctgccttccacacttccctgctggaaggcattctcagagctttatgtcttcgtacctctcagagattggactttttcttgtttaaaaccccaaccaaaaaaaataataaggcatgattggtggggagggaatgtgtatttaggggcataataaaaaggtggctcgaagcaggaactttggcctcatggtgtcatgggtggatgcctggactccagtgtgcctgtgaggggctgggttaggcagtcggctgtcacactcacatgtgcctgcaataaaccttttggaatttcatgaacgaggtctatgaattgccttttgccaatgaatggatgtatttttccaaggggggaatagtatccttgactttggcagtcacctttttgtatgtctctagaaaggggtcaaaaaactatggtaaagatgaggcttatgagtgaatacctctgggacaaaccttaggactcacaagctatgccatgtttttcaggagactcttgtaccttatctggaatctaatcttgggagaagaggaaaaaggagctaatatttgtcatttatactcactctgtgccagatactgtgctaggcattttataattgttttgtgtcatcctcatgataatcctgtgaagtagatctattacccccgtgttctaaataatagatcttaagtgtggaatgcatctatccaacataaatgcccatgttgaaagaaggaaagatgtcattcaagtatttttcaaattctttttattatgactatgcccttc

SEQ ID NO: 1978 - protein, 38 aa, Homo sapiens; identical to SEQ ID NO: 1974

SEQ ID NO: 1979 - DNA, 748 bp, Homo sapiens
tgagcctcgattttaaaatctatccacatccaactgatggcaccattgatgtgcaaataatgagattccctatctccttttagacctgggacggcaaaagggaagggaaggaaacttagcagagtgctattgactatagattcacatattagcaacaaaatcccgtaattcttttggccaacattttccacaactgtaaacaaactgctaagccccacctcaaacttgttcactggggactttgcttaccgttctgtgggtgaccttttccgggatttcttgttcttatcaagcaagaattaagcacatgctaaacgtcttccatttgacttctctactcggtgtctcagacagtgtcttcccagaaaaccaccaccctctacccaaagatgaaacatgctcatgtcatttttctcatggtcacatttaacagttttgacatgttatacttgcgcatagatccaagcgtttcttgggaacctgacttttgagtgtttaataaagccggaagtggtgttgccctgaaccagcagattttcacctgggttctggctccggtgtttaacactggatacatctttgatgtgcgaaagtgagttcatcttcagacacatttggtacatccagaaatagatccaagaaatggggtggttgagtgggtccgcacgaaatgcttgattatgtcagcaacacccaacactgtctgttttccatttgttggttttaatcataaaattgtcaagtgatt

SEQ ID NO: 1980 - protein, 40 aa, Homo sapiens
MLNVFHLTSLLGVSDSVFPENHHPLPKDETCSCHFSHGHI

SEQ ID NO: 1981 - DNA, 2886 bp, Homo sapiens
tgagcctcgattttaaaatctatccacatccaactgatggcaccattgatgtgcaaataatgagattccctatctccttttagacctgggacggcaaaagggaagggaaggaaacttagcagagtgctattgactatagattcacatattagcaacaaaatcccgtaattcttttggccaacattttccacaactgtaaacaaactgctaagccccacctcaaacttgttcactggggactttgcttaccgttctgtgggtgaccttttccgggatttcttgttcttatcaagcaagaattaagcacatgctaaacgtcttccatttgacttctctactcggtgtctcagacagtgtcttcccagaaaaccaccaccctctacccaaagatgaaacatgctcatgtcatttttctcatggtcacatttaacagttttgacatgttatacttgcgcatagatccaagcgtttcttgggaacctgacttttgagtgtttaataaagccggaagtggtgttgccctgaaccagcagattttcacctgggttctggctccggtgtttaacactggatacatctttgatgtgcgaaagtgagttcatcttcagacacatttggtacatccagaaatagatccaagaaatggggtggttgagtgggtccgcacgaaatgcttgattatgtcagcaacacccaacactgtctgttttccatttgttggttttaatcataaaattgtcaagtgattcgtgtttgtactttatttttttgtgccttctgaaaggatctaaaacaaaaatattttgcctttttttccccacgtgtatctgaacattaagcagattggctcagacacaatgaaaaggataatccaatgtacgtgctggtgcactctgctagttgttatctctgtagggctcaggaagctggaaggaggaagggagggtaagtggcctggtgagtggaggtagaaaaatgatgagaaatgaactgagagcattaagcagagagggttgataggctggccgtgtccggggtgaaattggaaatccagctgcctagtggccagtgggtggggcaagactgtcaacgagatttacagctggcttacacatgccttatgtcctctgagttgtagagttgtaaaagttcagcagtgtgtgcacagctttcttttggttggcagagattcaggatcatggagtactgctctcataattgaagacgtgtttgttattggcagagaaccttaaaaaaggcctttacctcagcgatgcttcctagccccaggcttgcagagaacacagagtggtgttgtggtctatttagggacaaagaaggtataaagtccagagatgagaaaactgggtcagccctcagaaactgcagcagccacgcacacagaagcctgctggaagacaggtctctctccgtccacagtgcccatcatctgagcctgggctgggatgactcaacttagcaaagacggacccaggaggagtgctggttcttcagtctttgtactggccccatcctctcctcactgtaatgtgaggaagcacctctgtgtcagggctcacctgggcatccaaagcggccacgcccacaatccgacagcccccaggagcaggtccagggatgatgcagcccccttcttggtcccatgtgatgtcatcctgctttgttatcttcttataactttatcctgctataactttatcctcttcccagcctcatccctgtttttctgttagggcaagactcttccataagcctgctaaaaaacagagatgatacctcttacaaactttacctcatagcctgtgaagcaggttggcatgtggattacaagtcctgctttgacactgggcaagaatttaagattgttctatctctactagtcatagaaaagaaacattgttaaacatgttgagttttaaaggaagaaatattttcaaattcttaatccaagaaaatactgagttggaatcttagacttcgggactctgacacgttctttatgaaaggcaaaataattggtatctaaagttctctccttcctgcctcccctaaagaaaaaggatattagattgcacactataattttacataagatctgccttccacacttccctgctggaaggcattctcagagctttatgtcttcgtacctctcagagattggactttttcttgtttaaaaccccaaccaaaaaaaataataaggcatgattggtggggagggaatgtgtatttaggggcataataaaaaggtggctcgaagcaggaactttggcctcatggtgtcatgggtggatgcctggactccagtgtgcctgtgaggggctgggttaggcagtcggctgtcacactcacatgtgcctgcaataaaccttttggaatttcatgaacgaggtctatgaattgccttttgccaatgaatggatgtatttttccaaggggggaatagtatccttgactttggcagtcacctttttgtatgtctctagaaaggggtcaaaaaactatggtaaagatgaggcttatgagtgaatacctctgggacaaaccttaggactcacaagctatgccatgtttttcaggagactcttgtaccttatctggaatctaatcttgggagaagaggaaaaaggagctaatatttgtcatttatactcactctgtgccagatactgtgctaggcattttataattgttttgtgtcatcctcatgataatcctgtgaagtagatctattacccccgtgttctaaataatagatcttaagtgtggaatgcatctatccaacataaatgcccatgttgaaagaaggaaagatgtcattcaagtatttttcaaattctttttattatgactatgcccttc

SEQ ID NO: 1982 - protein, 95 aa, Homo sapiens
MTQLSKDGPRRSAGSSVFVLAPSSPHCNVRKHLCVRAHLGIQSGHAHNPTAPRSRSRDDAAPFLVPCDVILLCYLLITLSCYNFILFPASSLFFC

SEQ ID NO: 1983 - DNA, 5557 bp, Homo sapiens
ttagaactttagattcggatctattttcttaacacacatacacatacacgcgcatacatacatatacagagagatacgtggagaaaggaaatttactctatcattgcaatacttcaagaaagagctgtattttgcctttctgtaatctccaagatagtgtctaggaaagtaatagtataactatagggataccgaaacaggaaaaaccagccatcactcttgagaaagtttgagttcgactcacatgggagaatcgaggtctgctactcgtcttgctttgtgccccatgtgtgcctggtccagccacatacagccaccacatgtgtcacacatgcgctaattgccagcaaagcacaactgaactaaatccaccttcaaggaacctagccataacgagggaggcagcatggaagtaccctacaggggaaagtcctgagtgctgtgggagcatctcaccgtggcagccagcccagttttggcaatcaggggcttcctgaaagaggtgacatcaaagcccggatgtgtcagaggactgagggagagtgttactaaaggactttcaggctgagaggatagcacaggactcagcccaaaggagggccagtgtggactgtccagggccagcctgcagtacagaggctggagcttggacttgtagagggagagagaagagcaagggacgtggacggggcagtgagccaggctagccacagagggttcccggggctttgctggggattcagggagcataaataagagctttaggtggtgctgtgtcctctgcagcccactgctgaggtcctccagacaggtaaggtgtggtcacaatcagggccggggtttccctgctcactgcggcagtgcaggggtgcttgctgagatgattcatcccagggtgtcctctgtcccttacccagccccaactcctcttcctctgccaaaagctatttgaattcaaggactttaacctgggccggatctggtttggagacaaaggggacagctctgggtcagcatgaccttctttagagccactaaggcgaaaaataccgtttgggaccaggctggcctagacccagggatgagaatgcaccctaaaataaatatacgggaagcagcagagggcttccctgtctagtgtgtgatcctaactaaaggcagctctcttggacagccttcccctggattaggtcacatacacctggtggccaagcctctgctgggtcccaaatacacacccgagtcctgccaaagaaaggagatttttaaaaagcacagacaaattgtatgcaagtggaaaatacccataggcctagacagctgtggagggaagacctcgtgggtacctggaggctgccagagctgggagctctgcaggtatgagtcagggaaggctcagagacaagcagaatctctctatggagacaacttgcagtgccttttaggttttccaaataacctcggagttcagagcattgggtttttttctcccctccccacccccagaaaaataattagaaaaatgtttaggagaaaggaaaagaattagatgcatcagaataccagctataagccaacactgtttccagaaactcaagaaaaagctcaaacagaagacagttcccctgagaggctggaggcgttggtgctgaaggcaattttcctagctaaggggcactgggccttgctgcaccttggggctgaccttttttgcaaaacacccacccctgccctcctggcatactcaacagcaacgccagctttctggacccttggaaagatgttagctcaaacacccactttttccagatcttcctcttgctcttcactgaggaatttgtaattctgaggctagcgatgcccactcggatattccgcaggcccaggtgtttagattagaatttgtccagcggtaatcctgatgctggaaaccaacaaacatttggcctcatattcacccatttaaaaactagagcccctggcaggtccccttagggccatgtgttcatggaatataagccaagtttgccttaggcttgttcatggaatataagccaagtttacctctccccattttctgccctggcccacttcccactcacctccacctcattgccaggaagggatcaaaatgcctccatgccagttgttaatggctacatatttgcccttcccaagggtatttgcattttatttaggaacatggccttatattcaaggaaaatctagcatcaagattacgaggcatcacctctcaatcaggtctgggaggtatcttggggcattgctcttctgaacacctgcagaggcttcctcaggtgagtgtgggagcccggaagggtggcctccctaaccactctgcctgcacatgaattctccaaagcagtgggcccccatctgtttcaattacacatgcctgtcagcaaaaacttcgtgagatgcactctctctgtgtgtttattaatttatttaaagcatatatccctttacttttgtactactatattaggcacattataaaaagtatacagcatagaaactttaaatgaataagacacaaaatattataaacagaggttctggcattttctctctgaactcctgagggggaccttgggcacctcctggtatgtgcacaccccactttgaacacccttgctttagtgcaaatcagcacgcctaaatagcatcccaaaccactgtgcgacatttggcctgcagaataagaaagtcctaaggcagaatccccaggaacttcaaatctgggagatgaggaaagaaaactcactcacaaacaacataaatgtaaataattcaaaaccctaaaggagagctgtccctagacagtagtggctacaggtgctaagcaaaagtcaggtacactggacagagccatgcgattgattgttcatcttccctctctgggtctccagaaaaggacactggcaatatccccagctctctcctgattggaattctttgaaccctcgaagtgctccagcagtactaccccccacgtagcagtgggcccatgtcgcttgaatattatttttgatttgaccaccaagatgtaatgatgattctattccattttgaaaagggtctgagaaagtgtacaggtctaattatatatacatatttatacatgtgtatttttgtttattgttacattttgacattggactttctattaaataatttttaagagttggcctggctttgttctcttttatgtctttcttctttcctttctcatggaggaggccattgtaaatatctgcaaaagaccctgttagtgtccttgtccctcctctctttttgccttccctatttcgtgtacataagggcttctcttaccattcgtaaatgttctgtttttactggatatgtggtacagcaggcacccatatggaaggcccccaaccttgttgtcacctcctccaactttcagggacagcccacactgtcctatcagcctcagcaaattcacaaattcagacctgatgaaggtgcaagaatgggcaatgcataaaataacgccatgagccttctctcctgctcaatccccaccacacacagacgcgcacacacacaccatgtgcacacacacagtcctgtctatgagaccttggacaagtcatttaaccttccggagcctactaaaaacaatcattttctcatgagtttgacttgaggagatcccacaggaagtgcttaatgaacaaccttctgttacacaatgactcttttttgtttattcattctactcattcagctgacatttgttaattgtacagtgtatgccagggcctgggtcacccacaaaggggctcagggatgtgtgaatttaaggaattccccactccaaggtcaaaggccagagtggcagcatgaagaatgaggccagtaccatatagtttctcacataccccactgtcaactataactacctggcatgttttagaggctgaaaacatatggattctcccactgcactggccttccaggatttaccgaacagaaatacgcacacacatggacaaacggtctcagggcactttgtcaaagcatgaagccaaaagctgtttccctctgctctgtcttcactgtcgcatgagcctgttcatttctgacaagcgttggtcccatcagcccagccagccttccgccctccagccttgctcttgggaacagattgtcttcatgatttccaactggtgtggtgagaaggagggagggagggaggtcaagccaaggacaggggaaggagttgataactattcctaggcttcttcctccaagccatggagctggaagttcagatttgctgctgagttttatgagctgtcaaataaggcaaaaggaaacttgggacccaaacttgttctttcagtaacaacaaacctgtttcttccagcagaggcttacttgaaatcacaaaggccagccaagctgaaagagctccctaactccacctaccttcccctgtctctctctctcacacacacacacacacacacacacacacacacacacacacacacacacacacacacaaagctggtctcccgtacctctgactggaacttggggagcttccttagtctcatgccgaagaggagtcaagcttaggagacctctggtctgcttcttggtgctccctgaatgcttgttagtgacgtcagcttccagtttactggtaacagctggactgctgccggaggccagtaacctggagttctcttgcttggaagcaggtgatgggaagtgggatgtgagtgatggagggaaaaggaagctcaactccaccgagcctcaacacttgatggatggggcaaagtgaggaaacagaccacagaagcacaggagtaagccactgtttctgcccctcaagggtctccaggccaccatcatccctgccactggcactgcccaacctgccacttccttctacaaagctgaaatgcagtaatctgatggaggacacaaacctttaacttcctcagttcacatcacgttactaatccagcctcctactctccagcagcactcagcttccatctgctggccagctctttacgtggtcctctcctgacactaccacgttcctttgcctatgctggctcttgctgtcccttcgccaagaaaactctcccatttctccttcccactgggaaccaagcctcctctgagttccagttaatattgagcactcacatgaagtctcctcaccgtatgacctaacatatgcccttcgttcctgccaaagaacattccctttaggaggggccgggtgtgggtggcaaggtggggtaggaatccctgacaaggatgatccagggagaattctggtgagtaagacctggtcttcaagtgcaacttggtcttcaagagccaagttgccatgctgaggaagggtgaccccagagcagagcctaggccaggtgaggagcaggtctgagagacgcgatgatcacagagagtggaacacctgtgtttaaggacatggctacagaacatacattgtaaataatgttatagcattatttctaacagt

SEQ ID NO: 1984 - protein, 58 aa, Homo sapiens [sequence omitted]

SEQ ID NO: 1985 - DNA, 1782 bp, Homo sapiens
aagtggaaaatacccataggcctagacagctgtggagggaagacctcgtgggtacctggaggctgccagagctgggagctctgcaggtatgagtcagggaaggctcagagacaagcagaatctctctatggagacaacttgcagtgccttttaggttttccaaataacctcggagttcagagcattgggtttttttctcccctccccacccccagaaaaataattagaaaaatgtttaggagaaaggaaaagaattagatgcatcagaataccagctataagccaacactgtttccagaaactcaagaaaaagctcaaacagaagacagttcccctgagaggctggaggcgttggtgctgaaggcaattttcctagctaaggggcactgggccttgctgcaccttggggctgaccttttttgcaaaacacccacccctgccctcctggcatactcaacagcaacgccagctttctggacccttggaaagatgttagctcaaacacccactttttccagatcttcctcttgctcttcactgaggaatttgtaattctgaggctagcgatgcccactcggatattccgcaggcccaggtgtttagattagaatttgtccagcggtaatcctgatgctggaaaccaacaaacatttggcccacttcccactcacctccacctcattgccaggaagggatcaaaatgcctccatgccagttgttaatggctacatatttgcccttcccaagggtatttgcattttatttaggaacatggccttatattcaaggaaaatctagcatcaagattacgaggcatcacctctcaatcaggtctgggaggtatcttggggcattgctcttctgaacacctgcagaggcttcctcaggtgagtgtgggagcccggaagggtggcctccctaaccactctgcctgcacatgaattctccaaagcagtgggcccccatctgtttcaattacacatgcctgtcagcaaaaacttcgtgagatgcactctctctgtgtgtttattaatttatttaaagcatatatccctttacttttgtactactatattaggcacattataaaaagtatacagcatagaaactttaaatgaataagacacaaaatattataaacagaggttctggcattttctctctgaactcctgagggggaccttgggcacctcctggtatgtgcacaccccactttgaacacccttgctttagtgcaaatcagcacgcctaaatagcatcccaaaccactgtgcgacatttggcctgcagaataagaaagtcctaaggcagaatccccaggaacttcaaatctgggagatgaggaaagaaaactcactcacaaacaacataaatgtaaataattcaaaaccctaaaggagagctgtccctagacagtagtggctacaggtgctaagcaaaagtcaggtacactggacagagccatgcgattgattgttcatcttccctctctgggtctccagaaaaggacactggcaatatccccagctctctcctgattggaattctttgaaccctcgaagtgctccagcagtactaccccccacgtagcagtgggcccatgtcgcttgaatattatttttgatttgaccaccaagatgtaatgatgattctattccattttgaaaagggtctgagaaagtgtacaggtctaattatatatacatatttatacatgtgtatttttgtttattgttacattttgacattggactttctattaaataatttttaagagttggc

SEQ ID NO: 1986 - protein, 55 aa, Homo sapiens [sequence omitted]

SEQ ID NO: 1987 - DNA, 3178 bp, Homo sapiens
aaactgtgtgtggttaatagacatcctaatactaagcaggctttctaatgggaggctttaagtatggtgatgaacaaccacgttctgactggcgtagttatcgtaggaatctggagcatgctgtgttagaattgaccttgtttaaaactgtcccatcaaaaatggaaatccacagttcccccttcaaatgcagcactgcaccaccctgcaacacctcaggccagggaaagattactgagcattcctgcgaaccagatttctgttgtctctggatagacaagaaacaaaattcatttagtagtggagtggggaataggagtttggatagccttctaattaaaggaagctcgcctttcttggttttgggggttagaggctcttttgggaagatgcatccgagtattgtggcattctgattatgctgccttcacaaaacactctaagtgacctaagtggttatgaagcaaatgcatttatggtgaaaacagtctttgctcattgctttctcttgtttcatttagtgacaaatgatcaagatgacttgattttttttccttcttaacaatgtcttttttatttaaaccaaaggtgaagccagtgtactttctcagtgagttctctgcataaagactaatcagtgggaccaggtaaaaaggtcatataatacattgtggagattgcttacttaatacttctgaaaaatggagtaagggagaaactgtaatgttgcaatatgaacctcccattgggccttccatagggaaagctgtgactactctgaaatggaacctagcattatatccttgtagggtagattataaatcatttccagttcatttctcttagaggtgattacctctagccatcagccttactccatcccatgtttggtatgcaatttgagccacaaggctcgtatcgccaacagctatatacattttgttccatattcttttctgagaggataaatacctgcattcagatattccaggtaaatataattgagtcagggagtagtaaatctgatggagaattcactttggggaggggaaaaagaatagtatgcaagacccttattggcttttaattatacctgaaaccaaaatggatatttttagtctctctgcatgtgagatttggtgtaacaagatagaactataatatatacagtatatggaaggatagatatagtgctttgttcattttaattgcaaagctgccaaaatagttgaagcttaattacttgacttgccttgatttataggactggggcttggagaaaatgagcagatgttcctctaagacatcgattacagaagccttatatacatggatttgattttgtatttgtagctgaaagtcactgttgtctaaaactaacttttctaagttatcaaaacaacctaatttcttttccaacaaggagaacttaatggcatgaaggattgtgtgacacattggaaaagccagcttactgccactctcttcctttggccattagagggaggtgttgcctttcattgacgcttagaagcaaattgttcacttgttaagaaaagtaaatccttaaaaaaagaaaaggaaaaaatttaaccaatttttcttaatacccagaaggaattatactcaatatttccctagttaagaaaagaggagataatgttcgtctaaaaaactccaacgttgtaattacaactctacattcatttacttacttgacatactgccacaaagtagtttttgagttcattaaaaattccaaaggcattagttgttttttttttttttagtgttttgttttttagttaacttttatagacattttagtaacttgctaaagattcaggggattctatgaaaccccgaatttagaaacatctggtctacctcagttaaatgttgactgcttagaaatatagctgaagtgatcaccacagccataaaattgtttaagaaagatttatataatgtttacaaatctggaatcaaggattttagctgaaatcctttaagagatattagagcaagtatttaattcaggtattttcaagttttaaaacttaacctgtttacctactaaaaataaaatagctagtttttttctgcatataaaagttcattgaaatgatatgcccttatttgcaatacttttcccataaagttttaagtgtgaaagaattgtaatttactagatatgtttggtatgggatattttgttaggcaagttttcttttttcttcttaaattgcaataggcttccaaaaagagtataattgtttcagaacaaattaactcttggcattatacgtctccctttttctttacagtattagtaaaaagaaaaattgtacactttctgattttaacttcactaatgtaattactctctcaagaagcttttaaaatttaaattaccatcacacaaccttttttatagtaaagccaacatttgttctctcaccaaaccccatgccaaattcatcatgaagaaagctcagcataagtaattcaaatactgcttataattttagaggggggtagaatttagtaaatattccagccggtcgttttatgcacaaggcttcagtcagaacatagaaaaaaaaaacattctgtgaatgaaatattgtatgttcagattttataaaagacatttttaaaagcccaatttacagccgtatattttcttatgatgtaatttatgaaaaagatgtctgtactaacaggtgctgtaacactactgttgttggattttattgtttggtgataaatgtatacaatatttctaagggaaactatgtactgtgatgtaaaagtctgggcaaaatgtatataatcctgtatataattatgtatttgattataattactgattgtaaagatttaataaaatatgtaaatattccagtttagttttaatttgaatttttagaatcactgtgcatatcctcatacttttatgtcttgatgtttatcactctgttttccttttttttttaaactcattttatcctccggggattgaattctggggacattttaggctgtagaaacccaagcttgtgggctaaagtaaggattttgttctaagaaatcactgaaagtttttcaacaagtcagtagcatgcacaaaggtaatgctaagtgaataaaactctagaattgtgtataaattatg

SEQ ID NO: 1988 - protein, 67 aa, Homo sapiens
MFGMQFEPQGSYRQQLYTFCSIFFSERINTCIQIFQVNIIESGSSKSDGEFTLGRGKRIVCKTLIGF

SEQ ID NO: 1989 - DNA, 3503 bp, Homo sapiens
gaggcgctccgggatactgagggcggagggcggtggcagcgctggcgctggggaccggcttggtggcttcgggaaacagtttggcgccggcggccgtccgtgttactccgcatcccgccccgtctcggcacggctagcagccccctggccaccagcgtccagcaatgtgtctcaccggccgggcgtagcagctgcgcgtgcgcggaaccgcggggccatgagcgaagccggcggccggggctgtgggtccccggttccccagcgagcgcgatggagactagtggcggcgacggccgcgttctgcctggtgtcggccacctccgtgtggacggcgggggccgagcccatgagtagggaggagaaacagaagcttgggaatcaagtactggaaatgtttgatcatgcttatggtaactatatggaacatgcttaccctgctgatgaactcatgcctttaacctgtagaggtcgagttagaggccaagagccaagtcgcggtgacgttgatgatgccttgggaaaattttctctgacactgattgattctttggacactcttgtggtgattacctctagccatcagccttactccatcccatgtttggtatgcaatttgagccacaaggctcgtatcgccaacagctatatacattttgttccatttttctgtcttacagagccatgatagaactgtggttagtgagttaaaattcctggagtaactactgtttttctcctttgaaacttaggtttctaaagttgcacctaaggaatctgtcacattttctgttgaatcatggtttttgtttttgtttttaacagatattccttctgatacggacttgaaaattagtgtatggtgacctgtgtttaaaaaaaaaagtacaatacaactacatatagctatatagcttaatgagacttccaccccccccctttttttttttggtttgttgttgttgtagtagtctggtgctggccacatttaagtcttaaaaatttttaaattttgttgttgatgtttgtagacagccctgttgttgaaatcatggctttattcattttatttattttttaaacttgcctgaatttgttctaaaggaatatttaagagacataattttcttctctttaccataacattacacaaaactttttcctaaaacacggttgtgaggtactgatgaggtgtaagtggagctgttaaaaacagcagtgctgtattgcagttatgtatattcgtgtacagtatgtttagatcccaggtaaacatattcttttctgagaggataaatacctgcattcagatattccaggtaaatataattgagtcagggagtagtaaatctgatggagaattcactttggggaggggaaaaagaatagtatgcaagacccttattggcttttaattatacctgaaaccaaaatggatatttttagtctctctgcatgtgagatttggtgtaacaagatagaactataatatatacagtatatggaaggatagatatagtgctttgttcattttaattgcaaagctgccaaaatagttgaagcttaattacttgacttgccttgatttataggactggggcttggagaaaatgagcagatgttcctctaagacatcgattacagaagccttatatacatggatttgattttgtatttgtagctgaaagtcactgttgtctaaaactaacttttctaagttatcaaaacaacctaatttcttttccaacaaggagaacttaatggcatgaaggattgtgtgacacattggaaaagccagcttactgccactctcttcctttggccattagagggaggtgttgcctttcattgacgcttagaagcaaattgttcacttgttaagaaaagtaaatccttaaaaaaagaaaaggaaaaaatttaaccaatttttcttaatacccagaaggaattatactcaatatttccctagttaagaaaagaggagataatgttcgtctaaaaaactccaacgttgtaattacaactctacattcatttacttacttgacatactgccacaaagtagtttttgagttcattaaaaattccaaaggcattagttgttttttttttttttagtgttttgttttttagttaacttttatagacattttagtaacttgctaaagattcaggggattctatgaaaccccgaatttagaaacatctggtctacctcagttaaatgttgactgcttagaaatatagctgaagtgatcaccacagccataaaattgtttaagaaagatttatataatgtttacaaatctggaatcaaggattttagctgaaatcctttaagagatattagagcaagtatttaattcaggtattttcaagttttaaaacttaacctgtttacctactaaaaataaaatagctagtttttttctgcatataaaagttcattgaaatgatatgcccttatttgcaatacttttcccataaagttttaagtgtgaaagaattgtaatttactagatatgtttggtatgggatattttgttaggcaagttttcttttttcttcttaaattgcaataggcttccaaaaagagtataattgtttcagaacaaattaactcttggcattatacgtctccctttttctttacagtattagtaaaaagaaaaattgtacactttctgattttaacttcactaatgtaattactctctcaagaagcttttaaaatttaaattaccatcacacaaccttttttatagtaaagccaacatttgttctctcaccaaaccccatgccaaattcatcatgaagaaagctcagcataagtaattcaaatactgcttataattttagaggggggtagaatttagtaaatattccagccggtcgttttatgcacaaggcttcagtcagaacatagaaaaaaaaaacattctgtgaatgaaatattgtatgttcagattttataaaagacatttttaaaagcccaatttacagccgtatattttcttatgatgtaatttatgaaaaagatgtctgtactaacaggtgctgtaacactactgttgttggattttattgtttggtgataaatgtatacaatatttctaagggaaactatgtactgtgatgtaaaagtctgggcaaaatgtatataatcctgtatataattatgtatttgattataattactgattgtaaagatttaataaaatatgtaaatattccagtttagttttaatttgaatttttagaatcactgtgcatatcctcatacttttatgtcttgatgtttatcactctgttttccttttttttttaaactcattttatcctccggggattgaattctggggacattttaggctgtagaaacccaagcttgtgggctaaagtaaggattttgttctaagaaatcactgaaagtttttcaacaagtcagtagcatgcacaaaggtaatgctaagtgaataaaactctagaattgtgtataaattatg

SEQ ID NO: 1990 - protein, 155 aa, Homo sapiens [sequence omitted]

SEQ ID NO: 1991 - DNA, 2906 bp, Homo sapiens
aaactgtgtgtggttaatagacatcctaatactaagcaggctttctaatgggaggctttaagtatggtgatgaacaaccacgttctgactggcgtagttatcgtaggaatctggagcatgctgtgttagaattgaccttgtttaaaactgtcccatcaaaaatggaaatccacagttcccccttcaaatgcagcactgcaccaccctgcaacacctcaggccagggaaagattactgagcattcctgcgaaccagatttctgttgtctctggatagacaagaaacaaaattcatttagtagtggagtggggaataggagtttggatagccttctaattaaaggaagctcgcctttcttggttttgggggttagaggctcttttgggaagatgcatccgagtattgtggcattctgattatgctgccttcacaaaacactctaagtgacctaagtggttatgaagcaaatgcatttatggtgaaaacagtctttgctcattgctttctcttgtttcatttagtgacaaatgatcaagatgacttgattttttttccttcttaacaatgtcttttttatttaaaccaaaggtgaagccagtgtactttctcagtgagttctctgcataaagactaatcagtgggaccaggtaaaaaggtcatataatacattgtggagattgcttacttaatacttctgaaaaatggagtaagggagaaactgtaatgttgcaatatgaacctcccattgggccttccatagggaaagctgtgactactctgaaatggaacctagcattatatccttgtagggtagattataaatcatttccagttcatttctcttagaggtgattacctctagccatcagccttactccatcccatgtttggtatgcaatttgagccacaaggctcgtatcgccaacagctatatacattttgttccatattcttttctgagaggataaatacctgcattcagatattccaggtaaatataattgagtcagggagtagtaaatctgatggagaattcactttggggaggggaaaaagaatagtatgcaagacccttattggcttttaattatacctgaaaccaaaatggatatttttagtctctctgcatgtgagatttggtgtaacaagatagaactataatatatacagtatatggaaggatagatatagtgctttgttcattttaattgcaaagctgccaaaatagttgaagcttaattacttgacttgccttgatttataggactggggcttggagaaaatgagcagatgttcctctaagacatcgattacagaagccttatatacatggatttgattttgtatttgtagctgaaagtcactgttgtctaaaactaacttttctaagttatcaaaacaacctaatttcttttccaacaaggagaacttaatggcatgaaggattgtgtgacacattggaaaagccagcttactgccactctcttcctttggccattagagggaggtgttgcctttcattgacgcttagaagcaaattgttcacttgttaagaaaagtaaatccttaaaaaaagaaaaggaaaaaatttaaccaatttttcttaatacccagaaggaattatactcaatatttccctagttaagaaaagaggagataatgttcgtctaaaaaactccaacgttgtaattacaactctacattcatttacttacttgacatactgccacaaagtagtttttgagttcattaaaaattccaaaggcattagttgttttttttttttttagtgttttgttttttagttaacttttatagacattttagtaacttgctaaagattcaggggattctatgaaaccccgaatttagaaacatctggtctacctcagttaaatgttgactgcttagaaatatagctgaagtgatcaccacagccataaaattgtttaagaaagatttatataatgtttacaaatctggaatcaaggattttagctgaaatcctttaagagatattagagcaagtatttaattcaggtattttcaagttttaaaacttaacctgtttacctactaaaaataaaatagctagtttttttctgcatataaaagttcattgaaatgatatgcccttatttgcaatacttttcccataaagttttaagtgtgaaagaattgtaatttactagatatgtttggtatgggatattttgttaggcaagttttcttttttcttcttaaattgcaataggcttccaaaaagagtataattgtttcagaacaaattaactcttggcattatacgtctccctttttctttacagtattagtaaaaagaaaaattgtacactttctgattttaacttcactaatgtaattactctctcaagaagcttttaaaatttaaattaccatcacacaaccttttttatagtaaagccaacatttgttctctcaccaaaccccatgccaaattcatcatgaagaaagctcagcataagtaattcaaatactgcttataattttagaggggggtagaatttagtaaatattccagccggtcgttttatgcacaaggcttcagtcagaacatagaaaaaaaaaacattctgtgaatgaaatattgtatgttcagattttataaaagacatttttaaaagcccaatttacagccgtatattttcttatgatgtaatttatgaaaaagatgtctgtactaacaggtgctgtaacactactgttgttggattttattgtttggtgataaatgtatacaatatttctaagggaaactatgtactgtgatgtaaaagtctgggcaaaatgtatataatcctgtatataattatgtatttgattataattactgattgtaaagatttaataaaatatgtaaatattcc

SEQ ID NO: 1992 - protein, 67 aa, Homo sapiens; identical to SEQ ID NO: 1988

SEQ ID NO: 1993 - DNA, 6282 bp, Homo sapiens
ccgcgttctgcctggtgtcggccacctccgtgtggacggcgggggccgagcccatgagtagggaggagaaacagaagcttgggaatcaagtactggaaatgtttgatcatgcttatggtaactatatggaacatgcttaccctgctgatgaactcatgcctttaacctgtagaggtcgagttagaggccaagagccaagtcgcggtgacgttgatgatgccttgggaaaattttctctgacactgattgattctttggacactcttgtggttttaaataaaactaaagaatttgaagatgcagtgagaaaagttttaagagatgttaatttagataacgatgtagtcgtatcagtctttgaaacaaacatcagagttcttgggggtcttttgggtgggcactccctggcaatcatgctgaaagaaaaaggtgaatatatgcagtggtacaatgatgaacttctccaaatggcaaagcagttaggttacaaacttttaccggctttcaacactaccagtggccttccttatccaagaattaatttaaagtttggcatcagaaaaccagaagctcggacaggaactgagacagatacctgtacagcttgtgcaggtaccttgatccttgaatttgctgctttaagtcgattcacaggagcaacaatatttgaggaatatgccagaaaagctcttgattttctctgggaaaaaagacagcgaagtagtaatttagtgggcgtgactataaatattcatactggagattgggtacgaaaagatagtggagttggagcagggattgattcatattatgaatatctgttgaaagcctatgtcttgcttggagatgacagttttctggaaagatttaacacacactatgatgccataatgaggtatattagccagccacctcttctacttgatgtgcatatccacaaaccaatgctgaatgctcggacttggatggatgctttgcttgccttcttcccaggcttgcaggtgttaaagggggatattagacctgctattgaaactcatgaaatgttatatcaggtgattaaaaaacacaattttctaccagaggcatttaccacagatttcagagtacactgggctcaacatcctttaaggccagaatttgcagaaagtacctacttcttatataaagctacaggagatccttactaccttgaagtagggaagacacttattgaaaatttaaataaatatgctagagtgccttgcggatttgctgccatgaaggatgttcgtactggaagtcatgaggacagaatggattctttcttcttggctgaaatgtttaaatatctttacctgttatttgctgataaagaagacattatttttgacatagaagattacatctttacaacagaagctcatctgttacctctttggctctctactacaaatcaaagcatctctaaaaagaacacaacctcggaatatacagaactggatgacagtaacttcgattggacttgtccaaatactcagatcctctttcctaatgacccattgtatgctcaaagtattcgtgagcccttgaaaaatgtggtggataagagctgtcctagaggcatcatcagagtagaggagagtttcaggagtggagctaaaccccctctgagagccagagatttcatggccactaaccctgagcatttagaaatcctgaagaagatgggggtgagtttgattcacctcaaagatgggagagtccagttggtccaacatgcaatccaagctgctagttcaatcgacgctgaagatgggttgaggttcatgcaggagatgattgaattgtcaagtcagcaacaaaaagaacagcagctgcctccacgagctgtacaaattgtttcccacccattttttggcagggtagtattgactgctggaccagctcagtttgggctggatctgtctaaacataaagagacaagaggatttgttgcaagcagtaaaccatccaatggttgttcagagcttactaacccagaggcagtgatgggaaaaatcgcactgatacaaagaggacagtgcatgtttgcagaaaaggcacgcaacatccagaatgctggagccattggtggcattgttattgatgacaatgaggggagcagcagtgatactgcccctctgttccagatggcaggtgatggaaaggatacagatgacatcaagatccccatgctgttcttattcagcaaagaaggaagtatcatactggatgccatccgggaatatgaggaggtagaagtgctcctctctgataaagcaaaagatcgagatcctgaaatggaaaatgaagaacaaccatcctctgaaaatgattctcagaatcagagtggtgaacagatttcatcaagttctcaggaggttgatttggttgatcaagagtcttctgaggaaaattctctaaattctcacccagaatcattatctctagcagatatggacaatgctgcaagcatttccccttctgaacagacttctaatcccacagaaaaccatgagactacaaatcttaatggtgaatgtacagatttagataaccagcttcaagaacaatcagaaactgaggaagattccaatcctaatgttagctggggtaaaaaggtccagcctatagactccatattagcagactggaatgaagatatagaagcatttgaaatgatggagaaggatgagctatgacttgctaaacaatctgttggtaggtatttaaaaagaaaaggtaaactgtgtgtggttaatagacatcctaatactaagcaggctttctaatgggaggctttaagtatggtgatgaacaaccacgttctgactggcgtagttatcgtaggaatctggagcatgctgtgttagaattgaccttgtttaaaactgtcccatcaaaaatggaaatccacagttcccccttcaaatgcagcactgcaccaccctgcaacacctcaggccagggaaagattactgagcattcctgcgaaccagatttctgttgtctctggatagacaagaaacaaaattcatttagtagtggagtggggaataggagtttggatagccttctaattaaaggaagctcgcctttcttggttttgggggttagaggctcttttgggaagatgcatccgagtattgtggcattctgattatgctgccttcacaaaacactctaagtgacctaagtggttatgaagcaaatgcatttatggtgaaaacagtctttgctcattgctttctcttgtttcatttagtgacaaatgatcaagatgacttgattttttttccttcttaacaatgtcttttttatttaaaccaaaggtgaagccagtgtactttctcagtgagttctctgcataaagactaatcagtgggaccaggtaaaaaggtcatataatacattgtggagattgcttacttaatacttctgaaaaatggagtaagggagaaactgtaatgttgcaatatgaacctcccattgggccttccatagggaaagctgtgactactctgaaatggaacctagcattatatccttgtagggtagattataaatcatttccagttcatttctcttagaggtgattacctctagccatcagccttactccatcccatgtttggtatgcaatttgagccacaaggctcgtatcgccaacagctatatacattttgttccatttttctgtcttacagagccatgatagaactgtggttagtgagttaaaattcctggagtaactactgtttttctcctttgaaacttaggtttctaaagttgcacctaaggaatctgtcacattttctgttgaatcatggtttttgtttttgtttttaacagatattccttctgatacggacttgaaaattagtgtatggtgacctgtgtttaaaaaaaaaagtacaatacaactacatatagctatatagcttaatgagacttccaccccccccctttttttttttggtttgttgttgttgtagtagtctggtgctggccacatttaagtcttaaaaatttttaaattttgttgttgatgtttgtagacagccctgttgttgaaatcatggctttattcattttatttattttttaaacttgcctgaatttgttctaaaggaatatttaagagacataattttcttctctttaccataacattacacaaaactttttcctaaaacacggttgtgaggtactgatgaggtgtaagtggagctgttaaaaacagcagtgctgtattgcagttatgtatattcgtgtacagtatgtttagatcccaggtaaacatattcttttctgagaggataaatacctgcattcagatattccaggtaaatataattgagtcagggagtagtaaatctgatggagaattcactttggggaggggaaaaagaatagtatgcaagacccttattggcttttaattatacctgaaaccaaaatggatatttttagtctctctgcatgtgagatttggtgtaacaagatagaactataatatatacagtatatggaaggatagatatagtgctttgttcattttaattgcaaagctgccaaaatagttgaagcttaattacttgacttgccttgatttataggactggggcttggagaaaatgagcagatgttcctctaagacatcgattacagaagccttatatacatggatttgattttgtatttgtagctgaaagtcactgttgtctaaaactaacttttctaagttatcaaaacaacctaatttcttttccaacaaggagaacttaatggcatgaaggattgtgtgacacattggaaaagccagcttactgccactctcttcctttggccattagagggaggtgttgcctttcattgacgcttagaagcaaattgttcacttgttaagaaaagtaaatccttaaaaaaagaaaaggaaaaaatttaaccaatttttcttaatacccagaaggaattatactcaatatttccctagttaagaaaagaggagataatgttcgtctaaaaaactccaacgttgtaattacaactctacattcatttacttacttgacatactgccacaaagtagtttttgagttcattaaaaattccaaaggcattagttgttttttttttttttagtgttttgttttttagttaacttttatagacattttagtaacttgctaaagattcaggggattctatgaaaccccgaatttagaaacatctggtctacctcagttaaatgttgactgcttagaaatatagctgaagtgatcaccacagccataaaattgtttaagaaagatttatataatgtttacaaatctggaatcaaggattttagctgaaatcctttaagagatattagagcaagtatttaattcaggtattttcaagttttaaaacttaacctgtttacctactaaaaataaaatagctagtttttttctgcatataaaagttcattgaaatgatatgcccttatttgcaatacttttcccataaagttttaagtgtgaaagaattgtaatttactagatatgtttggtatgggatattttgttaggcaagttttcttttttcttcttaaattgcaataggcttccaaaaagagtataattgtttcagaacaaattaactcttggcattatacgtctccctttttctttacagtattagtaaaaagaaaaattgtacactttctgattttaacttcactaatgtaattactctctcaagaagcttttaaaatttaaattaccatcacacaaccttttttatagtaaagccaacatttgttctctcaccaaaccccatgccaaattcatcatgaagaaagctcagcataagtaattcaaatactgcttataattttagaggggggtagaatttagtaaatattccagccggtcgttttatgcacaaggcttcagtcagaacatagaaaaaaaaaacattctgtgaatgaaatattgtatgttcagattttataaaagacatttttaaaagcccaatttacagccgtatattttcttatgatgtaatttatgaaaaagatgtctgtactaacaggtgctgtaacactactgttgttggattttattgtttggtgataaatgtatacaatatttctaagggaaactatgtactgtgatgtaaaagtctgggcaaaatgtatataatcctgtatataattatgtatttgattataattactgattgtaaagatttaataaaatatgtaaatattcc

SEQ ID NO: 1994 - protein, 889 aa, Homo sapiens; identical to SEQ ID NO: 72

SEQ ID NO: 1995 - DNA, 3231 bp, Homo sapiens
gaggcgctccgggatactgagggcggagggcggtggcagcgctggcgctggggaccggcttggtggcttcgggaaacagtttggcgccggcggccgtccgtgttactccgcatcccgccccgtctcggcacggctagcagccccctggccaccagcgtccagcaatgtgtctcaccggccgggcgtagcagctgcgcgtgcgcggaaccgcggggccatgagcgaagccggcggccggggctgtgggtccccggttccccagcgagcgcgatggagactagtggcggcgacggccgcgttctgcctggtgtcggccacctccgtgtggacggcgggggccgagcccatgagtagggaggagaaacagaagcttgggaatcaagtactggaaatgtttgatcatgcttatggtaactatatggaacatgcttaccctgctgatgaactcatgcctttaacctgtagaggtcgagttagaggccaagagccaagtcgcggtgacgttgatgatgccttgggaaaattttctctgacactgattgattctttggacactcttgtggtgattacctctagccatcagccttactccatcccatgtttggtatgcaatttgagccacaaggctcgtatcgccaacagctatatacattttgttccatttttctgtcttacagagccatgatagaactgtggttagtgagttaaaattcctggagtaactactgtttttctcctttgaaacttaggtttctaaagttgcacctaaggaatctgtcacattttctgttgaatcatggtttttgtttttgtttttaacagatattccttctgatacggacttgaaaattagtgtatggtgacctgtgtttaaaaaaaaaagtacaatacaactacatatagctatatagcttaatgagacttccaccccccccctttttttttttggtttgttgttgttgtagtagtctggtgctggccacatttaagtcttaaaaatttttaaattttgttgttgatgtttgtagacagccctgttgttgaaatcatggctttattcattttatttattttttaaacttgcctgaatttgttctaaaggaatatttaagagacataattttcttctctttaccataacattacacaaaactttttcctaaaacacggttgtgaggtactgatgaggtgtaagtggagctgttaaaaacagcagtgctgtattgcagttatgtatattcgtgtacagtatgtttagatcccaggtaaacatattcttttctgagaggataaatacctgcattcagatattccaggtaaatataattgagtcagggagtagtaaatctgatggagaattcactttggggaggggaaaaagaatagtatgcaagacccttattggcttttaattatacctgaaaccaaaatggatatttttagtctctctgcatgtgagatttggtgtaacaagatagaactataatatatacagtatatggaaggatagatatagtgctttgttcattttaattgcaaagctgccaaaatagttgaagcttaattacttgacttgccttgatttataggactggggcttggagaaaatgagcagatgttcctctaagacatcgattacagaagccttatatacatggatttgattttgtatttgtagctgaaagtcactgttgtctaaaactaacttttctaagttatcaaaacaacctaatttcttttccaacaaggagaacttaatggcatgaaggattgtgtgacacattggaaaagccagcttactgccactctcttcctttggccattagagggaggtgttgcctttcattgacgcttagaagcaaattgttcacttgttaagaaaagtaaatccttaaaaaaagaaaaggaaaaaatttaaccaatttttcttaatacccagaaggaattatactcaatatttccctagttaagaaaagaggagataatgttcgtctaaaaaactccaacgttgtaattacaactctacattcatttacttacttgacatactgccacaaagtagtttttgagttcattaaaaattccaaaggcattagttgttttttttttttttagtgttttgttttttagttaacttttatagacattttagtaacttgctaaagattcaggggattctatgaaaccccgaatttagaaacatctggtctacctcagttaaatgttgactgcttagaaatatagctgaagtgatcaccacagccataaaattgtttaagaaagatttatataatgtttacaaatctggaatcaaggattttagctgaaatcctttaagagatattagagcaagtatttaattcaggtattttcaagttttaaaacttaacctgtttacctactaaaaataaaatagctagtttttttctgcatataaaagttcattgaaatgatatgcccttatttgcaatacttttcccataaagttttaagtgtgaaagaattgtaatttactagatatgtttggtatgggatattttgttaggcaagttttcttttttcttcttaaattgcaataggcttccaaaaagagtataattgtttcagaacaaattaactcttggcattatacgtctccctttttctttacagtattagtaaaaagaaaaattgtacactttctgattttaacttcactaatgtaattactctctcaagaagcttttaaaatttaaattaccatcacacaaccttttttatagtaaagccaacatttgttctctcaccaaaccccatgccaaattcatcatgaagaaagctcagcataagtaattcaaatactgcttataattttagaggggggtagaatttagtaaatattccagccggtcgttttatgcacaaggcttcagtcagaacatagaaaaaaaaaacattctgtgaatgaaatattgtatgttcagattttataaaagacatttttaaaagcccaatttacagccgtatattttcttatgatgtaatttatgaaaaagatgtctgtactaacaggtgctgtaacactactgttgttggattttattgtttggtgataaatgtatacaatatttctaagggaaactatgtactgtgatgtaaaagtctgggcaaaatgtatataatcctgtatataattatgtatttgattataattactgattgtaaagatttaataaaatatgtaaatattcc

SEQ ID NO: 1996 - protein, 155 aa, Homo sapiens [sequence omitted]

SEQ ID NO: 1997 - DNA, 7956 bp, Homo sapiens
ccacctcggcctcccaaagtgttgggattacgggcatgagccacctctcccagcttgttcttgcattttgtaagatcacatagagtatcaaaactggaaaggacctgggccatcacttccctgagaaaaagtgactttctcaaggtcatgcagttagtagcaatgctggaactgaacgcctaccccgcagatcacaacatgacccgtgaaaggacctatcctgcaacactttggagtttcgtgccgacccaattagtggctttgtctttgggaaatttacttccccaaaacactgggacattgggatggaattcactcaccccaaatcatcaccctggttaaggagactaaagaatcagaagacatttgtgctttggggagcagaggccctcagggtatagagaaggaagaagagagaggttcactgtagtcctgaagcagaaataagacctgtggctgaaggaagccttagcaattcactccttcctcttcctgagaactctctgtaggaagtctcacctagcagaggcttcacagtatttcagagaagccaaagattgtttgcctctttggaaactgttatccttccatcatgactgtgtcactcctgccactgttccaccatagagatggcgtcctttgcagcaaaccgtaagttataaggatgagggaagaagagtagagggccaaaaggattccattttgaggaaaaactacagtttgccttgccaggtagaagaatcaggcgcccagacaccatgtcacaaccctccagaactgacgttggcaggaagtagagactttgttgcctgtgtcccccatcctcaccatgtcttcgactcagggcaatggggaacactggaagtccctggagtcagtgggcatcagccgcaaagagctagcgatggccgaagccctgcagatggagtatgatgccctgtcccggctccggcatgacaaggaggagaacagagccaagcagaacgcagacccctctctcatcagctgggatgagcctggggtagacttttacagcaagccagcaggaaggcggaccgacctcaagctgttacgcggtctctctggctctgatcctacccttaactacaactcactctccccacaggaagggccgcccaaccactctacctcccaagggccacagcctggctcagatccctggcccaaaggctccctgtctggagactatctctacatttttgatggttcagatgggggagtctcttcgtccccaggaccaggggacatagagggctcttgcaagaaactatccccacctcctctgcctccccgagcttctatctgggatacccctcccctgcctcccagaaaggggtccccctcatcctccaagatctcccagcccagtgacatcaacactttctctttggtcgaacaattgccgggcaaactgctagagcatcggatcctagaagaggaagaggtgctgggaggtgggggtcaggggcgcctactggggtctgtggactatgatggtatcaatgatgcaattactaggctcaacttgaaatcgacctatgatgcggagatgttgcgggatgccaccaggggctggaaggagggccgagggccgctggacttcagcaaagacacctctggaaaacccgtggccaggagcaagactatgccccctcaggtgcccccccgcacctatgcctcccgctatggcaaccgaaagaatgcgacgcctggcaagaaccgccggatttctgcagccccggtgggctcccggccccacactgttgccaatggccatgagttgtttgaggtctcagaagagagagatgaggaggttgctgcattttgccacatgctggatatccttcgatctggctctgacatccaagactacttcctcactggctatgtctggagtgctgtcacccctagcccagagcacctcggggatgaggtcaacctgaaggtgactgtgttgtgtgacaggcttcaagaggcactcactttcacctgcaactgttcctccactgtagacttgcttatctaccagaccctgtgctacacccatgatgacctgaggaatgtggacgtgggtgactttgtgctaaagccctgcgggctggaggagttcctgcagaacaagcatgccttgggcagtcatgagtacatccaatactgccgcaagtttgacattgacattcggctacagctgatggagcagaaggttgtgcgcagtgacctggcccggacggtgaatgatgaccagagcccctccaccttgaactacctcgtccatctccaagagaggcctgtcaagcagaccatcagcaggcaggccctgagtcttctgttcgacacttaccacaatgaggtggatgccttcctgctggctgatggagacttcccactgaaggctgacagggtggtccagtccgtcaaggccatctgcaacgccctggccgccgtggaaacccctgagatcaccagtgctctcaaccagctgcccccctgcccctcccgcatgcagcctaaaattcagaaggatcccagtgtcttggctgtgagggaaaaccgagagaaggtcgtggaagccctgaccgctgccatcttggacctggtggagctgtactgcaacacattcaacgcagacttccagacggcagtgcccgggagccgcaagcatgacctggtccaggaggcctgccatttcgccaggtccctggccttcactgtctatgccacccaccgcatccccatcatctgggctaccagctatgaagatttctacctctcctgctccctcagccatggcggcaaggagctgtgcagccccctgcagacccgaagagctcacttctccaagtacctcttccacctcatcgtctgggaccagcagatctgcttcccagtgcaggtgaaccggctgcctcgggagacactgctgtgtgccactctctatgctctgcccatccccccaccggggagctcctcagaggccaataagcagcggcgggtgcctgaagccctgggctgggtcactaccccactcttcaacttcaggcaggtcctgacctgtggccggaagcttctgggtttgtggccagcaacacaggaaaatcccagcgcccgttggagtgcacctaatttccaccagccagacagtgtcatcctgcagattgacttccccacctcggcctttgacatcaagttcaccagcccccctggagacaagttcagcccccgctatgagtttggcagcctccgggaagaagaccagcgcaagcttaaagacatcatgcagaaagagtccttgtactggctcactgatgctgacaagaagcgcctgtgggagaagcgatattactgccactcggaggtgagctcgctccccctggtgctcgccagcgcccccagctgggagtgggcttgcctgcctgacatctatgttctcctgaagcagtggacccacatgaaccaccaggatgccctggggctcctgcatgccaccttcccggaccaggaggtgcgtcgtatggctgtgcagtggattggctcactctcagatgctgagctgctagactacctgccccagctggtacaggccctgaagtatgaatgctacctggacagcccgttggtgcgcttcctcctgaaacgagctgtgtctgacttgagagtgactcactacttcttctggttactgaaggacggcctcaaggactctcagttcagcatccgctaccagtatctgctggcagccttactgtgctgctgtggcaaggggctgagagaagagtttaaccgccagtgctggcttgtcaatgccctggccaaactggcccagcaggtccgggaggcagccccatctgcaaggcagggaatcctccgcacgggcctggaggaggtgaagcagttctttgccctcaatggctcgtgccgcttgccactcagccccagtctgctggttaagggaattgtgcccagggactgttcctacttcaactccaatgctgtccccctcaaactctccttccaaaatgtggatcccctgggtgagaacatccgtgtcatcttcaagtgtggggacgaccttcgccaggacatgctaacgctgcagatgattcgcatcatgagcaagatctgggtccaggaggggctggacatgcgcatggtcatcttccgctgcttctccaccggccggggcagagggatggtggagatgatccctaatgctgagaccctgcgtaagatccaggtggagcatggggtgaccggctcgttcaaggaccggcccctggcagactggctgcagaaacacaaccctggggaggacgagtatgagaaggctgtggagaactttatctactcctgcgctggctgctgcgtggccacgtacgtcttgggcatctgtgaccgacataatgacaacatcatgctgaagaccactggtcacatgttccacattgattttggccgcttcctgggccatgcccagatgtttggcaacatcaagcgggaccgtgccccctttgtcttcacctcggacatggcgtatgtcatcaacgggggtgacaagccttccagccgcttccatgattttgttgacctttgctgccaagcctacaacctcattcgcaagcacacccacctcttcctcaaccttctgggcctgatgttgtcctgtgggatccctgaactctcagacctggaggacctcaagtatgtgtacgatgccctgaggcctcaggatacagaggccaatgccactacctacttcactaggttgattgagtccagcctgggcagtgtagccacaaagctcaattttttcatccataatctggctcagatgaagttcacgggctcagatgaccggctgaccctctcctttgcctcccgaacacacactctcaagagctctggccgaatcagtgatgttttcctctgccgccatgagaagatcttccaccccaacaaaggctatatatatgtggtaaaggtgatgcgagagaacactcacgaggccacctacatccagcggacctttgaggagttccaggaattacacaataagttgcggctgctcttcccttcttcccacttgcccagcttccctagtcgcttcgtgatcggccgctcccggggagaggcggtggccgagcggcggagggaggagctaaacggttacatctggcacttgatccacgcaccccctgaggtggccgagtgtgatttggtgtacaccttcttccacccactgccccgggatgagaaggctatgggcaccagcccagctcctaagtcctcagatggcacatgggcccggcccgtcggaaaggtgggaggggaggtgaagctgtccatctcctacaaaaacaataaactcttcatcatggtgatgcatattcggggcttgcaactgctccaggatggaaatgaccctgacccctatgtgaaaatttacctccttcctgaccctcagaaaaccactaagaggaaaaccaaagtggcccggaaaacctgcaatcctacctacaatgagatgttggtatatgatgggatccccaagggtgacctgcagcagcgggagctccagctgagcgtgctgagtgagcagggattctgggagaacgtcctcctcggtgaggtgaacatccgcctgcgagagctggacctggctcaggagaagaccggctggttcgccctgggatctcgaagtcatggcaccttgtgagcccagcagagccaccacccagcatcccaggctggtggcaggagctgggggagaggactctcccctgtgagactcctccttgtgaagggccagggccctgggcaggcctccagctcggtccaggtgattctggcctctgtggtaggaggcagggagagtaagacatgctctgctgtctcttcctctggagactgaacttgggttggttgtgatgagcagccccttggaggctgtgaggttgcagcaaagttttaagtttaccttgtgtcaagggagcaatgcttggtttggggagtgtgtggggtgggctgtatgaagtagcattttgggggtgggtgggtggatatcttaatttttatttttaaaaaatgaaatagtgatgttgtcctaactgggacaggaagccttgcgagaagggacgtacctatgccccagaaggcaagagaggaagactatttggactttttgtatgattaaggttcttattggacttttccctaggttttttttttttgttattgttgttgttgtttcgttttctagctataggaactatctggggaggggcccagtgggtcctcggccagagccctctctaaggacaggttggggagggttggggagggctgcctgtgctggactgaggcttgtgccactgggcctttctgattttgcctccaaaggagagcgctgtgatacctacatgtgtaaggaagggccttccgtattggggttctgccaaggacccgtattcagggacccatgctcttttggggggacttttcctcttgtcttccctactttattaggacttgccctgaataccattttctaccccttgcccctccattctcctggcccttctgggggtcagctggtctctatgaatatgctgggggtgcttccccataggtctctcccttcatttgtctctggtgggacaaaatactgactcagtccttagatgtagtttcacccaagagcatcttggccctgggaagaggtccctaggctgcagatgctactgactgcttgctaggtagcctctggaaagcattccccatccatcactccccacttctttctgctgtgctgcttccctcccaaactccatttctgtcaccctttttataagacttttcctcattctgtggggccataaacctatttagtctggagccaaagggatgccctatctgaaggaaaggggcatggggtgggggattccatcaaaactgttgttttttgccccatgatttttctttggtcagtaggaggctggattggagtggtgattattcccctggagctaagctcaggagcccgaagggagagactgagactgactcccttatctcttcatattctttattccctaccagatggatttttttttttttttttggagacggagtctcgccctgtcgccaggctggagtgtagtggcatgatctcgactcactgcaaaatctgcctcccgggttcaagcgattctcctacctcagcctcccgagtagctgggattacaggcatgtgccaccacgccaagctaatttttgtatttttagtagagacggggtttcaccatgttggccaggatggtctcgatctcttgacctcgtgatctgcctgccttggcctcccaaagtgctgggattacaggcgtgagccaccatgccccgccccagatggattttacatttgctcttttgtgtttcgctccaaagggttgtcttcctcgccaaaaggagggagggactttgaatttgatatgaatctttaaaaccagaattggctggatatttcccatgattgggaaaagagtgaaatgaggacattctgtaaactgtccctccctaattccaaggatcagaaactccccgttttgctgactcattccataactggagaaagaagctccattgaccgaagccacagggcagcatggaagtttaaattttctctaaaattaaaatgccaaggataaagctggctgcttccaggagggggaagaggagtggggagtgggcggtgaaacttttccagatgaacggaccataaatgtgttactggctttgtgcctgtagctcattttattatgacctatatgctcctgatttaaagagatctgtgtactgtttacttcccacttcccagaatcccttgtatctcctttctcgggaattgtattttctaataaatgacatttgagaaaaaaatga

SEQ ID NO: 1998 - protein, 1634 aa, Homo sapiens
MSSTQGNGEHWKSLESVGISRKELAMAEALQMEYDALSRLRHDKEENRAKQNADPSLISWDEPGVDFYSKPAGRRTDLKLLRGLSGSDPTLNYNSLSPQEGPPNHSTSQGPQPGSDPWPKGSLSGDYLYIFDGSDGGVSSSPGPGDIEGSCKKLSPPPLPPRASIWDTPPLPPRKGSPSSSKISQPSDINTFSLVEQLPGKLLEHRILEEEEVLGGGGQGRLLGSVDYDGINDAITRLNLKSTYDAEMLRDATRGWKEGRGPLDFSKDTSGKPVARSKTMPPQVPPRTYASRYGNRKNATPGKNRRISAAPVGSRPHTVANGHELFEVSEERDEEVAAFCHMLDILRSGSDIQDYFLTGYVWSAVTPSPEHLGDEVNLKVTVLCDRLQEALTFTCNCSSTVDLLIYQTLCYTHDDLRNVDVGDFVLKPCGLEEFLQNKHALGSHEYIQYCRKFDIDIRLQLMEQKVVRSDLARTVNDDQSPSTLNYLVHLQERPVKQTISRQALSLLFDTYHNEVDAFLLADGDFPLKADRVVQSVKAICNALAAVETPEITSALNQLPPCPSRMQPKIQKDPSVLAVRENREKVVEALTAAILDLVELYCNTFNADFQTAVPGSRKHDLVQEACHFARSLAFTVYATHRIPIIWATSYEDFYLSCSLSHGGKELCSPLQTRRAHFSKYLFHLIVWDQQICFPVQVNRLPRETLLCATLYALPIPPPGSSSEANKQRRVPEALGWVTTPLFNFRQVLTCGRKLLGLWPATQENPSARWSAPNFHQPDSVILQIDFPTSAFDIKFTSPPGDKFSPRYEFGSLREEDQRKLKDIMQKESLYWLTDADKKRLWEKRYYCHSEVSSLPLVLASAPSWEWACLPDIYVLLKQWTHMNHQDALGLLHATFPDQEVRRMAVQWIGSLSDAELLDYLPQLVQALKYECYLDSPLVRFLLKRAVSDLRVTHYFFWLLKDGLKDSQFSIRYQYLLAALLCCCGKGLREEFNRQCWLVNALAKLAQQVREAAPSARQGILRTGLEEVKQFFALNGSCRLPLSPSLLVKGIVPRDCSYFNSNAVPLKLSFQNVDPLGENIRVIFKCGDDLRQDMLTLQMIRIMSKIWVQEGLDMRMVIFRCFSTGRGRGMVEMIPNAETLRKIQVEHGVTGSFKDRPLADWLQKHNPGEDEYEKAVENFIYSCAGCCVATYVLGICDRHNDNIMLKTTGHMFHIDFGRFLGHAQMFGNIKRDRAPFVFTSDMAYVINGGDKPSSRFHDFVDLCCQAYNLIRKHTHLFLNLLGLMLSCGIPELSDLEDLKYVYDALRPQDTEANATTYFTRLIESSLGSVATKLNFFIHNLAQMKFTGSDDRLTLSFASRTHTLKSSGRISDVFLCRHEKIFHPNKGYIYVVKVMRENTHEATYIQRTFEEFQELHNKLRLLFPSSHLPSFPSRFVIGRSRGEAVAERRREELNGYIWHLIHAPPEVAECDLVYTFFHPLPRDEKAMGTSPAPKSSDGTWARPVGKVGGEVKLSISYKNNKLFIMVMHIRGLQLLQDGNDPDPYVKIYLLPDPQKTTKRKTKVARKTCNPTYNEMLVYDGIPKGDLQQRELQLSVLSEQGFWENVLLGEVNIRLRELDLAQEKTGWFALGSRSHGTL

SEQ ID NO: 1999 - DNA, 1680 bp, Homo sapiens
gggaggccggaagttgcggcttcattactcgccatttcaaaatgctgccgaggccctaggatctgtgactgccacccctccccccacccgggctcggcgggggagcgactcatggagctgccgtaagttttaccaacagactgcagtttcttcactaccaaaatgacatcattttccacctctgctcagtgttcaacatctgacagtgcttgcaggatctctcctggacaaatcaatcaggtacgaccaaaactgccgcttttgaagattttgcatgcagcaggtgcgcaaggtgaaatgttcactgttaaagaggtcatgcactatttaggtcagtacataatggtgaagcaactttatgatcagcaggagcagcatatggtatattgtggtggagatcttttgggagaactactgggacgtcagagcttctccgtgaaagacccaagccctctctatgatatgctaagaaagaatcttgtcactttagccactgctactacagatgctgctcagactctcgctctcgcacaggatcacagtatggatattccaagtcaagaccaactgaagcaaagtgcagaggaaagttccacttccagaaaaagaactacagaagacgatatccccacactgcctacctcagagcataaatgcatacattctagagaagatgaagacttaattgaaaatttagcccaagatgaaacatctaggctggaccttggatttgaggagtgggatgtagctggcctgccttggtggtttttaggaaacttgagaagcaactatacacctagaagtaatggctcaactgatttacagacaaatcaggatgtgggtactgccattgtttcagatactacagatgacttgtggtttttgaatgagtcagtatcagagcagttaggtgttggaataaaagttgaagctgctgatactgaacaaacaagtgaagaagtagggaaagtaagtgacaaaaaggtgattgaagtgggaaaaaatgatgacctggaggactctaagtccttaagtgatgataccgatgtagaggttacctctgaggatgagtggcagtgtactgaatgcaagaaatttaactctccaagcaagaggtactgttttcgttgttgggccttgaggaaggattggtattcagattgttcaaagttaacccattctctctccacgtctgatatcactgccatacctgaaaaggaaaatgaaggaaatgatgtccctgattgtcgaagaaccatttcggctcctgtcgttagacctaaagatgcgtatataaagaaagaaaactccaaactttttgatccctgcaactcagtggaattcttggatttggctcacagttctgaaagccaagagaccatctcaagcatgggagaacagttagataacctttctgaacagagaacagatacagaaaacatggaggattgccagaatctcttgaagccatgtagcttatgtgagaaaagaccacgagacgggaacattattcatggaaggacgggccatcttgtcacttgttttcactgtgccagaagactaaagaaggctggggcttcatgccctatttgcaagaaagagattcagctggttattaaggtttttatagcataatggtagtacgaacataaaaatgcatttattccgttcacttaccac

SEQ ID NO: 2000 - protein, 490 aa, Homo sapiens; identical to SEQ ID NO: 76

SEQ ID NO: 2001 - DNA, 5647 bp, Homo sapiens
gggaggccggaagttgcggcttcattactcgccatttcaaaatgctgccgaggccctaggatctgtgactgccacccctccccccacccgggctcggcgggggagcgactcatggagctgccgtaagttttaccaacagactgcagtttcttcactaccaaaatgacatcattttccacctctgctcagtgttcaacatctgacagtgcttgcaggatctctcctggacaaatcaatcaggtacgaccaaaactgccgcttttgaagattttgcatgcagcaggtgcgcaaggtgaaatgttcactgttaaagaggtcatgcactatttaggtcagtacataatggtgaagcaactttatgatcagcaggagcagcatatggtatattgtggtggagatcttttgggagaactactgggacgtcagagcttctccgtgaaagacccaagccctctctatgatatgctaagaaagaatcttgtcactttagccactgctactacagatgctgctcagactctcgctctcgcacaggatcacagtatggatattccaagtcaagaccaactgaagcaaagtgcagaggaaagttccacttccagaaaaagaactacagaagacgatatccccacactgcctacctcagagcataaatgcatacattctagagaagatgaagacttaattgaaaatttagcccaagatgaaacatctaggctggaccttggatttgaggagtgggatgtagctggcctgccttggtggtttttaggaaacttgagaagcaactatacacctagaagtaatggctcaactgatttacagacaaatcaggatgtgggtactgccattgtttcagatactacagatgacttgtggtttttgaatgagtcagtatcagagcagttaggtgttggaataaaagttgaagctgctgatactgaacaaacaagtgaagaagtagggaaagtaagtgacaaaaaggtgattgaagtgggaaaaaatgatgacctggaggactctaagtccttaagtgatgataccgatgtagaggttacctctgaggatgagtggcagtgtactgaatgcaagaaatttaactctccaagcaagaggtactgttttcgttgttgggccttgaggaaggattggtattcagattgttcaaagttaacccattctctctccacgtctgatatcactgccatacctgaaaaggaaaatgaaggaaatgatgtccctgattgtcgaagaaccatttcggctcctgtcgttagacctaaagatgcgtatataaagaaagaaaactccaaactttttgatccctgcaactcagtggaattcttggatttggctcacagttctgaaagccaagagaccatctcaagcatgggagaacagttagataacctttctgaacagagaacagatacagaaaacatggaggattgccagaatctcttgaagccatgtagcttatgtgagaaaagaccacgagacgggaacattattcatggaaggacgggccatcttgtcacttgttttcactgtgccagaagactaaagaaggctggggcttcatgccctatttgcaagaaagagattcagctggttattaaggtttttatagcataatggtagtacgaacataaaaatgcatttattccgttcacttaccacattatttgaaaatcaatcctttatttaattttatttccaacctgtcagagaatgttcttaggcatcaaaatccaaggtagctgtaagaaaaatactggagctaacaatgaagaacagaagtaatctgattagtcaaattattaagtgccatggattactttatgcagcagtcaggtacatagttaggtgaacccaaaagaaaaactcttgaaaacaagagatttcttccatgcacatttacaatattgaggtataattaacatgataaagtgtttccttctaacgagttgtagaaatctgagtaaccacccaaaaaagcaatagaatgtttctgtcaccccaaaacactcccttctgcccctcttcagacagtccttcagctatttcatggctctcaccctagttttttttttttttgcacttttttttttccgggggtataggggaggtgtggggcgacagggtctgtcttgttctgtctcccaggctgaagtgcagtgcagtggtatgatcatggctcactgcagccttggtttcctgggcataagtggtcttcccacttcagcctcctgagtagctgagactatagactagcataaccacactggctaattttttgtggagatgaagtctcactatgttgcccaggctggtctcgaactcctgggctcaaacaatcctcccgcctcagccttccaaattgctgggattatagtcatgaggcacctagtctggcccttttgcaagactttaatctgaaatctaaatttttaaaatttaagtacttacaaaggatatactatccaacatattgcatattatatatgtgctttaaagtttttttttttttttgagagacggtctcactttgtcatccaagctggagtgcagtggtgcaaacacggcccacctcctgggctcaagtgatcctccagcctcagcttccctcacaggcattcactatcactcccagctaattaaaataatttgtagacggtgtctcgttatgttgcccaggctggtctcgaactcctgggtttaagtgattcccccgcctcagcctcccaaagtgttgggcttacagccttgagccactatgcttggctcaaagatatttttatgaaagccctgggactatagatttagctgattaaatttatagaaaaagtcctgtcatataaactggcaaagtctgttcttaatttaattagccaaatcagacttaacttccgtcagaacatgtcttggttttaattcagataaacacacaaacatacttctctggcacagccttcagaagcatcagtttttgttttgttttgttttgttttttgagacagggtcttgctctgtcgcccaggctggagtgcactggcacaatcacagttcactgcagcctcgacctcccagatccaagcaatcctcccacctaagcctcccaagtagctgggtctataggcgcgtgccaccaccatgcccagctgaattttgtattttttgtacagacagcattttgccatgttgcccaggctggtcccaaacttctagcctcaagcaaccctcctgcctcagcctctcaaagtgctaggattgcagtcctgagctactgccccctaccctctttgcgtcttaggagtcatttagattttttttgatccttttgtttagtgcctctggagctgcttacaccaaggcaatacgccttgatatactggatggttgagaggcagcctctttttttttttttttttttttttttttttggaggatagggagtatggctgttgtgaaaagggaggtaaagagaaatggtagatctgaagaggcctcatcagagcacatattttaggacaacacatatggaaattggacatctttaagttggtttccatagagctatgcatgtatccttacccccatgggaaaatgttggtgtgttctcaagggtatgcatgtgtcattttgaagaccaaggccctagaattgtcaaacttaaggatcataaaaatcatgagggttgcttgttaaaaatgtccaaacgtgcagagactgatctttgagatctggaccaggaatttgcatttgaacaagtgttcctggaatctctatgcaagttttatacagaacatacttttggaatccttgccctagacaggggtgtccaatcttttggcttccctggtccacaatggaagaagaattgtcttggaccacacataaaatacactaacactaacaatagctgatgagctaaaaaaaaaaaaaaaaaaaatcgtggaccgggcgtagtggctcacgcctgctggtctcgaactcctgacctcatgatccacacacctcggcctcccaaagtcctgcgattacaggcgtgagctaccgcacccagccaagttgtaatttttaataaaacttaagaagtaaacattttacttatgtttataggtatttgatcctaaatttgacacatcattgcccatgaaagaatcctcttaggctgctcagcttcactcttcctgcttgcccaccggggtttttcactgcttctgttagcactaagtacttagacgatcctaagatatgtgcttgagccgaatttcatctttacttgtaggaaactttaaactatttcttttcttttcttttttttttttttttacttgagatggagttttgctcttgtcgcccaggctggagtgcagtggagtgatctcggctcactgcaacctctgcctcccgggttcaaatgattctcctgcctcagcctcccaagtagctgggattacaggtgtgcaccaccatgtctggctaattttgtatttttagtagagatggtttcaccatgttggtcaggctggtctcgaactcctgacctcaggtcatccacccacctcagcctcgcaaagtgctgagattacaggcatgagccacagcgcccagcttaaactattttcttggtctgtttttgattttcttttttccttgccactgcggtacagattttttttactcactgccactaaactaaagcaaggcatagtttatatgtgaagtgttcagagtttactgctataaggaaacttccaaatactgacatttaccttttagctgtagttattgggaccatgtgctctggttttctggagactgccaaattgctcccatttttctgcatcccacctggtttctttctgcatgtcccctttcactttcaaacctcttcatttggatgttaaattatatggtcacctagttataggtaagccttgttcgagttgatatcttgattgtgaggaaggatctgtgtcattggagcttgtttctgctgcaacgtgctgtagactatgaataatgaaatcacaccacattaccatcagatttcttgttttagttgtcaaattaatatttatgattgttatcttgggcgaaaagttcagagcagagatgacaaatcattagaacaacgatgaatttcagtattacggctaaaaagttcttctgtctgaatattaactcactctccttccagtgtacttcacagtaattggtatgcttttttatttaatgcttaaatcaaactttataaaaatcttagaccagatctttaatatggtatgccatttccccagtctaccaatggaatagtatgggtttctaatcctaggcttgtacaatggattggagttgagccatgccagcctccacactgccactaacttctgtaatgtaagattgagtcactgccaagcatttgaaatatgcagttgtgttttaattataatttatgtatagttagatgtatgtagtgcattgtgtggtattatttggtttgtaagaatttatttttaagggtcaaggtcatttgtaacattttgtgtgtgtcaattcaatgcaatgttggctgccttttgaagtctttgatatattggtgaatattcttctgatctataatacaaagctatgtaatgtt

SEQ ID NO: 2002 - protein, 490 aa, Homo sapiens; identical to SEQ ID NO: 76

SEQ ID NO: 2003 - DNA, 894 bp, Homo sapiens
ggccggaagttgcggcttcattactcgccatttcaaaatgctgccgaggccctaggatctgtgactgccacccctccccccacccgggctcggcgggggagcgactcatggagctgccgtaagttttaccaacagactgcagtttcttcactaccaaaatgacatcattttccacctctgctcagtgttcaacatctgacagtgcttgcaggatctctcctggacaaatcaatcaggtacgaccaaaactgccgcttttgaagattttgcatgcagcaggtgcgcaaggtgaaatgttcactgttaaagaggtcatgcactatttaggtcagtacataatggtgaagcaactttatgatcagcaggagcagcatatggtatattgtggtggagatcttttgggagaactactgggacgtcagagcttctccgtgaaagacccaagccctctctatgatatgctaagaaagaatcttgtcactttagccactgctactacaggtatgtcacatcatatttcttcagtctgtatcacagctttgagttcaagggggcaaatgatgggaaaacaaagaagatgaaggtggaaatggaatgctatctttggcatgactgggagaaatacatactacctgtcacacagaatgttatgttattaactttttactgaaaaatcaaacatagagtagaaggatttccactttctagacgtactgttaacgttttgtcatattgcttcatctagacacacttttaaaaatctctagcagataaggacttttttctccaaacattcaatatcattattacacataacaaatttaacatgtaattccataatcctatttcatagccagtttatgtatcatttcccccagttatctcaaaaatacc

SEQ ID NO: 2004 - protein, 140 aa, Homo sapiens [sequence omitted]

SEQ ID NO: 2005 - DNA, 2219 bp, Homo sapiens
ggggaaactttatagtcatcttggtacgtggcgagggtttcatatgttttctgaattatgcctaattttgtagtagactggagggtttatacagatagcctgtttttaacagtagattttggcctttgtgcagaggaaagttccacttccagaaaaagaactacagaagacgatatccccacactgcctacctcagagcataaatgcatacattctagagaagatgaagacttaattgaaaatttagcccaagatgaaacatctaggctggaccttggatttgaggagtgggatgtagctggcctgccttggtggtttttaggaaacttgagaagcaactatacacctagaagtaatggctcaactgatttacagacaaatcaggatgtgggtactgccattgtttcagatactacagatgacttgtggtttttgaatgagtcagtatcagagcagttaggtgttggaataaaagttgaagctgctgatactgaacaaacaagtgaagaagtagggaaagtaagtgacaaaaaggtgattgaagtgggaaaaaatgatgacctggaggactctaagtccttaagtgatgataccgatgtagaggttacctctgaggatgagtggcagtgtactgaatgcaagaaatttaactctccaagcaagaggtactgttttcgttgttgggccttgaggaaggattggtattcagattgttcaaagttaacccattctctctccacgtctgatatcactgccatacctgaaaaggaaaatgaaggaaatgatgtccctgattgtcgaagaaccatttcggctcctgtcgttagacctaaagatgcgtatataaagaaagaaaactccaaactttttgatccctgcaactcagtggaattcttggatttggctcacagttctgaaagccaagagaccatctcaagcatgggagaacagttagataacctttctgaacagagaacagatacagaaaacatggaggattgccagaatctcttgaagccatgtagcttatgtgagaaaagaccacgagacgggaacattattcatggaaggacgggccatcttgtcacttgttttcactgtgccagaagactaaagaaggctggggcttcatgccctatttgcaagaaagagattcagctggttattaaggtttttatagcataatggtagtacgaacataaaaatgcatttattccgttcacttaccacattatttgaaaatcaatcctttatttaattttatttccaacctgtcagagaatgttcttaggcatcaaaatccaaggtagctgtaagaaaaatactggagctaacaatgaagaacagaagtaatctgattagtcaaattattaagtgccatggattactttatgcagcagtcaggtacatagttaggtgaacccaaaagaaaaactcttgaaaacaagagatttcttccatgcacatttacaatattgaggtataattaacatgataaagtgtttccttctaacgagttgtagaaatctgagtaaccacccaaaaaagcaatagaatgtttctgtcaccccaaaacactcccttctgcccctcttcagacagtccttcagctatttcatggctctcaccctagttttttttttttttgcacttttttttttccgggggtataggggaggtgtggggcgacagggtctgtcttgttctgtctcccaggctgaagtgcagtgcagtggtatgatcatggctcactgcagccttggtttcctgggcataagtggtcttcccacttcagcctcctgagtagctgagactatagactagcataaccacactggctaattttttgtggagatgaagtctcactatgttgcccaggctggtctcgaactcctgggctcaaacaatcctcccgcctcagccttccaaattgctgggattatagtcatgaggcacctagtctggcccttttgcaagactttaatctgaaatctaaatttttaaaatttaagtacttacaaaggatatactatccaacatattgcatattatatatgtgctttaaagtttttttttttttttgagagacggtctcactttgtcatccaagctggagtgcagtggtgcaaacacggcccacctcctgggctcaagtgatcctccagcctcagcttccctcacaggcattcactatcactcccagctaattaaaataattt

SEQ ID NO: 2006 - protein, 375 aa, Homo sapiens
MPNFVVDWRVYTDSLFLTVDFGLCAEESSTSRKRTTEDDIPTLPTSEHKCIHSREDEDLIENLAQDETSRLDLGFEEWDVAGLPWWFLGNLRSNYTPRSNGSTDLQTNQDVGTAIVSDTTDDLWFLNESVSEQLGVGIKVEAADTEQTSEEVGKVSDKKVIEVGKNDDLEDSKSLSDDTDVEVTSEDEWQCTECKKFNSPSKRYCFRCWALRKDWYSDCSKLTHSLSTSDITAIPEKENEGNDVPDCRRTISAPVVRPKDAYIKKENSKLFDPCNSVEFLDLAHSSESQETISSMGEQLDNLSEQRTDTENMEDCQNLLKPCSLCEKRPRDGNIIHGRTGHLVTCFHCARRLKKAGASCPICKKEIQLVIKVFIA

SEQ ID NO: 2007 - DNA, 3346 bp, Homo sapiens
ctgtgccagaagactaaagaaggctggggcttcatgccctatttgcaagaaagagattcagctggttattaaggtttttatagcataatggtagtacgaacataaaaatgcatttattccgttcacttaccacattatttgaaaatcaatcctttatttaattttatttccaacctgtcagagaatgttcttaggcatcaaaatccaaggtagctgtaagaaaaatactggagctaacaatgaagaacagaagtaatctgattagtcaaattattaagtgccatggattactttatgcagcagtcaggtacatagttaggtgaacccaaaagaaaaactcttgaaaacaagagatttcttccatgcacatttacaatattgaggtataattaacatgataaagtgtttccttctaacgagttgtagaaatctgagtaaccacccaaaaaagcaatagaatgtttctgtcaccccaaaacactcccttctgcccctcttcagacagtccttcagctatttcatggctctcaccctagttttttttttttttgcacttttttttttccgggggtataggggaggtgtggggcgacagggtctgtcttgttctgtctcccaggctgaagtgcagtgcagtggtatgatcatggctcactgcagccttggtttcctgggcataagtggtcttcccacttcagcctcctgagtagctgagactatagactagcataaccacactggctaattttttgtggagatgaagtctcactatgttgcccaggctggtctcgaactcctgggctcaaacaatcctcccgcctcagccttccaaattgctgggattatagtcatgaggcacctagtctggcccttttgcaagactttaatctgaaatctaaatttttaaaatttaagtacttacaaaggatatactatccaacatattgcatattatatatgtgctttaaagtttttttttttttttgagagacggtctcactttgtcatccaagctggagtgcagtggtgcaaacacggcccacctcctgggctcaagtgatcctccagcctcagcttccctcacaggcattcactatcactcccagctaattaaaataatttgtagacggtgtctcgttatgttgcccaggctggtctcgaactcctgacctcaggtcatccacccacctcagcctcgcaaagtgctgagattacaggcatgagccacagcgcccagcttaaactattttcttggtctgtttttgattttcttttttccttgccactgcggtacagattttttttactcactgccactaaactaaagcaaggcatagtttatatgtgaagtgttcagagtttactgctataaggaaacttccaaatactgacatttaccttttagctgtagttattgggaccatgtgctctggttttctggagactgccaaattgctcccatttttctgcatcccacctggtttctttctgcatgtcccctttcactttcaaacctcttcatttggatgttaaattatatggtcacctagttataggtaagccttgttcgagttgatatcttgattgtgaggaaggatctgtgtcattggagcttgtttctgctgcaacgtgctgtagactatgaataatgaaatcacaccacattaccatcagatttcttgttttagttgtcaaattaatatttatgattgttatcttgggcgaaaagttcagagcagagatgacaaatcattagaacaacgatgaatttcagtattacggctaaaaagttcttctgtctgaatattaactcactctccttccagtgtacttcacagtaattggtatgcttttttatttaatgcttaaatcaaactttataaaaatcttagaccagatctttaatatggtatgccatttccccagtctaccaatggaatagtatgggtttctaatcctaggcttgtacaatggattggagttgagccatgccagcctccacactgccactaacttctgtaatgtaagattgagtcactgccaagcatttgaaatatgcagttgtgttttaattataatttatgtatagttagatgtatgtagtgcattgtgtggtattatttggtttgtaagaatttatttttaagggtcaaggtcatttgtaacattttgtgtgtgtcaattcaatgcaatgttggctgccttttgaagtctttgatatattggtgaatattcttctgatctataatacaaagctatgtaatgttacctcttgactcgcttttgaaaggaagacaattgttaactagatatttgagttttttcccctcagaattatgtgaatttctgatatatggctttagatactgtgaatctgttttccatttagtcagttatctgcttaaattgttcagaactatatcctaacgagcaattagttctgatggttctcccagtcatgagtgtgcatgtgtgcaagcatgttttgatcctgatgctacctttgctaaaaatggccatagattaggaactagctatgtttttagaatcaaagatgaaccggtaagctgtctcatgtaccaaacgtgaaatttacagtgtttacaaatgtctggaattttgcactgccatagggaatgttaaggttacttggctggaatttatcagacttgtgagtaaacaagttgaagtttagcagatgagggggaatattgaggcccctaaggctaaacaaaataatcagtatctgagatagtggctaatgtggctccccaggcctaatttgggaacagtttttcctgattgctttgagaagtactttcttttgacagaaattttcattctgcttgccattgctatattctccctttataggagccattggatttctttccttttgtgggaaatgtcccattagcattttcagatcttttgatgtgcactaatgccattattggtaatgccgttattggtgaatacagcatagttaaataaactgttacagtaaatctacacttggatttgctgcacctctaccaatagccttttgaatgactgaaagtgttaacagagaaagaggcatgtctgcagaaagagatagctaatattttttggtactttatctgaaatccaagatgctgcttcccctgcaggttgttttccttcttacgatcctcattgaatcccctctgggagcacaggacagttagtagaactctccatttctttttttttttttttagacggagtctctctctgtcgccccggctggagtgcagtggcgcgatctcggctcactgcaacctccgcctcccgggttcaccccattctcctgcctcagcctccc

SEQ ID NO: 2008 - protein, 61 aa, Homo sapiens
MALTLVFFFFALFFFRGYRGGVGRQGLSCSVSQAEVQCSGMIMAHCSLGFLGISGLPTSAS

SEQ ID NO: 2009 - DNA, 660 bp, Homo sapiens
ctttttttttttttttttttttttttttttggaggatagggagtatggctgttgtgaaaagggaggtaaagagaaatggtagatctgaagaggcctcatcagagcacatattttaggacaacacatatggaaattggacatctttaagttggtttccatagagctatgcatgtatccttacccccatgggaaaatgttggtgtgttctcaagggtatgcatgtgtcattttgaagaccaaggccctagaattgtcaaacttaaggatcataaaaatcatgagggttgcttgttaaaaatgtccaaacgtgcagagactgatctttgagatctggaccaggaatttgcatttgaacaagtgttcctggaatctctatgcaagttttatacagaacatacttttggaatccttgccctagacaggggtgtccaatcttttggcttccctggtccacaatggaagaagaattgtcttggaccacacataaaatacactaacactaacaatagctgatgagctaaaaaaaaaaaaaaaaaaaatcgtggaccgggcctaccgcacccagccaagttgtaatttttaataaaacttaagaagtaaacattttacttatgtttataggtatttgatcctaaatttgacacatcattgcccatgaaa

SEQ ID NO: 2010 - protein, 53 aa, Homo sapiens
MHVSLPPWENVGVFSRVCMCHFEDQGPRIVKLKDHKNHEGCLLKMSKRAETDL

SEQ ID NO: 2011 - DNA, 3538 bp, Homo sapiens
ctttttttttttttttttttttttttttttggaggatagggagtatggctgttgtgaaaagggaggtaaagagaaatggtagatctgaagaggcctcatcagagcacatattttaggacaacacatatggaaattggacatctttaagttggtttccatagagctatgcatgtatccttacccccatgggaaaatgttggtgtgttctcaagggtatgcatgtgtcattttgaagaccaaggccctagaattgtcaaacttaaggatcataaaaatcatgagggttgcttgttaaaaatgtccaaacgtgcagagactgatctttgagatctggaccaggaatttgcatttgaacaagtgttcctggaatctctatgcaagttttatacagaacatacttttggaatccttgccctagacaggggtgtccaatcttttggcttccctggtccacaatggaagaagaattgtcttggaccacacataaaatacactaacactaacaatagctgatgagctaaaaaaaaaaaaaaaaaaaatcgtggaccgggcgtagtggctcacgcctgtaatcccaacactttgggagatcacctaggtcgggagtttgagaccagcctgaccgacatggagaaaccccatttttactaaaaatacaaaaaattagctgggcatggtggtgcatgcctgtagtcctcagcctcccagatagctgggactacaggcacataccaccatgcctggctaatttttgtatttttagtagagatgggggtttcactgtgttggccaggctggtctcgaactcctgacctcatgatccacacacctcggcctcccaaagtcctgcgattacaggcgtgagctaccgcacccagccaagttgtaatttttaataaaacttaagaagtaaacattttacttatgtttataggtatttgatcctaaatttgacacatcattgcccatgaaagaatcctcttaggctgctcagcttcactcttcctgcttgcccaccggggtttttcactgcttctgttagcactaagtacttagacgatcctaagatatgtgcttgagccgaatttcatctttacttgtaggaaactttaaactatttcttttcttttcttttttttttttttttacttgagatggagttttgctcttgtcgcccaggctggagtgcagtggagtgatctcggctcactgcaacctctgcctcccgggttcaaatgattctcctgcctcagcctcccaagtagctgggattacaggtgtgcaccaccatgtctggctaattttgtatttttagtagagatggtttcaccatgttggtcaggctggtctcgaactcctgacctcaggtcatccacccacctcagcctcgcaaagtgctgagattacaggcatgagccacagcgcccagcttaaactattttcttggtctgtttttgattttcttttttccttgccactgcggtacagattttttttactcactgccactaaactaaagcaaggcatagtttatatgtgaagtgttcagagtttactgctataaggaaacttccaaatactgacatttaccttttagctgtagttattgggaccatgtgctctggttttctggagactgccaaattgctcccatttttctgcatcccacctggtttctttctgcatgtcccctttcactttcaaacctcttcatttggatgttaaattatatggtcacctagttataggtaagccttgttcgagttgatatcttgattgtgaggaaggatctgtgtcattggagcttgtttctgctgcaacgtgctgtagactatgaataatgaaatcacaccacattaccatcagatttcttgttttagttgtcaaattaatatttatgattgttatcttgggcgaaaagttcagagcagagatgacaaatcattagaacaacgatgaatttcagtattacggctaaaaagttcttctgtctgaatattaactcactctccttccagtgtacttcacagtaattggtatgcttttttatttaatgcttaaatcaaactttataaaaatcttagaccagatctttaatatggtatgccatttccccagtctaccaatggaatagtatgggtttctaatcctaggcttgtacaatggattggagttgagccatgccagcctccacactgccactaacttctgtaatgtaagattgagtcactgccaagcatttgaaatatgcagttgtgttttaattataatttatgtatagttagatgtatgtagtgcattgtgtggtattatttggtttgtaagaatttatttttaagggtcaaggtcatttgtaacattttgtgtgtgtcaattcaatgcaatgttggctgccttttgaagtctttgatatattggtgaatattcttctgatctataatacaaagctatgtaatgttacctcttgactcgcttttgaaaggaagacaattgttaactagatatttgagttttttcccctcagaattatgtgaatttctgatatatggctttagatactgtgaatctgttttccatttagtcagttatctgcttaaattgttcagaactatatcctaacgagcaattagttctgatggttctcccagtcatgagtgtgcatgtgtgcaagcatgttttgatcctgatgctacctttgctaaaaatggccatagattaggaactagctatgtttttagaatcaaagatgaaccggtaagctgtctcatgtaccaaacgtgaaatttacagtgtttacaaatgtctggaattttgcactgccatagggaatgttaaggttacttggctggaatttatcagacttgtgagtaaacaagttgaagtttagcagatgagggggaatattgaggcccctaaggctaaacaaaataatcagtatctgagatagtggctaatgtggctccccaggcctaatttgggaacagtttttcctgattgctttgagaagtactttcttttgacagaaattttcattctgcttgccattgctatattctccctttataggagccattggatttctttccttttgtgggaaatgtcccattagcattttcagatcttttgatgtgcactaatgccattattggtaatgccgttattggtgaatacagcatagttaaataaactgttacagtaaatctacacttggatttgctgcacctctaccaatagccttttgaatgactgaaagtgttaacagagaaagaggcatgtctgcagaaagagatagctaatattttttggtactttatctgaaatccaagatgctgcttcccctgcaggttgttttccttcttacgatcctcattgaatcccctctgggagcacaggacagttagtagaactctccatttctttttttttttttttagacggagtctctctctgtcgccccggctggagtgcagtggcgcgatctcggctcactgcaacctccgcctcccgggttcaccccattctcctgcctcagcctccc

SEQ ID NO: 2012 - protein, 42 aa, Homo sapiens
MPVVLSLPDSWDYRHIPPCLANFCIFSRDGGFTVLARLVSNS

SEQ ID NO: 2013 - DNA, 1144 bp, Homo sapiens
caattcaatgcaatgttggctgccttttgaagtctttgatatattggtgaatattcttctgatctataatacaaagctatgtaatgttacctcttgactcgcttttgaaaggaagacaattgttaactagatatttgagttttttcccctcagaattatgtgaatttctgatatatggctttagatactgtgaatctgttttccatttagtcagttatctgcttaaattgttcagaactatatcctaacgagcaattagttctgatggttctcccagtcatgagtgtgcatgtgtgcaagcatgttttgatcctgatgctacctttgctaaaaatggccatagattaggaactagctatgtttttagaatcaaagatgaaccggtaagctgtctcatgtaccaaacgtgaaatttacagtgtttacaaatgtctggaattttgcactgccatagggaatgttaaggttacttggctggaatttatcagacttgtgagtaaacaagttgaagtttagcagatgagggggaatattgaggcccctaaggctaaacaaaataatcagtatctgagatagtggctaatgtggctccccaggcctaatttgggaacagtttttcctgattgctttgagaagtactttcttttgacagaaattttcattctgcttgccattgctatattctccctttataggagccattggatttctttccttttgtgggaaatgtcccattagcattttcagatcttttgatgtgcactaatgccattattggtaatgccgttattggtgaatacagcatagttaaataaactgttacagtaaatctacacttggatttgctgcacctctaccaatagccttttgaatgactgaaagtgttaacagagaaagaggcatgtctgcagaaagagatagctaatattttttggtactttatctgaaatccaagatgctgcttcccctgcaggttgttttccttcttacgatcctcattgaatcccctctgggagcacaggacagttagtagaactctccatttctttttttttttttttagacggagtctctcttgcaccactgcgctcccacctgggtgacagagactctgtctcaaaaaaaaggacatttatcattataa

SEQ ID NO: 2014 - protein, 54 aa, Homo sapiens
MLPLDSLLKGRQLLTRYLSFFPSELCEFLIYGFRYCESVFHLVSYLLKLFRTIS

SEQ ID NO: 2015 - DNA, 714 bp, Homo sapiens
gcctggctaatttttgtatttttattggagacggggtttcaccgtcttagccaggatggtcttgatctcctgacctcgtgatctgcccacctcagcctcccaaagtactgggattacaggcgtgagccaccgcgcccggccggaactctccatttcttaaggtaaagagggtcaaggatacctaaaaagggtcaaataatgctagaagagcaattcctctttcagagcagttgctgtaatttggcaaatgctttatcgaagatgggattacaggcgtgagcaactgctcctggcccaaaacatctctttctacatacacttgagtaggtggcataaaatgcactgtcaatatatagaaaacatgaaattttccaaatatttccgatcagagaatcacaagagcagcaaatgtggtttcatcaagtgggaagaaagcagcaatttaaaataactttttgggagactgaattgagtaataataaaacttcagtctttcgctaataataataataataataataataacaacaacttattgaatgtggccagctcactagatgaggaaagaggaaggcattttctgcattcttgcctagttttccttataagcaccactaagttaatagctctgtctttttggtgtttgcactatgtaatgcttttaatactttttaattgtgcttttttatgtattaaatgtttttccttttgcca

SEQ ID NO: 2016 - protein, 67 aa, Homo sapiens [sequence omitted]

SEQ ID NO: 2017 - DNA, 2353 bp, Homo sapiens
ggggtttcaccgtcttagccaggatggtcttgatctcctgacctcgtgatctgcccactgcgctcccacctgggtgacagagactctgtctcaaaaaaaaggacatttatcattataacatcttattagagcccctaatttcttatctgaaggcactgtttttttttttaaacagttaagtactgatgtcaacagacaaatatttctgatcagatagtcccctgtcaacagtagcaaatgtggtttcataaagtgggaagaaaacagcattttaaagtaactttttgggagactgatttgagtaataataaaactctggtctcccttaagaaaaaaaaacccttccacctttactgtgtcatttatatccccttagttccaaagttaattatcttatttctggatattgcttttataccaaagacccttatcagcccttgtaactacagtatctttagataagattcctctttccagtcagtcctgggaaatgtttctgttgcagagttaggcggtagatgggaagctgtgatggcagagctactatctaataaagtaacaactcgtagttgaggcttcctttctgtgtgtgatgggggatagggagttagctcccctgttgtctcagcactaagaaattgaggtcaggccaggcgcggtggttcactcctgttattccagcactggggtggccaaagtgggcagattgcttgcgctctggagctcgagaccagcctgggcaacatggtgaaaccctgtctctaccaaaaatacaaaaaaaaagctgggcatggtgggtgcatgcttgtcccagctactgaggaggctgaggtgggaggatcgcttgagcctgggaggtggaggttgcagtgagctgagatggcaccactgcaatccaaggtgggtgacagagacgctgtctcaaagaaattgaggtcaggcttccttcttacagaattatttttttctctgtagtttgcctcattttttcactttcttttcaatgagaatcgaagtgtttcttttgggtttttttttcccccttttaaaatcaacaggaaatgtttcaaaggagggatgaaatgcttcttggcttcctcagcacttggcaaggtagacctcatagcaaccttgaatatgactttctttagtctctagctatgcactattaagtgcctcttgggtagaggtagagttaagtattgagtgccagtcttgacgtccgtatgcctcagtttttctcatatataaaaagcagtatacatacctacccttttctacctcatcatttgttgtagggattaaatccgggagagcaattctgaagcctataaatttccttgaagagatctaagaacctattatgctcttggtgtaccaagctctggggtatatattcagaatacctcatgttctggaagctgagcactagctcccctttattgcctgcctggcagagcctgtttgattactgcaggcccttttacccatgcttctagtttaggtattctttctttgatatgaggctcttgaccagaaaagagttctttctctaggtgttctgagagaagtttgtaaatttggatagtacattctatcctgataaaaccaccttgctgtggtcttgatgtacaaaaaaaaattttttttttgagacagagtcttactctgtcacccaggctggaatgcagtggcgcaatcttggttcactgcaacccccgcctcctgggttcaagcgatcctcctgcctcaacctctcaagtagctgggactacaggcgtgcaccaccacacctggctaattttgtatttttagtagagacagggtttcaccatgttggccaggctggtcttgaactcctgacctcaggcgatctgcccgccttggcctcccaaagtactgggattacaggcgtgagcaactgctcctggcccaaaacatctctttctacatacacttgagtaggtggcataaaatgcactgtcaatatatagaaaacatgaaattttccaaatatttccgatcagagaatcacaagagcagcaaatgtggtttcatcaagtgggaagaaagcagcaatttaaaataactttttgggagactgaattgagtaataataaaacttcagtctttcgctaataataataataataataataataacaacaacttattgaatgtggccagctcactagatgaggaaagaggaaggcattttctgcattcttgcctagttttccttataagcaccactaagttaatagctctgtctttttggtgtttgcactatgtaatgcttttaatactttttaattgtgcttttttatgtattaaatgtttttccttttgccat

SEQ ID NO: 2018 - protein, 91 aa, Homo sapiens
MQWRNLGSLQPPPPGFKRSSCLNLSSSWDYRRAPPHLANFVFLVETGFHHVGQAGLELLTSGDLPALASQSTGITGVSNCSWPKTSLSTYT

SEQ ID NO: 2019 - DNA, 521 bp, Homo sapiens
atttggcaaatgctttatcgaagattgatattaggctaggggcggtggcttacgcctgtaatcccatactgggattacaggcgtgagcaactgctcctggcccaaaacatctctttctacatacacttgagtaggtggcataaaatgcactgtcaatatatagaaaacatgaaattttccaaatatttccgatcagagaatcacaagagcagcaaatgtggtttcatcaagtgggaagaaagcagcaatttaaaataactttttgggagactgaattgagtaataataaaacttcagtctttcgctaataataataataataataataataacaacaacttattgaatgtggccagctcactagatgaggaaagaggaaggcattttctgcattcttgcctagttttccttataagcaccactaagttaatagctctgtctttttggtgtttgcactatgtaatgcttttaatactttttaattgtgcttttttatgtattaaatgtttttccttttgcca

SEQ ID NO: 2020 - protein, 37 aa, Homo sapiens
MHCQYIENMKFSKYFRSENHKSSKCGFIKWEESSNLK

SEQ ID NO: 2021 - DNA, 931 bp, Homo sapiens
tagcaaatgtggtttcataaagtgggaagaaaacagcattttaaagtaactttttgggagactgatttgagtaataataaaactctggtctcccttaagaaaaaaaaacccttccacctttactgtgtcatttatatccccttagttccaaagttaattatcttatttctggatattgcttttataccaaagacccttatcagcccttgtaactacagtatctttagataagattcctctttccagtcagtcctgggaaatgtttctgttgcagagttaggcggtagatgggaagctgtgatggcagagctactatctaataaagtaacaactcgtagttgaggcttcctttctgtgtgtgatgggggatagggagttagctcccctgttgtctcagcactaagaaattgaggtcaggccaggctggtcttgaactcctgacctcaggcgatctgcccgccttggcctcccaaagtactgggattacaggcgtgagcaactgctcctggcccaaaacatctctttctacatacacttgagtaggtggcataaaatgcactgtcaatatatagaaaacatgaaattttccaaatatttccgatcagagaatcacaagagcagcaaatgtggtttcatcaagtgggaagaaagcagcaatttaaaataactttttgggagactgaattgagtaataataaaacttcagtctttcgctaataataataataataataataataacaacaacttattgaatgtggccagctcactagatgaggaaagaggaaggcattttctgcattcttgcctagttttccttataagcaccactaagttaatagctctgtctttttggtgtttgcactatgtaatgcttttaatactttttaattgtgcttttttatgtattaaatgtttttccttttgccat

SEQ ID NO: 2022 - protein, 74 aa, Homo sapiens [sequence omitted]

SEQ ID NO: 2023 - DNA, 977 bp, Homo sapiens
ataaagtgggaagaaaacagcattttaaagtaactttttgggagactgatttgagtaataataaaactctggtctcccttaagaaaaaaaaacccttccacctttactgtgtcatttatatccccttagttccaaagttaattatcttatttctggatattgcttttataccaaagacccttatcagcccttgtaactacagtatctttagataagattcctctttccagtcagtcctgggaaatgtttctgttgcagagttaggcggtagatgggaagctgtgatggcagagctactatctaataaagtaacaactcgtagttgaggcttcctttctgtgtgtgatgggggatagggagttagctcccctgttgtctcagcactaagaaattgaggtcaggccaggcgcggtggttcactcctgttattccagcactggggtggccaaagtgggcagattgcttgcgcttggtcttgaactcctgacctcaggcgatctgcccgccttggcctcccaaagtactgggattacaggcgtgagcaactgctcctggcccaaaacatctctttctacatacacttgagtaggtggcataaaatgcactgtcaatatatagaaaacatgaaattttccaaatatttccgatcagagaatcacaagagcagcaaatgtggtttcatcaagtgggaagaaagcagcaatttaaaataactttttgggagactgaattgagtaataataaaacttcagtctttcgctaataataataataataataataataacaacaacttattgaatgtggccagctcactagatgaggaaagaggaaggcattttctgcattcttgcctagttttccttataagcaccactaagttaatagctctgtctttttggtgtttgcactatgtaatgcttttaatactttttaattgtgcttttttatgtattaaatgtttttccttttgccat

SEQ ID NO: 2024 - protein, 37 aa, Homo sapiens; identical to SEQ ID NO: 2020

SEQ ID NO: 2025 - DNA, 3807 bp, Homo sapiens
caaaagagtctaacataagagaaatggtcagataggagggcagaatggatcactgttaattatgaggactttggaggcaaactgcccagattcaaatccctgttccaccccttgctagcagtgtgaccccaagcaagtcatttaacttctctgtacttcatctgtcaaattcactcatcacaatacttaactcacagggctgccgttaattagttaatgtccacatgtatctgattagaagagcacactgtgtaacacagcccattacgactgctctaattccagcccacagggccagctggccggggcccctttccacagcagtggtgagtccagatgggccacacctgctgctgctccagggctgcatccccttgtgctgtcctcccaaggctacatctgcaagtggagaggatttggctatcactcactgggggagagataagtgtggaagcaggagggggaattggggaaggagggaggctgcgtgtgggacaccttcggaagcccttgtcttcttcgtagtccccagggaaaggaacgcctgcctgctctgtagagggcaggctgagctctgagtgtgggcttcctattctcacagcagctagtttcatacttaaaagtctgaagccagatatattctgccaccagattaatttttttctgaagctcccatttggtctgttggaggaattcacattcctccggctgtcataactttgctctgtctttcaagagctcacacccctggccttgttttgcaaatagagcattctttctctcctgcctgtcctttaccttacaaagcttccccatactgaacaaaaacattttcaactgctctgtagtggaaggtagggaggccggggtggaagtaaagggtaattaaataatttctgctgcagcacgaaaagctgaacagcatgaagtattattaatacgatgtgctcttcctaatgaattaacacaggcaatccctctctcctgtctggtgttcagtaaatatttgttgaatgaatgaataacagcttatgattctgtctttcctgctctgatgaattatgaagtccatgtagccaaatcagcatcaaacccattttatatgcagtctgtgttttgagccccaggtcaaagtgaataaaatatgtgtgaaaatgaagtaataatgtccattggagaccactggcttcctgtatttgtaggggatagggtctacctggcttggtattggtgacttgagagtagccttccagctgcttttctctggttcccaggtaaaccagggtcaggctgtcccttctaggtggaactctgttgagaccccacaggcagctctggtgaatgaccagcatgtgcaaactcattgctctccagctgaccccaaaaccatgcaggaagaagggcaattcctgcaggactgagtctgcccccggctgagccttgctttgctcattgcagatatttaagtctctccatagtgctgtgactcacctgtctgtccttggttggaattccacagggaaatcacatgcagaacctggtcactatctgtacacaaagcacatggagagattctagggacaatcatttctaagtaaattacctaagggcagaagagtctgcccgggagctgggggagaatggagcagggacaggagatgggaataagtgacttgtacattaatcacaaagcaatcagcagatgacaaggggccttggaaccaccacgtctgtctagctggacgaggtgaaagaaaaggtcacccttgtctgggaactctcatccatcttcaagacacacacttacctggcttgcatgtgcctgagcttcctgtttttcccgcccagcagagatgctgccctggcctggttcattgtccattatttgccctctgggccatcccagcatccacctggcctgccccacctggcccaggccacagaggagggcatggctttggctagttgacctttaggaagtcatttactgggtgtaacccacctcagttcctgagacctgtaaactcctctttctctgccctgaatcttccccagttatcagggcccaagcaggagagtgggcgtgaactctcagcgctcttcccctaactttttcccttgatcctccccagcttcttccctctcctggcaacccaccccctgcccactgtcccctgaacacagaggctcctgatggatggagctgtcttcttacttccgctggccctccctgggctgtacactagcccttggatcaaaacctgttcccaagttcagatcaatttctttctgacatattttcacaaaagtgggttttgtctcccaggtcatttgaatttgaactggagcaatgtccttgcccaggtgtaacccttggcagtggattttggcagtggtgatgagtttggagtagaaaaaaagagtcctgattagaatggctactccatggctcagatcacagatagagcatgagatttggatttaggccttggatttattttattgattgattgattgattgattgattgagacggagtttcatgctttcgcccaggctggagtgaagtggtgcaatcttggcttactgcaacctccaccacccctcccccggccctcaccaggttcaagtgattctcctgcctcagcctcccgagtagctgggattattggcacctcccaccacgctttgggaggccgaggtgggcagatcacctgaggtcaggaatttgagaccggcctggctaacatggcaaaaccctgtctctactaaaaatacaaaaattagtgaggtgtggtggcacatgcctgtaatcccagctactcgggaggttgaggcacaagaatcacttgaaccctagaggcagaggttgcagtgagccgagatcgcaccactgcattccagtctggacgacaaagtgagactccatctcaaaaaaaaaaaaaaaaaaaaaaaaaaggacaatgcctgagcaacattacctgggtcccctagcccagcagggttctccttgtctcagccaaagatgggaagctgacttggttaggctgggcatccagacaccgaggctgaatagaaaagagataagaaaattacaacttacagactgaccctggggatgccagagggtggtccagatggagtaaaccccaaaaatgaccttctctggtgttagcctccacatgcattctgtctattgtgctgcatggcttgtgctatggtctgaacactggtgtctccccaaaattcatatgttgaaacttaattcccgaggtgatagtattaagaggtggggactctgggagatgatgagatcatgaaagcagagccctcatgaatgggacaagtgcctttataaaagaggctagaggaaagctgtttgcccttctgccacgtgaggacacatagagagcaccacccataaagaatgggctctcaccagacaccgaatctgccagcaccttgatcttggacttcccagcctctagaattgtgagcaataaacaactcataaagatatttatgaggccaggcacggtgactcatgcctgtaatcccagcactttgggaggccaaggcaggtggatcacttgaggtcaggagtttgagaacagactggccaacatggtgaagccccatctctactaaaaatacaaaaattagctgagtgtggtggtgcacacctgtaatcccagttactagggaggctgaagcacgagaattgcttgagcccgggaagtggatgttgcaatgagtggagattgtgctactgtactccagcatgggcaacagagtgagaccctgtctc

SEQ ID NO: 2026 - protein, 117 aa, Homo sapiens
MYLIRRAHCVTQPITTALIPAHRASWPGPLSTAVVSPDGPHLLLLQGCIPLCCPPKATSASGEDLAITHWGRDKCGSRRGNWGRREAACGTPSEALVFFVVPRERNACLLCRGQAEL

SEQ ID NO: 2027 - DNA, 367 bp, Homo sapiens
ggatgtcacatgggggatgaaattagaaaaataagaatgaggtcagttttttgacgaagctaaatgatttccttcaaaagactgtccattattggagattatattcttcctacatttgtggcattaaaatgtcttttccatctgggcatggtggctcacgcctgtaatcccagcactttgggaggccgaggcacaagaatcacttgaaccctagaggcagaggttgcagtgagccgagatcgcaccactgcattccagtctggacgacaaagtgagactccatctcaaaaaaaaaaaaaaaaaaaaaaaaaaggacaatgcctgagcaacattacctgggtcccctagcccagcagggttctccttg

SEQ ID NO: 2028 - protein, 47 aa, Homo sapiens
MISFKRLSIIGDYILPTFVALKCLFHLGMVAHACNPSTLGGRGTRIT

SEQ ID NO: 2029 - DNA, 678 bp, Homo sapiens
tggctgtactgagaagaggtcctgactcagaactggaggacatcatggaaggcttcctggaggaagtgccatctaggctgaaacctaaaggatgagtagaactaaccagatgaaaagcctgagggatctaaagccttgggacttctggatctgcaagtggtccctgttttggtagctattgactgacgaggggctcttcgccccacaggtgactgctgtagccttgagtgaggacctcggccaaaaagaaggctcctaccgtggctgtttgctgatggtcttcgcagagcctgctgtctttgagcttcctgagagagggacactaccctcgcttaggtgagtgctccaggtccatggggcctgatgctctgtccctggtctggcttccgcccatgtatacatttgcactcttgatggtggcttaggatctgcttccaacaagtctgccaaatgtgctctgtaacacagggggaccctccaaatgtgcattgctttctgtcagtctcaggaaacccattcccttcccagcctatctcagaaacggagagtggtggctcagtggcctctggctctggcacagccccttgatgggtccacagtggcccctctgcccttggctctgttggcttcccaacagatgttcctcttcacatgtagtcctaagaactcaatcagttt

SEQ ID NO: 2030 - protein, 64 aa, Homo sapiens
MCIAFCQSQETHSLPSLSQKRRVVAQWPLALAQPLDGSTVAPLPLALLASQQMFLFTCSPKNSI

SEQ ID NO: 2031 - DNA, 3207 bp, Homo sapiens
cagcagacggcagacggtgcccggcgcccacgggaagctgaagatacagcggtaaacaaacctccatgtctcaagctgaccacacttgtatctggacttgccagctgattagctctgttcccaccaggctcgttcaaagacccacagcttgagggggcagagggctgcccctgatggggcctggcaatgactgagcaggcccagccccagaggacaaggaagagaaggcatattgaggagggcaagaagtgacgcccggtgtagaatgactgccctgggagggtggttccttgggccctggcagggttgctgacccttaccctgcaaaacacaaagagcaggactccagactcttcttgtgaatggtcccctgccctgcagctccaccatgaggcttctcgtggccccactcttgctagcttgggtggctggtgccactgccgctgtgcccgtggtaccctggcatgttccctgcccccctcagtgtgcctgccagatccggccctggtatacgccccgctcgtcctaccgcgaggctaccactgtggactgcaatgacctattcctgacggcagtccccccggcactccccgcaggcacacagaccctgctcctgcagagcaacagcattgtccgtgtggaccagagtgagctgggctacctggccaatctcacagagctggacctgtcccagaacagcttttcggatgcccgagactgtgatttccatgccctgccccagctgctgagcctgcacctagaggagaaccagctgacccggctggaggaccacagctttgcagggctggccagcctacaggaactctatctcaaccacaaccagctctaccgcatcgcccccagggccttttctggcctcagcaacttgctgcggctgcacctcaactccaacctcctgagggccattgacagccgctggtttgaaatgctgcccaacttggagatactcatgattggcggcaacaaggtagatgccatcctggacatgaacttccggcccctggccaacctgcgtagcctggtgctagcaggcatgaacctgcgggagatctccgactatgccctggaggggctgcaaagcctggagagcctctccttctatgacaaccagctggcccgggtgcccaggcgggcactggaacaggtgcccgggctcaagttcctagacctcaacaagaacccgctccagcgggtagggccgggggactttgccaacatgctgcaccttaaggagctgggactgaacaacatggaggagctggtctccatcgacaagtttgccctggtgaacctccccgagctgaccaagctggacatcaccaataacccacggctgtccttcatccacccccgcgccttccaccacctgccccagatggagaccctcatgctcaacaacaacgctctcagtgccttgcaccagcagacggtggagtccctgcccaacctgcaggaggtaggtctccacggcaaccccatccgctgtgactgtgtcatccgctgggccaatgccacgggcacccgtgtccgcttcatcgagccgcaatccaccctgtgtgcggagcctccggacctccagcgcctcccggtccgtgaggtgcccttccgggagatgacggaccactgtttgcccctcatctccccacgaagcttccccccaagcctccaggtagccagtggagagagcatggtgctgcattgccgggcactggccgaacccgaacccgagatctactgggtcactccagctgggcttcgactgacacctgcccatgcaggcaggaggtaccgggtgtaccccgaggggaccctggagctgcggagggtgacagcagaagaggcagggctatacacctgtgtggcccagaacctggtgggggctgacactaagacggttagtgtggttgtgggccgtgctctcctccagccaggcagggacgaaggacaggggctggagctccgggtgcaggagacccacccctatcacatcctgctatcttgggtcaccccacccaacacagtgtccaccaacctcacctggtccagtgcctcctccctccggggccagggggccacagctctggcccgcctgcctcggggaacccacagctacaacattacccgcctccttcaggccacggagtactgggcctgcctgcaagtggcctttgctgatgcccacacccagttggcttgtgtatgggccaggaccaaagaggccacttcttgccacagagccttaggggaccgtcctgggctcattgccatcctggctctcgctgtccttctcctggcagctgggctagcggcccaccttggcacaggccaacccaggaagggtgtgggtgggaggcggcctctccctccagcctgggctttctggggctggagtgccccttctgtccgggttgtgtctgctcccctcgtcctgccctggaatccagggaggaagctgcccagatcctcagaaggggagacactgttgccaccattgtctcaaaattcttgaagctcagcctgttctcagcagtagagaaatcactaggactactttttaccaaaagagaagcagtctgggccagatgccctgccaggaaagggacatggacccacgtgcttgaggcctggcagctgggccaagacagatggggctttgtggccctgggggtgcttctgcagcctcgaaaaagttgcccttacctcctagggtcacctctgctgccattctgaggaacatctccaaggaacaggagggactttggctagagcctcctgcctccccatcttctctctgcccagaggctcctgggcctggcttggctgtcccctacctgtgtccccgggctgcaccccttcctcttctctttctctgtacagtctcagttgcttgctcttgtgcctcctgggcaagggctgaaggaggccactccatctcacctcggggggctgccctcaatgtgggagtgaccccagccagatctgaaggacatttgggagagggatgcccaggaacgcctcatctcagcagcctgggctcggcattccgaagctgactttctataggcaattttgtacctttgtggagaaatgtgtcacctcccccaacccgattcactcttttctcctgttttgtaaaaaataaaaataaataataacaataatacgggggaaaggaacgaaaggaaa

SEQ ID NO: 2032 - protein, 713 aa, Homo sapiens; identical to SEQ ID NO: 78

SEQ ID NO: 2033 - DNA, 3442 bp, Homo sapiens
gcgagtgaggagggcgagcgcgaagccgggaagaggggcgcgcgtggagggggtgccgggcgccgcgagggcctgctccgggcacctgcgaacgcgcggcgctctcaaggagcgcctggctctcgcccgccagcctccggccgcgacgcgcccagggcgcggagagggggtggggacggattgggattctgccatcgccctcaccggctgggccctggagccgctcccaggataactccacgttggggagggcgcccgccgagcctccccggcctgtgcagacggcgcgcgcggcgggagggcgcggaccagcgtccccagcccggccccgggcggaaggcgagcggagcgcggccgcgcgggcagcagacggcagacggtgcccggcgcccacgggggctgcccctgatggggcctggcaatgactgagcaggcccagccccagaggacaaggaagagaaggcatattgaggagggcaagaagtgacgcccggtgtagaatgactgccctgggagggtggttccttgggccctggcagggttgctgacccttaccctgcaaaacacaaagagcaggactccagactcttcttgtgaatggtcccctgccctgcagctccaccatgaggcttctcgtggccccactcttgctagcttgggtggctggtgccactgccgctgtgcccgtggtaccctggcatgttccctgcccccctcagtgtgcctgccagatccggccctggtatacgccccgctcgtcctaccgcgaggctaccactgtggactgcaatgacctattcctgacggcagtccccccggcactccccgcaggcacacagaccctgctcctgcagagcaacagcattgtccgtgtggaccagagtgagctgggctacctggccaatctcacagagctggacctgtcccagaacagcttttcggatgcccgagactgtgatttccatgccctgccccagctgctgagcctgcacctagaggagaaccagctgacccggctggaggaccacagctttgcagggctggccagcctacaggaactctatctcaaccacaaccagctctaccgcatcgcccccagggccttttctggcctcagcaacttgctgcggctgcacctcaactccaacctcctgagggccattgacagccgctggtttgaaatgctgcccaacttggagatactcatgattggcggcaacaaggtagatgccatcctggacatgaacttccggcccctggccaacctgcgtagcctggtgctagcaggcatgaacctgcgggagatctccgactatgccctggaggggctgcaaagcctggagagcctctccttctatgacaaccagctggcccgggtgcccaggcgggcactggaacaggtgcccgggctcaagttcctagacctcaacaagaacccgctccagcgggtagggccgggggactttgccaacatgctgcaccttaaggagctgggactgaacaacatggaggagctggtctccatcgacaagtttgccctggtgaacctccccgagctgaccaagctggacatcaccaataacccacggctgtccttcatccacccccgcgccttccaccacctgccccagatggagaccctcatgctcaacaacaacgctctcagtgccttgcaccagcagacggtggagtccctgcccaacctgcaggaggtaggtctccacggcaaccccatccgctgtgactgtgtcatccgctgggccaatgccacgggcacccgtgtccgcttcatcgagccgcaatccaccctgtgtgcggagcctccggacctccagcgcctcccggtccgtgaggtgcccttccgggagatgacggaccactgtttgcccctcatctccccacgaagcttccccccaagcctccaggtagccagtggagagagcatggtgctgcattgccgggcactggccgaacccgaacccgagatctactgggtcactccagctgggcttcgactgacacctgcccatgcaggcaggaggtaccgggtgtaccccgaggggaccctggagctgcggagggtgacagcagaagaggcagggctatacacctgtgtggcccagaacctggtgggggctgacactaagacggttagtgtggttgtgggccgtgctctcctccagccaggcagggacgaaggacaggggctggagctccgggtgcaggagacccacccctatcacatcctgctatcttgggtcaccccacccaacacagtgtccaccaacctcacctggtccagtgcctcctccctccggggccagggggccacagctctggcccgcctgcctcggggaacccacagctacaacattacccgcctccttcaggccacggagtactgggcctgcctgcaagtggcctttgctgatgcccacacccagttggcttgtgtatgggccaggaccaaagaggccacttcttgccacagagccttaggggaccgtcctgggctcattgccatcctggctctcgctgtccttctcctggcagctgggctagcggcccaccttggcacaggccaacccaggaagggtgtgggtgggaggcggcctctccctccagcctgggctttctggggctggagtgccccttctgtccgggttgtgtctgctcccctcgtcctgccctggaatccagggaggaagctgcccagatcctcagaaggggagacactgttgccaccattgtctcaaaattcttgaagctcagcctgttctcagcagtagagaaatcactaggactactttttaccaaaagagaagcagtctgggccagatgccctgccaggaaagggacatggacccacgtgcttgaggcctggcagctgggccaagacagatggggctttgtggccctgggggtgcttctgcagcctcgaaaaagttgcccttacctcctagggtcacctctgctgccattctgaggaacatctccaaggaacaggagggactttggctagagcctcctgcctccccatcttctctctgcccagaggctcctgggcctggcttggctgtcccctacctgtgtccccgggctgcaccccttcctcttctctttctctgtacagtctcagttgcttgctcttgtgcctcctgggcaagggctgaaggaggccactccatctcacctcggggggctgccctcaatgtgggagtgaccccagccagatctgaaggacatttgggagagggatgcccaggaacgcctcatctcagcagcctgggctcggcattccgaagctgactttctataggcaattttgtacctttgtggagaaatgtgtcacctcccccaacccgattcactcttttctcctgttttgtaaaaaataaaaataaataataacaataatacgggggaaaggaacgaaaggaaa

SEQ ID NO: 2034 - protein, 713 aa, Homo sapiens; identical to SEQ ID NO: 78

SEQ ID NO: 2035 - DNA, 3545 bp, Homo sapiens
gcgagtgaggagggcgagcgcgaagccgggaagaggggcgcgcgtggagggggtgccgggcgccgcgagggcctgctccgggcacctgcgaacgcgcggcgctctcaaggagcgcctggctctcgcccgccagcctccggccgcgacgcgcccagggcgcggagagggggtggggacggattgggattctgccatcgccctcaccggctgggccctggagccgctcccaggataactccacgttggggagggcgcccgccgagcctccccggcctgtgcagacggcgcgcgcggcgggagggcgcggaccagcgtccccagcccggccccgggcggaaggcgagcggagcgcggccgcgcgggcagcagacggcagacggtgcccggcgcccacgggttctggaggctgggaagtccaagacaaggtgccagcatctggtgaaggctgctgtctgctttcaagatggtgcctcgaatgctgtttcctcacatggcagaagggctgcccctgatggggcctggcaatgactgagcaggcccagccccagaggacaaggaagagaaggcatattgaggagggcaagaagtgacgcccggtgtagaatgactgccctgggagggtggttccttgggccctggcagggttgctgacccttaccctgcaaaacacaaagagcaggactccagactcttcttgtgaatggtcccctgccctgcagctccaccatgaggcttctcgtggccccactcttgctagcttgggtggctggtgccactgccgctgtgcccgtggtaccctggcatgttccctgcccccctcagtgtgcctgccagatccggccctggtatacgccccgctcgtcctaccgcgaggctaccactgtggactgcaatgacctattcctgacggcagtccccccggcactccccgcaggcacacagaccctgctcctgcagagcaacagcattgtccgtgtggaccagagtgagctgggctacctggccaatctcacagagctggacctgtcccagaacagcttttcggatgcccgagactgtgatttccatgccctgccccagctgctgagcctgcacctagaggagaaccagctgacccggctggaggaccacagctttgcagggctggccagcctacaggaactctatctcaaccacaaccagctctaccgcatcgcccccagggccttttctggcctcagcaacttgctgcggctgcacctcaactccaacctcctgagggccattgacagccgctggtttgaaatgctgcccaacttggagatactcatgattggcggcaacaaggtagatgccatcctggacatgaacttccggcccctggccaacctgcgtagcctggtgctagcaggcatgaacctgcgggagatctccgactatgccctggaggggctgcaaagcctggagagcctctccttctatgacaaccagctggcccgggtgcccaggcgggcactggaacaggtgcccgggctcaagttcctagacctcaacaagaacccgctccagcgggtagggccgggggactttgccaacatgctgcaccttaaggagctgggactgaacaacatggaggagctggtctccatcgacaagtttgccctggtgaacctccccgagctgaccaagctggacatcaccaataacccacggctgtccttcatccacccccgcgccttccaccacctgccccagatggagaccctcatgctcaacaacaacgctctcagtgccttgcaccagcagacggtggagtccctgcccaacctgcaggaggtaggtctccacggcaaccccatccgctgtgactgtgtcatccgctgggccaatgccacgggcacccgtgtccgcttcatcgagccgcaatccaccctgtgtgcggagcctccggacctccagcgcctcccggtccgtgaggtgcccttccgggagatgacggaccactgtttgcccctcatctccccacgaagcttccccccaagcctccaggtagccagtggagagagcatggtgctgcattgccgggcactggccgaacccgaacccgagatctactgggtcactccagctgggcttcgactgacacctgcccatgcaggcaggaggtaccgggtgtaccccgaggggaccctggagctgcggagggtgacagcagaagaggcagggctatacacctgtgtggcccagaacctggtgggggctgacactaagacggttagtgtggttgtgggccgtgctctcctccagccaggcagggacgaaggacaggggctggagctccgggtgcaggagacccacccctatcacatcctgctatcttgggtcaccccacccaacacagtgtccaccaacctcacctggtccagtgcctcctccctccggggccagggggccacagctctggcccgcctgcctcggggaacccacagctacaacattacccgcctccttcaggccacggagtactgggcctgcctgcaagtggcctttgctgatgcccacacccagttggcttgtgtatgggccaggaccaaagaggccacttcttgccacagagccttaggggaccgtcctgggctcattgccatcctggctctcgctgtccttctcctggcagctgggctagcggcccaccttggcacaggccaacccaggaagggtgtgggtgggaggcggcctctccctccagcctgggctttctggggctggagtgccccttctgtccgggttgtgtctgctcccctcgtcctgccctggaatccagggaggaagctgcccagatcctcagaaggggagacactgttgccaccattgtctcaaaattcttgaagctcagcctgttctcagcagtagagaaatcactaggactactttttaccaaaagagaagcagtctgggccagatgccctgccaggaaagggacatggacccacgtgcttgaggcctggcagctgggccaagacagatggggctttgtggccctgggggtgcttctgcagcctcgaaaaagttgcccttacctcctagggtcacctctgctgccattctgaggaacatctccaaggaacaggagggactttggctagagcctcctgcctccccatcttctctctgcccagaggctcctgggcctggcttggctgtcccctacctgtgtccccgggctgcaccccttcctcttctctttctctgtacagtctcagttgcttgctcttgtgcctcctgggcaagggctgaaggaggccactccatctcacctcggggggctgccctcaatgtgggagtgaccccagccagatctgaaggacatttgggagagggatgcccaggaacgcctcatctcagcagcctgggctcggcattccgaagctgactttctataggcaattttgtacctttgtggagaaatgtgtcacctcccccaacccgattcactcttttctcctgttttgtaaaaaataaaaataaataataacaataatacgggggaaaggaacgaaaggaaa

SEQ ID NO: 2036 - protein, 713 aa, Homo sapiens; identical to SEQ ID NO: 78

SEQ ID NO: 2037 - DNA, 3120 bp, Homo sapiens
aagctgaagatacagcggtaaacaaacctccatgtctcaagctgaccacacttgtatctggacttgccagctgattagctctgttcccaccaggctcgttcaaagacccacagcttgagggggcagagggctgcccctgatggggcctggcaatgactgagcaggcccagccccagaggacaaggaagagaaggcatattgaggagggcaagaagtgacgcccggtgtagaatgactgccctgggagggtggttccttgggccctggcagggttgctgacccttaccctgcaaaacacaaagagcaggactccagactcttcttgtgaatggtcccctgccctgcagctccaccatgaggcttctcgtggccccactcttgctagcttgggtggctggtgccactgccgctgtgcccgtggtaccctggcatgttccctgcccccctcagtgtgcctgccagatccggccctggtatacgccccgctcgtcctaccgcgaggctaccactgtggactgcaatgacctattcctgacggcagtccccccggcactccccgcaggcacacagaccctgctcctgcagagcaacagcattgtccgtgtggaccagagtgagctgggctacctggccaatctcacagagctggacctgtcccagaacagcttttcggatgcccgagactgtgatttccatgccctgccccagctgctgagcctgcacctagaggagaaccagctgacccggctggaggaccacagctttgcagggctggccagcctacaggaactctatctcaaccacaaccagctctaccgcatcgcccccagggccttttctggcctcagcaacttgctgcggctgcacctcaactccaacctcctgagggccattgacagccgctggtttgaaatgctgcccaacttggagatactcatgattggcggcaacaaggtagatgccatcctggacatgaacttccggcccctggccaacctgcgtagcctggtgctagcaggcatgaacctgcgggagatctccgactatgccctggaggggctgcaaagcctggagagcctctccttctatgacaaccagctggcccgggtgcccaggcgggcactggaacaggtgcccgggctcaagttcctagacctcaacaagaacccgctccagcgggtagggccgggggactttgccaacatgctgcaccttaaggagctgggactgaacaacatggaggagctggtctccatcgacaagtttgccctggtgaacctccccgagctgaccaagctggacatcaccaataacccacggctgtccttcatccacccccgcgccttccaccacctgccccagatggagaccctcatgctcaacaacaacgctctcagtgccttgcaccagcagacggtggagtccctgcccaacctgcaggaggtaggtctccacggcaaccccatccgctgtgactgtgtcatccgctgggccaatgccacgggcacccgtgtccgcttcatcgagccgcaatccaccctgtgtgcggagcctccggacctccagcgcctcccggtccgtgaggtgcccttccgggagatgacggaccactgtttgcccctcatctccccacgaagcttccccccaagcctccaggtagccagtggagagagcatggtgctgcattgccgggcactggccgaacccgaacccgagatctactgggtcactccagctgggcttcgactgacacctgcccatgcaggcaggaggtaccgggtgtaccccgaggggaccctggagctgcggagggtgacagcagaagaggcagggctatacacctgtgtggcccagaacctggtgggggctgacactaagacggttagtgtggttgtgggccgtgctctcctccagccaggcagggacgaaggacaggggctggagctccgggtgcaggagacccacccctatcacatcctgctatcttgggtcaccccacccaacacagtgtccaccaacctcacctggtccagtgcctcctccctccggggccagggggccacagctctggcccgcctgcctcggggaacccacagctacaacattacccgcctccttcaggccacggagtactgggcctgcctgcaagtggcctttgctgatgcccacacccagttggcttgtgtatgggccaggaccaaagaggccacttcttgccacagagccttaggggaccgtcctgggctcattgccatcctggctctcgctgtccttctcctggcagctgggctagcggcccaccttggcacaggccaacccaggaagggtgtgggtgggaggcggcctctccctccagcctgggctttctggggctggagtgccccttctgtccgggttgtgtctgctcccctcgtcctgccctggaatccagggaggaagctgcccagatcctcagaaggggagacactgttgccaccattgtctcaaaattcttgaagctcagcctgttctcagcagtagagaaatcactaggactactttttaccaaaagagaagcagtctgggccagatgccctgccaggaaagggacatggacccacgtgcttgaggcctggcagctgggccaagacagatggggctttgtggccctgggggtgcttctgcagcctcgaaaaagttgcccttacctcctagggtcacctctgctgccattctgaggaacatctccaaggaacaggagggactttggctagagcctcctgcctccccatcttctctctgcccagaggctcctgggcctggcttggctgtcccctacctgtgtccccgggctgcaccccttcctcttctctttctctgtacagtctcagttgcttgctcttgtgcctcctgggcaagggctgaaggaggccactccatctcacctcggggggctgccctcaatgtgggagtgaccccagccagatctgaaggacatttgggagagggatgcccaggaacgcctcatctcagcagcctgggctcggcattccgaagctgactttctataggcaattttgtacctttgtggagaaatgtgtcacctcccccaacccgattcactcttttctcctgttttgt

SEQ ID NO: 2038 - protein, 713 aa, Homo sapiens; identical to SEQ ID NO: 78

SEQ ID NO: 2039 - DNA, 3389 bp, Homo sapiens
gcgagtgaggagggcgagcgcgaagccgggaagaggggcgcgcgtggagggggtgccgggcgccgcgagggcctgctccgggcacctgcgaacgcgcggcgctctcaaggagcgcctggctctcgcccgccagcctccggccgcgacgcgcccagggcgcggagagggggtggggacggattgggattctgccatcgccctcaccggctgggccctggagccgctcccaggataactccacgttggggagggcgcccgccgagcctccccggcctgtgcagacggcgcgcgcggcgggagggcgcggaccagcgtccccagcccggccccgggcggaaggcgagcggagcgcggccgcgcgggcagcagacggcagacggtgcccggcgcccacgggggctgcccctgatggggcctggcaatgactgagcaggcccagccccagaggacaaggaagagaaggcatattgaggagggcaagaagtgacgcccggtgtagaatgactgccctgggagggtggttccttgggccctggcagggttgctgacccttaccctgcaaaacacaaagagcaggactccagactcttcttgtgaatggtcccctgccctgcagctccaccatgaggcttctcgtggccccactcttgctagcttgggtggctggtgccactgccgctgtgcccgtggtaccctggcatgttccctgcccccctcagtgtgcctgccagatccggccctggtatacgccccgctcgtcctaccgcgaggctaccactgtggactgcaatgacctattcctgacggcagtccccccggcactccccgcaggcacacagaccctgctcctgcagagcaacagcattgtccgtgtggaccagagtgagctgggctacctggccaatctcacagagctggacctgtcccagaacagcttttcggatgcccgagactgtgatttccatgccctgccccagctgctgagcctgcacctagaggagaaccagctgacccggctggaggaccacagctttgcagggctggccagcctacaggaactctatctcaaccacaaccagctctaccgcatcgcccccagggccttttctggcctcagcaacttgctgcggctgcacctcaactccaacctcctgagggccattgacagccgctggtttgaaatgctgcccaacttggagatactcatgattggcggcaacaaggtagatgccatcctggacatgaacttccggcccctggccaacctgcgtagcctggtgctagcaggcatgaacctgcgggagatctccgactatgccctggaggggctgcaaagcctggagagcctctccttctatgacaaccagctggcccgggtgcccaggcgggcactggaacaggtgcccgggctcaagttcctagacctcaacaagaacccgctccagcgggtagggccgggggactttgccaacatgctgcaccttaaggagctgggactgaacaacatggaggagctggtctccatcgacaagtttgccctggtgaacctccccgagctgaccaagctggacatcaccaataacccacggctgtccttcatccacccccgcgccttccaccacctgccccagatggagaccctcatgctcaacaacaacgctctcagtgccttgcaccagcagacggtggagtccctgcccaacctgcaggaggtaggtctccacggcaaccccatccgctgtgactgtgtcatccgctgggccaatgccacgggcacccgtgtccgcttcatcgagccgcaatccaccctgtgtgcggagcctccggacctccagcgcctcccggtccgtgaggtgcccttccgggagatgacggaccactgtttgcccctcatctccccacgaagcttccccccaagcctccaggtagccagtggagagagcatggtgctgcattgccgggcactggccgaacccgaacccgagatctactgggtcactccagctgggcttcgactgacacctgcccatgcaggcaggaggtaccgggtgtaccccgaggggaccctggagctgcggagggtgacagcagaagaggcagggctatacacctgtgtggcccagaacctggtgggggctgacactaagacggttagtgtggttgtgggccgtgctctcctccagccaggcagggacgaaggacaggggctggagctccgggtgcaggagacccacccctatcacatcctgctatcttgggtcaccccacccaacacagtgtccaccaacctcacctggtccagtgcctcctccctccggggccagggggccacagctctggcccgcctgcctcggggaacccacagctacaacattacccgcctccttcaggccacggagtactgggcctgcctgcaagtggcctttgctgatgcccacacccagttggcttgtgtatgggccaggaccaaagaggccacttcttgccacagagccttaggggaccgtcctgggctcattgccatcctggctctcgctgtccttctcctggcagctgggctagcggcccaccttggcacaggccaacccaggaagggtgtgggtgggaggcggcctctccctccagcctgggctttctggggctggagtgccccttctgtccgggttgtgtctgctcccctcgtcctgccctggaatccagggaggaagctgcccagatcctcagaaggggagacactgttgccaccattgtctcaaaattcttgaagctcagcctgttctcagcagtagagaaatcactaggactactttttaccaaaagagaagcagtctgggccagatgccctgccaggaaagggacatggacccacgtgcttgaggcctggcagctgggccaagacagatggggctttgtggccctgggggtgcttctgcagcctcgaaaaagttgcccttacctcctagggtcacctctgctgccattctgaggaacatctccaaggaacaggagggactttggctagagcctcctgcctccccatcttctctctgcccagaggctcctgggcctggcttggctgtcccctacctgtgtccccgggctgcaccccttcctcttctctttctctgtacagtctcagttgcttgctcttgtgcctcctgggcaagggctgaaggaggccactccatctcacctcggggggctgccctcaatgtgggagtgaccccagccagatctgaaggacatttgggagagggatgcccaggaacgcctcatctcagcagcctgggctcggcattccgaagctgactttctataggcaattttgtacctttgtggagaaatgtgtcacctcccccaacccgattcactcttttctcctgttttgt

SEQ ID NO: 2040 - protein, 713 aa, Homo sapiens; identical to SEQ ID NO: 78

SEQ ID NO: 2041 - DNA, 3492 bp, Homo sapiens
gcgagtgaggagggcgagcgcgaagccgggaagaggggcgcgcgtggagggggtgccgggcgccgcgagggcctgctccgggcacctgcgaacgcgcggcgctctcaaggagcgcctggctctcgcccgccagcctccggccgcgacgcgcccagggcgcggagagggggtggggacggattgggattctgccatcgccctcaccggctgggccctggagccgctcccaggataactccacgttggggagggcgcccgccgagcctccccggcctgtgcagacggcgcgcgcggcgggagggcgcggaccagcgtccccagcccggccccgggcggaaggcgagcggagcgcggccgcgcgggcagcagacggcagacggtgcccggcgcccacgggttctggaggctgggaagtccaagacaaggtgccagcatctggtgaaggctgctgtctgctttcaagatggtgcctcgaatgctgtttcctcacatggcagaagggctgcccctgatggggcctggcaatgactgagcaggcccagccccagaggacaaggaagagaaggcatattgaggagggcaagaagtgacgcccggtgtagaatgactgccctgggagggtggttccttgggccctggcagggttgctgacccttaccctgcaaaacacaaagagcaggactccagactcttcttgtgaatggtcccctgccctgcagctccaccatgaggcttctcgtggccccactcttgctagcttgggtggctggtgccactgccgctgtgcccgtggtaccctggcatgttccctgcccccctcagtgtgcctgccagatccggccctggtatacgccccgctcgtcctaccgcgaggctaccactgtggactgcaatgacctattcctgacggcagtccccccggcactccccgcaggcacacagaccctgctcctgcagagcaacagcattgtccgtgtggaccagagtgagctgggctacctggccaatctcacagagctggacctgtcccagaacagcttttcggatgcccgagactgtgatttccatgccctgccccagctgctgagcctgcacctagaggagaaccagctgacccggctggaggaccacagctttgcagggctggccagcctacaggaactctatctcaaccacaaccagctctaccgcatcgcccccagggccttttctggcctcagcaacttgctgcggctgcacctcaactccaacctcctgagggccattgacagccgctggtttgaaatgctgcccaacttggagatactcatgattggcggcaacaaggtagatgccatcctggacatgaacttccggcccctggccaacctgcgtagcctggtgctagcaggcatgaacctgcgggagatctccgactatgccctggaggggctgcaaagcctggagagcctctccttctatgacaaccagctggcccgggtgcccaggcgggcactggaacaggtgcccgggctcaagttcctagacctcaacaagaacccgctccagcgggtagggccgggggactttgccaacatgctgcaccttaaggagctgggactgaacaacatggaggagctggtctccatcgacaagtttgccctggtgaacctccccgagctgaccaagctggacatcaccaataacccacggctgtccttcatccacccccgcgccttccaccacctgccccagatggagaccctcatgctcaacaacaacgctctcagtgccttgcaccagcagacggtggagtccctgcccaacctgcaggaggtaggtctccacggcaaccccatccgctgtgactgtgtcatccgctgggccaatgccacgggcacccgtgtccgcttcatcgagccgcaatccaccctgtgtgcggagcctccggacctccagcgcctcccggtccgtgaggtgcccttccgggagatgacggaccactgtttgcccctcatctccccacgaagcttccccccaagcctccaggtagccagtggagagagcatggtgctgcattgccgggcactggccgaacccgaacccgagatctactgggtcactccagctgggcttcgactgacacctgcccatgcaggcaggaggtaccgggtgtaccccgaggggaccctggagctgcggagggtgacagcagaagaggcagggctatacacctgtgtggcccagaacctggtgggggctgacactaagacggttagtgtggttgtgggccgtgctctcctccagccaggcagggacgaaggacaggggctggagctccgggtgcaggagacccacccctatcacatcctgctatcttgggtcaccccacccaacacagtgtccaccaacctcacctggtccagtgcctcctccctccggggccagggggccacagctctggcccgcctgcctcggggaacccacagctacaacattacccgcctccttcaggccacggagtactgggcctgcctgcaagtggcctttgctgatgcccacacccagttggcttgtgtatgggccaggaccaaagaggccacttcttgccacagagccttaggggaccgtcctgggctcattgccatcctggctctcgctgtccttctcctggcagctgggctagcggcccaccttggcacaggccaacccaggaagggtgtgggtgggaggcggcctctccctccagcctgggctttctggggctggagtgccccttctgtccgggttgtgtctgctcccctcgtcctgccctggaatccagggaggaagctgcccagatcctcagaaggggagacactgttgccaccattgtctcaaaattcttgaagctcagcctgttctcagcagtagagaaatcactaggactactttttaccaaaagagaagcagtctgggccagatgccctgccaggaaagggacatggacccacgtgcttgaggcctggcagctgggccaagacagatggggctttgtggccctgggggtgcttctgcagcctcgaaaaagttgcccttacctcctagggtcacctctgctgccattctgaggaacatctccaaggaacaggagggactttggctagagcctcctgcctccccatcttctctctgcccagaggctcctgggcctggcttggctgtcccctacctgtgtccccgggctgcaccccttcctcttctctttctctgtacagtctcagttgcttgctcttgtgcctcctgggcaagggctgaaggaggccactccatctcacctcggggggctgccctcaatgtgggagtgaccccagccagatctgaaggacatttgggagagggatgcccaggaacgcctcatctcagcagcctgggctcggcattccgaagctgactttctataggcaattttgtacctttgtggagaaatgtgtcacctcccccaacccgattcactcttttctcctgttttgt

SEQ ID NO: 2042 - protein, 713 aa, Homo sapiens; identical to SEQ ID NO: 78

SEQ ID NO: 2043 - DNA, 4492 bp, Homo sapiens
atttagaaaagttttggattcatctgtttatgaggaggaaaagaggccaagaaaaggcagcaatttgtccatgtgcttaattagtgagtggcagtggcagtaacctggtctgctgagctccctggactccctgatcccagctcaaaatagtttccagttttcatctgccagttgcttcggaggcttttctaaggaagacagttcataaaatgacccagaattcatcctccttaggtgataggatcattactccttatacaccccctaggtctcagcctatgaacaaacacttgtttgtttctctgtctaccctgttccaaaccaccgaactggattttgccaacaagaagagctgtttcctgtgcctgcccctgagagctgatggcttcccagagatgcctcacagtcctgcgcagacagagagaatgcagaagctggcaaaggatcctccacacgcaagatcagaggacgtcccagatcatcttttctttgtggatactgcaggtctacgtgaaatagtgtgtttttgcggggtgctgtcccttaggacaagtgaagggctgatgagaaaggaaactgcgtgaggtatcacaaagccatccatggggcagcctatgaaagtatgttcacacggagggaaaatatcagtgttcatatatcccttttagtgctgccttcccttttccactcccacaccacccccaaaacattttaaaaagttagttttggaagactgactttgtcttattctaaaatgtgtgcacagtaacagaagtgagaaagtcattccagtcttcatctagtcacctgagtcacaactttaatgcagcttctttttgttcctcaatctttgattacataatcatttgcaaaaatacactcctgaaatgaaatcacagttagccttgcattttggagtagtattagaattaagacttgccatcaaagaggttgccatctagaatgtttattctctttactgtgccccaggggttttacatgcatttgcaactttatttttattttatcctacaggaaaaaaggctcagagtgaatggctattagcctaaggttactcagctagtgatataggagttaagaagaaattatttaggcagatagtgagggtactggagtcctcagaaaggttttccttttaatgaaaagcagccccaaaatcattttcttttctaacaaagagcagcctgtaaaatcgagctgcagacatagacaagcaagctagaagcttgcacaggcgaatgcctgcagttgtgccaacaggaaaaggctacctggaactaggcatgttcaaaatggcagctctgtcttctcttctctttgccagccaggtgtacagtaaggagcagacaacatggcactggccaagtggaaaggctgtttgcataataagattacgatggggtggcctgccttccctgtgtgctacgtaaacatcacacctgatccaaccaatctgcaggccctacataaatcagacaccgcctcctccagcctgcctataaaatctggtacactccacgtgggccagaagtcccatttggatgcccctctctttcgcaagagagagagctgttctcctttctctttcttttgcctattacattccgctcctaaagtcacttctcatgtatgtccacgtccttaatcttcttgatgcaagacaatgaacccgggtatttaccccagacaacaacaccacttcactaggagttaaaagaacttgaaatgcaaattcatggtcatctggttccaaagcccatattaacaaaatttttttaattgtgataaaatacacataacataaagttgaccgtgttaactgtttttaaatgtacagtccagtagtgttaagtacattcacattgttgggcaatccttcttcagaactttttaagtttcccaaactgaagctctgcgtctattaagaacaactctttcttccaatccccagctgttggcaactatcattctactttctgtctttatgcatttaataattctacgtacctcatataaatgaaatcaaatggtatttgtaactggcttatttcacttagcataatatcctcaagattcagtcatattgttatatgtgtcataaattgcatttgtaatatcacaaactacaccttgatatattgtctactgattagcatggatttataattatttttatgctttgccttctacattctataaaagaataaaaagttgagttaaaaaccaaaattataataatgaaagtttttacatttgcccatatttttaccttcgctagaaaattttatatggcctagcatccattcattttaacttaagggattctctttcacattccttacagaacaggtctagtagtaatgaatttcctcagcatttttttaaatctgggaagttttaattctttgcttttgaaggacagtattgctggatatagaattcttagtcacaactttttttttctttcagcattttaaatatattatctcactacttttttatttgcaaggtttttgctgagaaatctgctgatagtgttattgaggacacattgtatagctatttttccatttctgttttcaagatttcctttgtctttgatttctcacagttgactatattttagttggatctctttggattatcatacttggagtttgttgagcttcttgtatttgtagattcatgtcttttctcaaatttgggcagtttggggtcattatttctccaaacacagtagtttaccatcacccacagtttcactttccacagtttccattgccaatggtcaacagcagtttgaaaatattaaatgaaaattccagaaataagcaatttataagtttaaatcacatgccatactgagcagtatgatgaaatcttgtgctatcctgctctgttctacctaggacatgaatcatccctctgtctaggatatctacactgtatatactacctgcctgttagtcatttagtagccatctcagttatcagattgactgtcatggtatcacagtgcttttgttcaagcaactcttagtttacttaacaaagtccccaaagtgtaatataggtaatgctggaaatttgggtatgccaaaaaaaaaatgttcatggagtgcttcctttaagtaaaaagttgaaaattcttgacacaaggaaggaaaaaaattatgcgaggtttctaagatctacagtaaaagtaaatctatccatgaaattgtgatggaagaaaaagaaatttgtaagtagtacatatagggtttgatactatatttgggatgttggaacatacccaattgataaaagaggactactgtaagttctctgttctttgtttctctcttctcctaaaacttcataatgagtatattggttcatttggtagtatcccatagtctttcagtctctgtttacttttcttcattcatttttctattggcaccttagcctcaataattttaaatgatctctctttaacgttaaggattttttttctgcctattcaagtctgccattaaaacattaggctggatgcggtggctcacgcctgcaatcccagatttttgggaggctgaggtgggtggataacttgaggtcaggagttcaagaccagcctgactaacatggtgaaaccccatctccactaaaaatacaaaaattagccaggtgtggtggcatgcacctgtagtcccagctactcgggaggctaaggcaggagaatcacttgaacccagcaggtggaggttgcagtgagccgatatcacaccactgcactccagcctgggcaaccaagggagactctgtctaaaaaaaaaatacaccgtagtaaatgtttgaattcagttatcgtgtttttcagctccagaattaatttctgttaggttcttttttataacttttatctctgttttgctttgttttgagacagggtctcactctgtagcataggctggagtgcagtggcacaatcttagcttactgcagcctcaacttccctggcatcaggtaaccttcccacctcagccctactagtagctgggactagaggtgcacaccatcatgcccagctaatttttgatttttaatagaggcagggttttgctatattacccaggctggtctctaactcttgggctcaaatagtcctcccacctcaacttcctgaagtactgggattataggcatgagctaccaggtctgactaatttccatttccttgtgaatatgtgcattttgttcatgtatcttttttatgattttctttacttatctgcctgtgttcttctttggctcatatttaagaatataagcatatttaagacagttgttttaaagtctttgccaaggaagtctgaaaactgtgtttctttagggttagtttctggagatttatttggctctttgaatgtgccgtgcttacctatttctttatatgctttgtggtcttttttattgaaacttgggcatg

SEQ ID NO: 2044 - protein, 124 aa, Homo sapiens
MTQNSSSLGDRIITPYTPPRSQPMNKHLFVSLSTLFQTTELDFANKKSCFLCLPLRADGFPEMPHSPAQTERMQKLAKDPPHARSEDVPDHLFFVDTAGLREIVCFCGVLSLRTSEGLMRKETA

SEQ ID NO: 2045 - DNA, 645 bp, Homo sapiens
agctgatggcttcccagagatgcctcacagtcctgcgcagacagagagaatgcagaagctggcaaaggatcctccacacgcaagatcagaggacgtcccagatcatcttttctttgtggatactgcaggtctacgtgaaatagtgtgtttttgcggggtgctgtcccttaggacaagtgaagggctgatgagaaaggaaactgcgtgagccaggtgtacagtaaggagcagacaacatggcactggccaagtggaaaggctgtttgcataataagattacgatggggtggcctgccttccctgtgtgctacgtaaacatcacacctgatccaaccaatctgcaggccctacataaatcagacaccgcctcctccagcctgcctataaaatctggtacactccacgtgggccagaagtcccatttggatgcccctctctttcgcaagagagagagctgttctcctttctctttcttttgcctattacattccgctcctaaagtcacttctcatgtatgtccacgtccttaatcttcttgatgcaagacaatgaacccgggtatttaccccagacaacaacaccacttcactaggagttaaaagaacttgaaatgcaaattcatggtcatctggttccaaagcccat

SEQ ID NO: 2046 - protein, 62 aa, Homo sapiens
MPHSPAQTERMQKLAKDPPHARSEDVPDHLFFVDTAGLREIVCFCGVLSLRTSEGLMRKETA

SEQ ID NO: 2047 - DNA, 846 bp, Homo sapiens
tggaactaatacataacttcagtaaagtttcaggatacaaagcaatatacaaaaatcagtagtatttctatatactaataatgttcaaggtgacagccaataaaacatgcaatcctatttacactaaccagcaaaaaaattaaaatatctagaaaatcatctctccaaggaggtgaaagatctctacaaggagaactacaaaacagtgctgaaagaaatcatagatgacgcaaacaaataacaaaatattccatactcacgaatttgaagaatcaatattgttaaaatggccatactgcccaaagcaatctacagatttagcactatgtctatcaaactaccaatgtcattttcacaaaattagaaaaaaaactattctaaaattcaaatggaaccaaaatagagcctgaatagctaaagcaaccctatgaaaagagaacaaagctggaggcatcacattacctgacttcaagccatactataaggctgtagtaaccaaaacagcatggtaatggtaccaaaggagacaggtagaccaatggaacagaatagagaacccagaggtaaagcctcacatctacagcaatctgatctttgacaaagttgacaaagtatgattgcaggactacaaacagagaacatttgcagagccataattttctaccatactgataggcccactgatgaacctttacagtcctcctctttgagccatgcttcctgcttccgtgggccaagtttatgcttctgagctcctgacgagtgcttctgcaactgatccacatgcacatagccaggtgccctatgtgcatgtagaaaataagccagacagggcatggactttgc

SEQ ID NO: 2048 - protein, 61 aa, Homo sapiens
MTQTNNKIFHTHEFEESILLKWPYCPKQSTDLALCLSNYQCHFHKIRKKTILKFKWNQNRA

SEQ ID NO: 2049 - DNA, 1810 bp, Homo sapiens
gtataaacaaaatagtatgcaacttacagcaatgtctctcccacttataataaaacacctaactctcatgtagcattttatccatattgagagctctgtgagatagaaattattatattacaagtcacagatatgtaaactgagatgcagagacatcaataacttgctcaaggttacaaggtggacttagtagttttaagcagaaccatgaaaacctctgtgacaactccctccagctccaagagtgccgggaggtggggggcggcgcatccgcggcctcgagcttgctacctcagcccatccccaccacccctgacatcgagaacgctgagctcacccccatcttgcccttcctgttccttggcaatgagcaggatgctcaggacctggacaccatgcagcggctgaacatcggctacgtcatcaacgtcaccactcatcttcccctctaccactatgagaaaggcctgttcaactacaagcggctgccagccactgacagcaacaagcagaacctgcggcagtactttgaagaggcttttgagttcattgaggaagctcaccagtgtgggaaggggcttctcatccactgccaggctggggtgtcccgctccgccaccatcgtcatcgcttacttgatgaagcacactcggatgaccatgactgatgcttataaatttgtcaaaggcaaacgaccaattatctccccaaaccttaacttcatggggcagttgctagagttcgaggaagacctaaacaacggtgtgacaccgagaatccttacaccaaagctgatgggcgtggagacggttgtgtgacaatggtctggatggaaaggattgctgctctccattaggagacaatgaggaaggaggatggattctggttttttttctttctttttttttttgtagttgggagtaagtttgtgaatggaaacaaacttgtttaaacactttatttttaacaagtgtaagaagactataacttttgatgccattgagattcacctcccacaaactgacaaattaaggaggttaaagaagtaatttttttaagccaacaataaaaatataatacaacttgtttctcccccttttccttttaagctatttgtagagtttatgactaaatagtctgtgcaggttcatagaccgaagatactacacactttaaaccaattaaaaagaaccaaaagtaaatagaaaagacattgaatcaccaaggcctgggatcaacctgggctgtccacacagaaaacaaaaacccaaccaaaccaagccctgttgtgctcactggtgcaaagagaagatcagggcagcttaagtggtctaagaatccttcaggcattctttaaggagaaaaaggatacctttgattttgtgtgtttcatgctctggattttttttttttttccttctctgggtttaagagattttttttgaaatagtgaggaactgaccattatatgccttcactggcttcttgtgcaataatatgatgttttaagtgtgcaaacaagttagagctggcagctgaatgatagacaaatagtgcaaatttgccagcttggagatagaaaggaattcaacaatatatcaaatactttccttcccacctttttccttttttttttttttttctgatttgattctggttacagtgccataaaccttgttacatatgtatatcagaatgtaagaaaaaaaaatttatttaaaaatatttttcgcaaaaaaaaaaaaaatcttggtgtgtttctgttgattgtgtaaaaatttattttcattatataaatgaaactggttta

SEQ ID NO: 2050 - protein, 140 aa, Homo sapiens; identical to SEQ ID NO: 86

SEQ ID NO: 2051 - DNA, 2258 bp, Homo sapiens
tttctgtattcttgtatggttgactttgagtgattcccaggatatttaccctgctattgtcttaccataatcttgatgtgtctagcctcttacaaatgagaaaatcctaccgaggaatttcccatttgtaatagtttgtcttggggagcaaagaggaggatagccaatgatcatgatgatctcctcttttctcacgcagagcaggtgttcatgataaaaagcaagtcttttgtgtcttcatgatctgaagagaggaaacaacacggatcaagatgatcctagacctcctaatcatggggatgattacaaggagttgcagaccctactctctattttgcagtgggtggagttgtggataggggtgacccatcagtcattgagaaatgaatctcctgggtgctacttgtgaaagtgaggatcctctctccctttcctgtggatgcagctgagattctggacagcctagacttcttcctcagtgtcagagtaagattgcctcaatggggcggggcaggacacactgctgacctcaccactgggcgccctgggcagccactgcgaggcctcgtcattttcgagttggtgagacaccgcggcagtcgacttggaagatgctctggtggtagaggtggacttagtagttttaagcagaaccatgaaaacctctgtgacaactccctccagctccaagagtgccgggaggtggggggcggcgcatccgcggcctcgagcttgctacctcagcccatccccaccacccctgacatcgagaacgctgagctcacccccatcttgcccttcctgttccttggcaatgagcaggatgctcaggacctggacaccatgcagcggctgaacatcggctacgtcatcaacgtcaccactcatcttcccctctaccactatgagaaaggcctgttcaactacaagcggctgccagccactgacagcaacaagcagaacctgcggcagtactttgaagaggcttttgagttcattgaggaagctcaccagtgtgggaaggggcttctcatccactgccaggctggggtgtcccgctccgccaccatcgtcatcgcttacttgatgaagcacactcggatgaccatgactgatgcttataaatttgtcaaaggcaaacgaccaattatctccccaaaccttaacttcatggggcagttgctagagttcgaggaagacctaaacaacggtgtgacaccgagaatccttacaccaaagctgatgggcgtggagacggttgtgtgacaatggtctggatggaaaggattgctgctctccattaggagacaatgaggaaggaggatggattctggttttttttctttctttttttttttgtagttgggagtaagtttgtgaatggaaacaaacttgtttaaacactttatttttaacaagtgtaagaagactataacttttgatgccattgagattcacctcccacaaactgacaaattaaggaggttaaagaagtaatttttttaagccaacaataaaaatataatacaacttgtttctcccccttttccttttaagctatttgtagagtttatgactaaatagtctgtgcaggttcatagaccgaagatactacacactttaaaccaattaaaaagaaccaaaagtaaatagaaaagacattgaatcaccaaggcctgggatcaacctgggctgtccacacagaaaacaaaaacccaaccaaaccaagccctgttgtgctcactggtgcaaagagaagatcagggcagcttaagtggtctaagaatccttcaggcattctttaaggagaaaaaggatacctttgattttgtgtgtttcatgctctggattttttttttttttccttctctgggtttaagagattttttttgaaatagtgaggaactgaccattatatgccttcactggcttcttgtgcaataatatgatgttttaagtgtgcaaacaagttagagctggcagctgaatgatagacaaatagtgcaaatttgccagcttggagatagaaaggaattcaacaatatatcaaatactttccttcccacctttttccttttttttttttttttctgatttgattctggttacagtgccataaaccttgttacatatgtatatcagaatgtaagaaaaaaaaatttatttaaaaatatttttcgcaaaaaaaaaaaaaatcttggtgtgtttctgttgattgtgtaaaaatttattttcattatataaatgaaactggttta

SEQ ID NO: 2052 - protein, 140 aa, Homo sapiens; identical to SEQ ID NO: 86

SEQ ID NO: 2053 - DNA, 1769 bp, Homo sapiens
ttacatttacagtgtagcaaaagagaaagtaactatgttgctgctggagatcaatgaagccgagtgaatgggggctgaatgtgcgagtccatagctgaagaggagcgccagatggtggaggaatacacttatttatgaagtggacttagtagttttaagcagaaccatgaaaacctctgtgacaactccctccagctccaagagtgccgggaggtggggggcggcgcatccgcggcctcgagcttgctacctcagcccatccccaccacccctgacatcgagaacgctgagctcacccccatcttgcccttcctgttccttggcaatgagcaggatgctcaggacctggacaccatgcagcggctgaacatcggctacgtcatcaacgtcaccactcatcttcccctctaccactatgagaaaggcctgttcaactacaagcggctgccagccactgacagcaacaagcagaacctgcggcagtactttgaagaggcttttgagttcattgaggaagctcaccagtgtgggaaggggcttctcatccactgccaggctggggtgtcccgctccgccaccatcgtcatcgcttacttgatgaagcacactcggatgaccatgactgatgcttataaatttgtcaaaggcaaacgaccaattatctccccaaaccttaacttcatggggcagttgctagagttcgaggaagacctaaacaacggtgtgacaccgagaatccttacaccaaagctgatgggcgtggagacggttgtgtgacaatggtctggatggaaaggattgctgctctccattaggagacaatgaggaaggaggatggattctggttttttttctttctttttttttttgtagttgggagtaagtttgtgaatggaaacaaacttgtttaaacactttatttttaacaagtgtaagaagactataacttttgatgccattgagattcacctcccacaaactgacaaattaaggaggttaaagaagtaatttttttaagccaacaataaaaatataatacaacttgtttctcccccttttccttttaagctatttgtagagtttatgactaaatagtctgtgcaggttcatagaccgaagatactacacactttaaaccaattaaaaagaaccaaaagtaaatagaaaagacattgaatcaccaaggcctgggatcaacctgggctgtccacacagaaaacaaaaacccaaccaaaccaagccctgttgtgctcactggtgcaaagagaagatcagggcagcttaagtggtctaagaatccttcaggcattctttaaggagaaaaaggatacctttgattttgtgtgtttcatgctctggattttttttttttttccttctctgggtttaagagattttttttgaaatagtgaggaactgaccattatatgccttcactggcttcttgtgcaataatatgatgttttaagtgtgcaaacaagttagagctggcagctgaatgatagacaaatagtgcaaatttgccagcttggagatagaaaggaattcaacaatatatcaaatactttccttcccacctttttccttttttttttttttttctgatttgattctggttacagtgccataaaccttgttacatatgtatatcagaatgtaagaaaaaaaaatttatttaaaaatatttttcgcaaaaaaaaaaaaaatcttggtgtgtttctgttgattgtgtaaaaatttattttcattatataaatgaaactggttta

SEQ ID NO: 2054 - protein, 140 aa, Homo sapiens; identical to SEQ ID NO: 86

SEQ ID NO: 2055 - DNA, 2697 bp, Homo sapiens
agcggtcggctttctccggattcttattggcccaacccgccgtcggtcggcggcgagtccgccccctcagaaccttacatttacagtgtagcaaaagagaaagtaactatgttgctgctggagatcaatgaagccgagtgaatgggggctgaatgtgcgagtccatagctgaagaggagcgccagatggtggaggaatacacttatttatgaaactgtcttgagttcttcttgaattgccagttttcagcctcctcatgcctccgtctcctttagacgacagggtagtagtggcactatctaggcccgtccgacctcaggatctcaacctttgtttagactctagttaccttggctctgccaacccaggcagtaacagccaccctcctgtcatcgccaccaccgttgtgtccctcaaggctgcgaatctgacgtatatgccctcatccagcggctctgcccgctcgctgaattgtggatgcagcagtgccagctgctgcactgtggcaacctacgacaaggacaatcaggcccaaacccaagccattgccgctggcaccaccaccactgccatcggaacctctaccacctgccctgctaaccagatggtcaacaataatgagaatacaggctctctaagtccatcaagtggggtgggcagccctgtgtcagggacccccaagcagctagccagcatcaaaataatctaccccaatgacttggcaaagaagatgaccaaatgcagcaagagtcacctgccgagtcagggccctgtcatcattgactgcaggcccttcatggagtacaacaagagtcacatccaaggagctgtccacattaactgtgccgataagatcagccggcggagactgcagcagggcaagatcactgtcctagacttgatttcctgtagggaaggcaaggactctttcaagaggatcttttccaaagaaattatagtttatgatgagaataccaatgaaccaagccgagtgatgccctcccagccacttcacatagtcctcgagtccctgaagagagaaggcaaagaacctctggtgttgaaaggtggacttagtagttttaagcagaaccatgaaaacctctgtgacaactccctccagctccaagagtgccgggaggtggggggcggcgcatccgcggcctcgagcttgctacctcagcccatccccaccacccctgacatcgagaacgctgagctcacccccatcttgcccttcctgttccttggcaatgagcaggatgctcaggacctggacaccatgcagcggctgaacatcggctacgtcatcaacgtcaccactcatcttcccctctaccactatgagaaaggcctgttcaactacaagcggctgccagccactgacagcaacaagcagaacctgcggcagtactttgaagaggcttttgagttcattgaggaagctcaccagtgtgggaaggggcttctcatccactgccaggctggggtgtcccgctccgccaccatcgtcatcgcttacttgatgaagcacactcggatgaccatgactgatgcttataaatttgtcaaaggcaaacgaccaattatctccccaaaccttaacttcatggggcagttgctagagttcgaggaagacctaaacaacggtgtgacaccgagaatccttacaccaaagctgatgggcgtggagacggttgtgtgacaatggtctggatggaaaggattgctgctctccattaggagacaatgaggaaggaggatggattctggttttttttctttctttttttttttgtagttgggagtaagtttgtgaatggaaacaaacttgtttaaacactttatttttaacaagtgtaagaagactataacttttgatgccattgagattcacctcccacaaactgacaaattaaggaggttaaagaagtaatttttttaagccaacaataaaaatataatacaacttgtttctcccccttttccttttaagctatttgtagagtttatgactaaatagtctgtgcaggttcatagaccgaagatactacacactttaaaccaattaaaaagaaccaaaagtaaatagaaaagacattgaatcaccaaggcctgggatcaacctgggctgtccacacagaaaacaaaaacccaaccaaaccaagccctgttgtgctcactggtgcaaagagaagatcagggcagcttaagtggtctaagaatccttcaggcattctttaaggagaaaaaggatacctttgattttgtgtgtttcatgctctggattttttttttttttccttctctgggtttaagagattttttttgaaatagtgaggaactgaccattatatgccttcactggcttcttgtgcaataatatgatgttttaagtgtgcaaacaagttagagctggcagctgaatgatagacaaatagtgcaaatttgccagcttggagatagaaaggaattcaacaatatatcaaatactttccttcccacctttttccttttttttttttttttctgatttgattctggttacagtgccataaaccttgttacatatgtatatcagaatgtaagaaaaaaaaatttatttaaaaatatttttcgcaaaaaaaaaaaaaatcttggtgtgtttctgttgattgtgtaaaaatttattttcattatataaatgaaactggttta

SEQ ID NO: 2056 - protein, 482 aa, Homo sapiens; identical to SEQ ID NO: 84

SEQ ID NO: 2057 - DNA, 2620 bp, Homo sapiens
agcggtcggctttctccggattcttattggcccaacccgccgtcggtcggcggcgagtccgccccctcagaaccttacatttacagtgtagcaaaagagaaagtaactatgttgctgctggagatcaatgaagccgagtgaatgggggctgaatgtgcgagtccatagctgaagaggagcgccagatggtggaggaatacacttatttatgaaactgtcttgagttcttcttgaattgccagttttcagcctcctcatgcctccgtctcctttagacgacagggtagtagtggcactatctaggcccgtccgacctcaggatctcaacctttgtttagactctagttaccttggctctgccaacccaggcagtaacagccaccctcctgtcatcgccaccaccgttgtgtccctcaaggctgcgaatctgacgtatatgccctcatccagcggctctgcccgctcgctgaattgtggatgcagcagtgccagctgctgcactgtggcaacctacgacaaggacaatcaggcccaaacccaagccattgccgctggcaccaccaccactgccatcggaacctctaccacctgccctgctaaccagatggtcaacaataatgagaatacaggctctctaagtccatcaagtggggtgggcagccctgtgtcagggacccccaagcagctagccagcatcaaaataatctaccccaatgacttggcaaagaagatgaccaaatgcagcaagagtcacctgccgagtcagggccctgtcatcattgactgcaggcccttcatggagtacaacaagagtcacatccaaggagctgtccacattaactgtgccgataagatcagccggcggagactgcagcagggcaagatcactgtcctagacttgatttcctgtagggaaggcaaggactctttcaagaggatcttttccaaagaaattatagtttatgatgagaataccaatgaaccaagccgagtgatgccctcccagccacttcacatagtcctcgagtccctgaagagagaaggcaaagaacctctggtgttgaaaggtggacttagtagttttaagcagaaccatgaaaacctctgtgacaactccctccagctccaagagtgccgggaggtggggggcggcgcatccgcggcctcgagcttgctacctcagcccatccccaccacccctgacatcgagaacgctgagctcacccccatcttgcccttcctgttccttggcaatgagcaggatgctcaggacctggacaccatgcagcggctgaacatcggctacgtcatcaacgtcaccactcatcttcccctctaccactatgagaaaggcctgttcaactacaagcggctgccagccactgacagcaacaagcagaacctgcggcagtactttgaagaggcttttgagttcattgaggaagctcaccagtgtgggaaggggcttctcatccactgccaggctggggtgtcccgctccgccaccatcgtcatcgcttacttgatgaagcacactcggatgaccatgactgatgcttataaatttgtcaaaggcaaacgaccaattatctccccaaaccttaacttcatggggcagttgctagagttcgaggaagacctaaacaacggtgtgacaccgagaatccttacaccaaagctgatgggcgtggagacggttgtgtgacaatggtctggatggaaaggattgctgctctccattaggagacaatgaggaaggaggatggattctggttttttttctttctttttttttttgtagttgggagtaagtttgtgaatggaaacaaacttgtttaaacactttatttttaacaagtgtaagaagactataacttttgatgccattgagattcacctcccacaaactgacaaattaaggaggttaaagaagtaatttttttaagccaacaataaaaatataatacaacttgtttctcccccttttccttttaagctatttgtagagtttatgactaaatagtctgtgcaggttcatagaccgaagatactacacactttaaaccaattaaaaagaaccaaaagtaaatagaaaagacattgaatcaccaaggcctgggatcaacctgggctgtccacacagaaaacaaaaacccaaccaaaccaagccctgttgtgctcactggtgcaaagagaagatcagggcagcttaagtggtctaagaatccttcaggcattctttaaggagaaaaaggatacctttgattttgtgtgtttcatgctctggattttttttttttttccttctctgggtttaagagattttttttgaaatagtgaggaactgaccattatatgccttcactggcttcttgtgcaataatatgatgttttaagtgtgcaaacaagttagagctggcagctgaatgatagacaaatagtgcaaatttgccagcttggagatagaaaggaattcaacaatatatcaaatactttccttcccacctttttccttttttttttttttttctgatttgattctggttacagtgccataaaccttgttacatatgtatatcagaatgtaagaaaaaaaaatttatttaaaaatatttttcgc

SEQ ID NO: 2058 - protein, 482 aa, Homo sapiens; identical to SEQ ID NO: 84

SEQ ID NO: 2059 - DNA, 1085 bp, Homo sapiens
gtataaacaaaatagtatgcaacttacagcaatgtctctcccacttataataaaacacctaactctcatgtagcattttatccatattgagagctctgtgagatagaaattattatattacaagtcacagatatgtaaactgagatgcagagacatcaataacttgctcaaggttacaaggtggacttagtagttttaagcagaaccatgaaaacctctgtgacaactccctccagctccaagagtgccgggaggtggggggcggcgcatccgcggcctcgagcttgctacctcagcccatccccaccacccctgacatcgagaacgctgagctcacccccatcttgcccttcctgttccttggcaatgagcaggatgctcaggacctggacaccatgcagcggctgaacatcggctacgtcatcaacgtcaccactcatcttcccctctaccactatgagaaaggcctgttcaactacaagcggctgccagccactgacagcaacaagcagaacctgcggcagtactttgaagaggcttttgagttcattgaggaagctcaccagtgtgggaaggggcttctcatccactgccaggctggggtgtcccgctccgccaccatcgtcatcgcttacttgatgaagcacactcggatgaccatgactgatgcttataaatttgtcaaaggcaaacgaccaattatctccccaaaccttaacttcatggggcagttgctagagttcgaggaagacctaaacaacggtgtgacaccgagaatccttacaccaaagctgatgggcgtggagacggttgtgtgacaatggtctggatggaaaggattgctgctctccattaggagacaatgaggaaggaggatggattctggttttttttctttctttttttttttgtagttgggagtaagtttgtgaatggaaacaaacttgtttaaacactttatttttaacaagtgtaagaagactataacttttgatgccattgagattcacctcccacaaactgacaaattaaggaggttaaagaagtaatttttttaagccaacaataaaaatataatacaactt

SEQ ID NO: 2060 - protein, 140 aa, Homo sapiens; identical to SEQ ID NO: 86

SEQ ID NO: 2061 - DNA, 1014 bp, Homo sapiens
aactatgttgctgctggagatcaatgaagccgagtgaatgggggctgaatgtgcgagtccatagctgaagaggagcgccagatggtggaggaatacacttatttatgaagtggacttagtagttttaagcagaaccatgaaaacctctgtgacaactccctccagctccaagagtgccgggaggtggggggcggcgcatccgcggcctcgagcttgctacctcagcccatccccaccacccctgacatcgagaacgctgagctcacccccatcttgcccttcctgttccttggcaatgagcaggatgctcaggacctggacaccatgcagcggctgaacatcggctacgtcatcaacgtcaccactcatcttcccctctaccactatgagaaaggcctgttcaactacaagcggctgccagccactgacagcaacaagcagaacctgcggcagtactttgaagaggcttttgagttcattgaggaagctcaccagtgtgggaaggggcttctcatccactgccaggctggggtgtcccgctccgccaccatcgtcatcgcttacttgatgaagcacactcggatgaccatgactgatgcttataaatttgtcaaaggcaaacgaccaattatctccccaaaccttaacttcatggggcagttgctagagttcgaggaagacctaaacaacggtgtgacaccgagaatccttacaccaaagctgatgggcgtggagacggttgtgtgacaatggtctggatggaaaggattgctgctctccattaggagacaatgaggaaggaggatggattctggttttttttctttctttttttttttgtagttgggagtaagtttgtgaatggaaacaaacttgtttaaacactttatttttaacaagtgtaagaagactataacttttgatgccattgagattcacctcccacaaactgacaaattaaggaggttaaagaagtaatttttttaagccaacaataaaaatataatacaactt

SEQ ID NO: 2062 - protein, 140 aa, Homo sapiens; identical to SEQ ID NO: 86

SEQ ID NO: 2063 - DNA, 1972 bp, Homo sapiens
agcggtcggctttctccggattcttattggcccaacccgccgtcggtcggcggcgagtccgccccctcagaaccttacatttacagtgtagcaaaagagaaagtaactatgttgctgctggagatcaatgaagccgagtgaatgggggctgaatgtgcgagtccatagctgaagaggagcgccagatggtggaggaatacacttatttatgaaactgtcttgagttcttcttgaattgccagttttcagcctcctcatgcctccgtctcctttagacgacagggtagtagtggcactatctaggcccgtccgacctcaggatctcaacctttgtttagactctagttaccttggctctgccaacccaggcagtaacagccaccctcctgtcatcgccaccaccgttgtgtccctcaaggctgcgaatctgacgtatatgccctcatccagcggctctgcccgctcgctgaattgtggatgcagcagtgccagctgctgcactgtggcaacctacgacaaggacaatcaggcccaaacccaagccattgccgctggcaccaccaccactgccatcggaacctctaccacctgccctgctaaccagatggtcaacaataatgagaatacaggctctctaagtccatcaagtggggtgggcagccctgtgtcagggacccccaagcagctagccagcatcaaaataatctaccccaatgacttggcaaagaagatgaccaaatgcagcaagagtcacctgccgagtcagggccctgtcatcattgactgcaggcccttcatggagtacaacaagagtcacatccaaggagctgtccacattaactgtgccgataagatcagccggcggagactgcagcagggcaagatcactgtcctagacttgatttcctgtagggaaggcaaggactctttcaagaggatcttttccaaagaaattatagtttatgatgagaataccaatgaaccaagccgagtgatgccctcccagccacttcacatagtcctcgagtccctgaagagagaaggcaaagaacctctggtgttgaaaggtggacttagtagttttaagcagaaccatgaaaacctctgtgacaactccctccagctccaagagtgccgggaggtggggggcggcgcatccgcggcctcgagcttgctacctcagcccatccccaccacccctgacatcgagaacgctgagctcacccccatcttgcccttcctgttccttggcaatgagcaggatgctcaggacctggacaccatgcagcggctgaacatcggctacgtcatcaacgtcaccactcatcttcccctctaccactatgagaaaggcctgttcaactacaagcggctgccagccactgacagcaacaagcagaacctgcggcagtactttgaagaggcttttgagttcattgaggaagctcaccagtgtgggaaggggcttctcatccactgccaggctggggtgtcccgctccgccaccatcgtcatcgcttacttgatgaagcacactcggatgaccatgactgatgcttataaatttgtcaaaggcaaacgaccaattatctccccaaaccttaacttcatggggcagttgctagagttcgaggaagacctaaacaacggtgtgacaccgagaatccttacaccaaagctgatgggcgtggagacggttgtgtgacaatggtctggatggaaaggattgctgctctccattaggagacaatgaggaaggaggatggattctggttttttttctttctttttttttttgtagttgggagtaagtttgtgaatggaaacaaacttgtttaaacactttatttttaacaagtgtaagaagactataacttttgatgccattgagattcacctcccacaaactgacaaattaaggaggttaaagaagtaatttttttaagccaacaataaaaatataatacaactt

SEQ ID NO: 2064 - protein, 482 aa, Homo sapiens; identical to SEQ ID NO: 84

SEQ ID NO: 2065 - DNA, 737 bp, Homo sapiens
gaggcaatgagaacaccctggcagggcagctgagctgggtggatccttgttctgtcaccaagcctttaagtcatatgctgacatgttacagtcctgcctgggaccctgcccacaaatacttaagatacacgactttgggaatcacccaactgatggaaagaaccaggaaaggggtcaggatctgcaccttggcaaactttgaagaacacccaatttgatgaatgaaaactcctcacttgtgctctggtggtgttttaggacaatgggcccctcctggatgctccagtgaagccccatatcacctttttccttcctgtttgccatagctccaggtgtagggacagatcagaagattctggaaaaggcagatcaccaaagaactcaagatgtactgatattttgccagtttccttcatcaacaacttgtcttctttaccaactaagggcaaacaaagagaacaaactaaaaaaaaaaaaaaaagaaaagaaaagaattaaataattaaacaaagaacttaaataagaaggtaagaccccccccccaaatctcccaagatagtgagaaatgtatttgcgtcatgtctgcctaacaatgagctattattaggatggtagaaaatagcagcaagtaaggactacagatttcacccagaggcagagcagacaaaagagacaacagtttcctgggaaaggaagatgattccagtttaattcatccaacaaaactcttccaagaa

SEQ ID NO: 2066 - protein, 47 aa, Homo sapiens
MLTCYSPAWDPAHKYLRYTTLGITQLMERTRKGVRICTLANFEEHPI

SEQ ID NO: 2067 - DNA, 5911 bp, Homo sapiens
gcactggggtcagtcacagggcagacggagaaaggggaactgtgggcatcaacctaccaactggtgaatgttccatctttggatattttgtggatatagagcaatgtgaattcataccttggtcagatttagttcctaatgatcagacactaattcaaagaggaacttcattactaactaatcttcaaagatctggcggaaacttcttgaagataacagaatgtggagaatgcattaattataccgctaccagagacacaacatgcctttcttttctcatgagccttcttttaaagaattcctgccctgtacttctcacaggagaatctggtgttgggaaaactgctgccattaatcaaatgcttgaaaagctagagggtccaggagcatttgacataaaacatggttcaattttaggagacaccctattatatagtgaaataaaaaaatcaagtagcctaaaacagaatatcaccatcttgattcctgaaactcataagacagcaactggaagttcagataatcccactaaaaagccagaagttagaactaataaaaagttacttaaaaataatgatcataaaggagttgtagtctctacaataaattttagcaccaatgtaacagctgccaaaaccaaggagatgattcttaagaagttaataagaagaactaaagatactcttggagcaccaaaaaacaaccggattctaatatttattgatgatatgaatatgccagtatcagatatgtatggagcacagccacccctggaattgataagacaattgttagatttgggaggagtttatgatactgaaaaaaatacatggaagaatattcaagatctgtctatagttgcagcttgtgttccagttgtgaatgatatcagcccacgtcttctcaaacacttttccatgctggtattacctcatccttcacaagacatcttatgtactattttccaggctcatttgggaatttatttctccatcaataacttcacacctgaagttcagaaaagtaaggatcagataatatcttgttccctagctatataccatcaagtacgtcagaatatgttaccaactccaacaaaatgtcactacatgtttaatcttcgagatatgtttaagcttctcctaggattgctgcaagctgacaggactgttgttaactccaaagagatggctgctctgctctttgttcatgaagccacccgagtatttcacgatcgcttaattgatttcactgataaaagccttttctatcggttgctttcaagggaacttgagaactgttttcagattggaatagatggatgtgggaaaaaaacatgtgcaaccttggcctgttatttgacagataataaactataccgagtgcctatatctcacaaatgtgcctacatcgaattcaaagaagtctttaaaaaggtgtttattcacgcaggattaaaagggaaacccactgttctgatggttcccaatttaaacatagaacaagacttcgagatcattggatctgtttcccacactttccaggcttcttctggccatatcattgcttttcatgtgactcaaaaagaatgcccagattcagattctgcaatgcctgtgtctcttcactatgctgtccacatggtggaacagcagatttccgtgaaggaaaacagtctccattctgcataccagattctatgggatcgcttccatatgggtctatccacaatcctggaagcaaccactctagttacagaaatgcaagaagagctcttgattcttggccctcaagtagaacaaaaaacaaaggaaacagaaactctaatggaaaaactacggaaagattcacaagtagttgagaaagttcagatgcttgttaaacaggatgaagaaattgtggcagaagaagtaagaattgtggaagattatgctcagaaaactgccaatgaactaaaaagtgtgctgccagcctttgacaaggcaattgtggctctgaatgccctggataaagctgatgtcgctgaattaagagtatacacacggcctcccttccttgtactgactgtcatgaatgcagtgtgtattcttctgcaaaagaaacctaactgggcaacggcaaagttacttctttcagaaactggtttcctgaaaaaattgattaaccttgacaaggacagcatacctgataaggttttcgtgaagctaaaaaaaattgtaaccttacctgatttcaacccacacaagatttcgctggtttctgttgcttgttgctccctgtgccagtgggttatagctttgaataactaccatgaagtacagaaggttgtgggccctaaacaaatccaagtagctgaagctcaaaacgtccttaaaattgcgcgacaaagacttgctgagaaacaaagaggtttacagctgatcagccgatggcataatcagggactgcctcatggtcagtattcagtagagaatgccatcttgatcaagaatggccagcagtggccactgctgattgacccacataggcaagctcacaaatggatccgtcagatggaaggatccaggctgcagaagctctccattgaagacagcaattataccaaaaaaattgaaaatgctatgaagacaggagggagtgtcctcctgcagaatctccttgagacattagctccaggcttaaaggcaattctgaaaaaggatatctatcagaaaaaaggacactatttcataagggttggtgatgctgagttcgaatacaattcaaattttaggttatacttatctacagaaatagacaacccccattttcttccatcagtttataactttgttactatgatcaacttcactgtaacattccaaggtttgcaagatcaactcttgtctactgtggtaactcatgaagttcctcatttagaagatcaacgttccaagttactggagagtatttcccttgatgccataactcttgaagaactagaggaaaaaacattaaatttactgcagaaagcactaggatccatattagatgatgacaaaattgtagataccttaagaaaatccaaaatgacatcaaacgaaatttcaaagcgcatcgaagcaacaaaaaaagctgaaagtgaaatccaagcaatacgtaaaaactatctccccattgcgacccgaggcgccctgctctacttcctagtagctgatctcacacaaatcaactacatgtaccagttctccctagactggtttcatcaggtttttgtttcatcagtagtttccaaaagcaaagaacaagaacatagttttaaaagggagaaagtgtctccaaaagaagttcatgagtttataagtatttcaaaagaacccaacctggaaaatgagaaaaatctcttagataagcatattaaaagtgcaatagacatgttgacaaaaagtatttttaaggtaaaagttcttagaccagaaagtttaaacaattcagtgagaaagtttataactgaaaaaatgggaaataagtatcttcaaagaactggagttaatttgaaagatgcatataaaggatccaatgccagaactccgctgatacttattcaaactcatgggatcgaccttaccaatatcctcctgagatttgcacaagagttaaaaggaacaacacatcatgtgaccataatttctctgggccgtgaccaagcagctaaagctgaagacctcattttaaaggcactaacaaaaacacaacaatgggtcttcctccagaactgccatcttgcaacatcatttatgccaaggctttgcacaattgtagaatcttttaatagtccaaacgtgacaatagaccctgagtttcggctatggttaagctcaaaatcatacagttcttttccaattcctgttcttaaaaagggtttaaagattgccgtggaatctccccagggattgaaaagtaacttacttcagacatttggatgtactgggagtggagaggtaacagaagagatatttgaaaatcctgactgtggacaatggtggaaaaaacttttatttagcctatgttttttcaatgctgtaatcaatgaaagaaaaaattacggaatattgggctggaatattgcttataaatttaattcttcagacttgggggttgccattaaggtgttggaaaattccctgagaggacagcccagcatttcgtggcaagcactgcgctacctgattggagaagtgatttacggtggccgggtgattgataattgggacaagcgatgcttgaagaccctactctacaaattttgtaatcctgaagtgctgaaagatgacttcagtttctccagtgatgggatatgtctgccagttccaggatctgcaagcataaaggactacatacacattatccagtccttacctgatgatgaccttcccgaggtcttaggaatacacccagaggccatcaggagctgctgggagacccagggcgaaaagtttattgaaaatctgattgccatgcaaccaaaaactaccactgccaacctcatgatcagacctgagcagagtaaggatgaactggtgatggaaattctatccgacttgctaaagcggctgccactgacagtggagaaagaagaaattgctgttggaactccaagcacattgaagagcatgatgtcaagctccatttgggagtctctttctaaaaatctcaaagatcacgacccccttatccattgtgtcttgctaacctttttgaagcaagaaattaaacgatttgataagttattatttgtcatacataaatccttaaaagatcttcagcttgctataaaaggagagatcatcctcacccaagaattggaggaaatatttaactcttttcttaatatgagagtgcctacattgtggcagaaacacgcctacagatcttgtaagccactgagttcctggattgatgatctcatccagcgactgaatttcttcaatacttgggccaaagtggcttatactgcaatacagcgtcggtatatgagatttgtcacagtttggaagcagtctattccatcaactagccaaaaatgcaaacaccctgaggattcagagaacaatttctttgaagggtttccttcaagatactggctcccagctttcttctttccacaagcctttcttgctgctgtgcttcaagactatgggaggtcccgaggaatcgctgtggatgccctcaccttcacccaccatgtgatttccaacaccactgacaaggatgagaagttctccgtatttatgccaaagaaactcaacatagtcaggagagcgtttaagggctcagcttcctctcacactggagtttacatttttggtttattcatcgagggggcaagatggaatcgtgaacagaaaatactggaagactcgctgcctctggagatgtgctgtgattttcccgacatatactttttgccaacaaagatttctaccaaaacaccaaatgcttccaaccagacagattcagaactctatgcttttgaatgcccagtttaccagacacctgagaggtcaagaattttggcaactaccggtttaccaacaaactttttaacatcagtgtatttatcaacgaagaaacctcctagtcactggatcacaatgcgggttgcattgctttgtgagaagaatgaaaaataaatgtccatatcaaaccattttaatttttgactctaatcagacttacatgtttcaagacattcacatgtagtcaacaccctttataaaatatttgtgtgttcagccagactgggcaggtgcagtctatttcatttgtacatgaaaacttcaacacagaggggaatcttgcagctgctttttattctaagtacatgagacctgactgtgcaatgtccctgtggttgggctctagtacaggt

SEQ ID NO: 2068 - protein, 1797 aa, Homo sapiens
MSLLLKNSCPVLLTGESGVGKTAAINQMLEKLEGPGAFDIKHGSILGDTLLYSEIKKSSSLKQNITILIPETHKTATGSSDNPTKKPEVRTNKKLLKNNDHKGVVVSTINFSTNVTAAKTKEMILKKLIRRTKDTLGAPKNNRILIFIDDMNMPVSDMYGAQPPLELIRQLLDLGGVYDTEKNTWKNIQDLSIVAACVPVVNDISPRLLKHFSMLVLPHPSQDILCTIFQAHLGIYFSINNFTPEVQKSKDQIISCSLAIYHQVRQNMLPTPTKCHYMFNLRDMFKLLLGLLQADRTVVNSKEMAALLFVHEATRVFHDRLIDFTDKSLFYRLLSRELENCFQIGIDGCGKKTCATLACYLTDNKLYRVPISHKCAYIEFKEVFKKVFIHAGLKGKPTVLMVPNLNIEQDFEIIGSVSHTFQASSGHIIAFHVTQKECPDSDSAMPVSLHYAVHMVEQQISVKENSLHSAYQILWDRFHMGLSTILEATTLVTEMQEELLILGPQVEQKTKETETLMEKLRKDSQVVEKVQMLVKQDEEIVAEEVRIVEDYAQKTANELKSVLPAFDKAIVALNALDKADVAELRVYTRPPFLVLTVMNAVCILLQKKPNWATAKLLLSETGFLKKLINLDKDSIPDKVFVKLKKIVTLPDFNPHKISLVSVACCSLCQWVIALNNYHEVQKVVGPKQIQVAEAQNVLKIARQRLAEKQRGLQLISRWHNQGLPHGQYSVENAILIKNGQQWPLLIDPHRQAHKWIRQMEGSRLQKLSIEDSNYTKKIENAMKTGGSVLLQNLLETLAPGLKAILKKDIYQKKGHYFIRVGDAEFEYNSNFRLYLSTEIDNPHFLPSVYNFVTMINFTVTFQGLQDQLLSTVVTHEVPHLEDQRSKLLESISLDAITLEELEEKTLNLLQKALGSILDDDKIVDTLRKSKMTSNEISKRIEATKKAESEIQAIRKNYLPIATRGALLYFLVADLTQINYMYQFSLDWFHQVFVSSVVSKSKEQEHSFKREKVSPKEVHEFISISKEPNLENEKNLLDKHIKSAIDMLTKSIFKVKVLRPESLNNSVRKFITEKMGNKYLQRTGVNLKDAYKGSNARTPLILIQTHGIDLTNILLRFAQELKGTTHHVTIISLGRDQAAKAEDLILKALTKTQQWVFLQNCHLATSFMPRLCTIVESFNSPNVTIDPEFRLWLSSKSYSSFPIPVLKKGLKIAVESPQGLKSNLLQTFGCTGSGEVTEEIFENPDCGQWWKKLLFSLCFFNAVINERKNYGILGWNIAYKFNSSDLGVAIKVLENSLRGQPSISWQALRYLIGEVIYGGRVIDNWDKRCLKTLLYKFCNPEVLKDDFSFSSDGICLPVPGSASIKDYIHIIQSLPDDDLPEVLGIHPEAIRSCWETQGEKFIENLIAMQPKTTTANLMIRPEQSKDELVMEILSDLLKRLPLTVEKEEIAVGTPSTLKSMMSSSIWESLSKNLKDHDPLIHCVLLTFLKQEIKRFDKLLFVIHKSLKDLQLAIKGEIILTQELEEIFNSFLNMRVPTLWQKHAYRSCKPLSSWIDDLIQRLNFFNTWAKVAYTAIQRRYMRFVTVWKQSIPSTSQKCKHPEDSENNFFEGFPSRYWLPAFFFPQAFLAAVLQDYGRSRGIAVDALTFTHHVISNTTDKDEKFSVFMPKKLNIVRRAFKGSASSHTGVYIFGLFIEGARWNREQKILEDSLPLEMCCDFPDIYFLPTKISTKTPNASNQTDSELYAFECPVYQTPERSRILATTGLPTNFLTSVYLSTKKPPSHWITMRVALLCEKNEK

SEQ ID NO: 2069 - DNA, 1645 bp, Homo sapiens
ggggatcttgggaagctgggggagctgggggaactgggggagcagggggatccaggggagctggtggaggtggaggagctggcccgtgcctgctgcctgtttggtggcccagcctgtggtggaagacagcagtttttcttctttgctgggggaagaagggcgagaaatgaagagatgtgtattaactatgaggacagatgttttgattgtgatggattgttagaatggattcatcagtctttgagtagcttctaatttagatacgaccttctgccactttccagtgggattttacagacttgtttaattattctcatcattattagagaaaatgaagtaccttgtggttccatttttagagaatttgggggaaagcaggaaaaaatacattgtagtgataataaaaatatctaatactgtgtactattattatccacaggttttaaccacattctgccttatttctacataatttatttcaccatgttgcttgtccaccgagaagctcgtgacgagtaccactgtaagaagaaatacggcgtggcttgggaaaagtactgtcagcgtgtgccctaccgtatatttccatacatctactaatgctcttctggcttttctacaaaatactcctgcaattccagctgccatttgcaaaaacaaggaaaaaaatccgaaactttcttttgttgcactgacagggtctgtacttttttttttctttttgagtcaggactatggagccgagtagttgatcttttaatatagccgtgtttacttgtattaacttacagttaacataggaaaaatacaagtaaggatgtgagaatttgccatttcaggctaatatttttatatatttttgactttttaaaagttcatcagtgtttttgctactgttaagcttatgcagtttatactgtattttttatgtatcctttatatttaccaaacctgactccctgtaaaggagtgctgtcttaaaaacaactgaaggggttaaagtcgtttcttttagtttaatagatgtgcataaggtagctttagcaattaaattctagtgaagttgatatagtctcatttttaattgtcctgtaatggaacagtagcaaattcactaaacttttgtgttcagagttaaattgttctcagtactttcaatgtaggggaatgtaataaacatagtgtgtatgtttgggttttaattacacattttatatatgagccatttagatatgcagtgttaattctatactgcatttgaagtgtatgtaacttagcttatgttaatgcagtcatgaagttggtttgctccagcatccggtagtctttaaacattcttttagtgaaattgtcattgttttatcagtgctaatgtgtgcaagcagtttttttattttgcttttctcctggcatcagaaagtggtggcgttttctgtactggattgcaccaaggaagcttttggggaggaaggaaggacattaaattctttccctggtaatgaaaagagccctttatcaatacagtgctgcaatttctggatatcagctacactttgtttttaagtttgtttttgacatgtttatttggcaaattttataatgaagttttaagttgaaaataaaatgtagcaacattttgatcact

SEQ ID NO: 2070 - protein, 63 aa, Homo sapiens
MCASSFFILLFSWHQKVVAFSVLDCTKEAFGEEGRTLNSFPGNEKSPLSIQCCNFWISATLCF

SEQ ID NO: 2071 - DNA, 2127 bp, Homo sapiens
gtctcgacatcattaaaaatgtacttttatttttatatagatttaaaaaccattcatacttcaacgggaaaaaatcttctagtttctggatggtggggctttgttcgccaccccaattacttgggtgatctcatcatggccttggcgtggtccctcccatgtggttttaaccacattctgccttatttctacataatttatttcaccatgttgcttgtccaccgagaagctcgtgacgagtaccactgtaagaagaaatacggcgtggcttgggaaaagtactgtcagcgtgtgccctaccgtatatttccatacatctactaatgctcttctggcttttctacaaaatactcctgcaattccagctgccatttgcaaaaacaaggaaaaaaatccgaaactttcttttgttgcactgacagggtctgtacttttttttttctttttgagtcaggactatggagccgagtagttgatcttttaatatagccgtgtttacttgtattaacttacagttaacataggaaaaatacaagtaaggatgtgagaatttgcattttaatgggaaattttcaacccttaatctgaaaacagaagacagtcttaatataaatgtactgtgaagaatgctattgatgtttatggtttctgattacttttcaaattttgatgtttttttgccagttggcttttcttaaatgaaaacactgttccatttaaagtacatttatgttttattcagtaagagaatagaattttcatttgtttttctttaaatcctttactaattatataatttgaaagcaaaaagaagggcctatattaaatgctgaaagtgaaaagtgatgacattattagcagacactgcttaaaggagaccatttgtagcagttggcttaacctcaacttctaaaactacattgaaaatgtaaatacatagcttagttttttgtaatatatggtgacttcagatttttttgtacagtattttgaatgtgagatgattgtcaggactaactgtctttttaacaaaacattttcagtattttaaataaaattttgtaaagtaatgtgaattaaaaattttggaacaattagaattcattcactattgtatagaagatgctgttaaaacataggaagggtatttttcttgatccaaagtttgtgaatttggctttgctacctcaattgcaggtgtttgtttgcctttataaactgttgcaaatagaaaaaaaatagaataagtatatatttttggagtaacatcaatatttaaacatttttacacagatcggtgtttgaaaatttgccatttcaggctaatatttttatatatttttgactttttaaaagttcatcagtgtttttgctactgttaagcttatgcagtttatactgtattttttatgtatcctttatatttaccaaacctgactccctgtaaaggagtgctgtcttaaaaacaactgaaggggttaaagtcgtttcttttagtttaatagatgtgcataaggtagctttagcaattaaattctagtgaagttgatatagtctcatttttaattgtcctgtaatggaacagtagcaaattcactaaacttttgtgttcagagttaaattgttctcagtactttcaatgtaggggaatgtaataaacatagtgtgtatgtttgggttttaattacacattttatatatgagccatttagatatgcagtgttaattctatactgcatttgaagtgtatgtaacttagcttatgttaatgcagtcatgaagttggtttgctccagcatccggtagtctttaaacattcttttagtgaaattgtcattgttttatcagtgctaatgtgtgcaagcagtttttttattttgcttttctcctggcatcagaaagtggtggcgttttctgtactggattgcaccaaggaagcttttggggaggaaggaaggacattaaattctttccctggtaatgaaaagagccctttatcaatacagtgctgcaatttctggatatcagctacactttgtttttaagtttgtttttgacatgtttatttggcaaattttataatgaagttttaagttgaaaataaaatgtagcaacattttgatcact

SEQ ID NO: 2072 - protein, 101 aa, Homo sapiens
MYFYFYIDLKTIHTSTGKNLLVSGWWGFVRHPNYLGDLIMALAWSLPCGFNHILPYFYIIYFTMLLVHREARDEYHCKKKYGVAWEKYCQRVPYRIFPYIY

SEQ ID NO: 2073 - DNA, 3825 bp, Homo sapiens
gaagcgccgcgaggcggggccggggaggcgcgcgcccggcttgcgggactgcggggcgcgagagcgcggccgggtagcgtcgcgcgcgtggatctgccgccgggttgctgtgcgactattctccgggagccgtccgtgtcaccgccggaacctggcgcaggttaattatagaaaatgccaagtaggaaatttgccgatggtgaagtggtaagaggtcgatggcctgggagttcactttattatgaagtagaaattctgagccacgacagcacctcccagctttacactgtgaagtataaagatggaacagagcttgaattgaaagagaatgatattaagcctttaacttcctttaggcaaaggaaaggtggctcaacttccagttccccttccagacgccgagggagtcgatcaaggtcacgctcccgatcccctggtcgaccacctaaaagtgcccgccgatctgcttctgcttcccaccaggccgacattaaggaagcaaggagggaagtggaagttaaattgactccgctgattctgaagccatttggaaatagcatcagcagatataatggggagcctgagcatattgagagaaatgacgcacctcataaaaatacacaggaaaaattcagtttgtcacaagaaagcagttacatagcaacacagtatagccttcgtccaagaagagaagaagtcaaattaaaagaaatagattctaaggaagaaaaatacgttgcaaaagaactggcagtgagaacctttgaagtgacccccatccgggcaaaggacttggagtttggaggagtacctggtgtgtttctcatcatgtttggcctgcctgtgttcctcttcctgttgctgttgatgtgtaaacagaaagatcccagtcttctgaatttccctcctcctttgccagctttgtatgagttatgggaaaccagagtatttggggtctacctcctgtggtttttgattcaagtcctgttctacctactgccaattggaaaggttgtagaaggaacgcctcttattgatggaagaagactcaagtatagattaaatggattctatgcttttatcctgacatctgcagtcatcggaacatctctcttccagggcgtagagtttcattacgtgtacagtcattttcttcagtttgcacttgcggccactgttttttgtgtggtcttgagtgtgtatctctacatgcgctctttgaaagcgccccggaatgacctgtcgcctgccagctctggaaatgctgtctatgatttcttcattggccgtgaattaaaccctcgaattggtacttttgatctcaaatacttttgtgaattgcgccccggattgattggatgggtggttattaacttggtgatgcttttggctgaaatgaaaatacaggaccgcgctgttccatccttggccatgattttagttaatagtttccagcttctctatgtggtggatgctctctggaatgaggaagcgttgttgacgaccatggacatcatccacgatggatttggattcatgctggcttttggagacttggtgtgggttccctttatttacagcttccaagccttttatttagtcagtcatccaaatgaagtgtcttggccaatggcttctctaattattgttctgaaactttgtggttatgtaatcttccgaggtgcaaattctcagaaaaatgcattccggaaaaatcccagtgatccaaagcttgcacatttaaaaaccattcatacttcaacgggaaaaaatcttctagtttctggatggtggggctttgttcgccaccccaattacttgggtgatctcatcatggccttggcgtggtccctcccatgtggttttaaccacattctgccttatttctacataatttatttcaccatgttgcttgtccaccgagaagctcgtgacgagtaccactgtaagaagaaatacggcgtggcttgggaaaagtactgtcagcgtgtgccctaccgtatatttccatacatctactaatgctcttctggcttttctacaaaatactcctgcaattccagctgccatttgcaaaaacaaggaaaaaaatccgaaactttcttttgttgcactgacagggtctgtacttttttttttctttttgagtcaggactatggagccgagtagttgatcttttaatatagccgtgtttacttgtattaacttacagttaacataggaaaaatacaagtaaggatgtgagaatttgcattttaatgggaaattttcaacccttaatctgaaaacagaagacagtcttaatataaatgtactgtgaagaatgctattgatgtttatggtttctgattacttttcaaattttgatgtttttttgccagttggcttttcttaaatgaaaacactgttccatttaaagtacatttatgttttattcagtaagagaatagaattttcatttgtttttctttaaatcctttactaattatataatttgaaagcaaaaagaagggcctatattaaatgctgaaagtgaaaagtgatgacattattagcagacactgcttaaaggagaccatttgtagcagttggcttaacctcaacttctaaaactacattgaaaatgtaaatacatagcttagttttttgtaatatatggtgacttcagatttttttgtacagtattttgaatgtgagatgattgtcaggactaactgtctttttaacaaaacattttcagtattttaaataaaattttgtaaagtaatgtgaattaaaaattttggaacaattagaattcattcactattgtatagaagatgctgttaaaacataggaagggtatttttcttgatccaaagtttgtgaatttggctttgctacctcaattgcaggtgtttgtttgcctttataaactgttgcaaatagaaaaaaaatagaataagtatatatttttggagtaacatcaatatttaaacatttttacacagatcggtgtttgaaaatttgccatttcaggctaatatttttatatatttttgactttttaaaagttcatcagtgtttttgctactgttaagcttatgcagtttatactgtattttttatgtatcctttatatttaccaaacctgactccctgtaaaggagtgctgtcttaaaaacaactgaaggggttaaagtcgtttcttttagtttaatagatgtgcataaggtagctttagcaattaaattctagtgaagttgatatagtctcatttttaattgtcctgtaatggaacagtagcaaattcactaaacttttgtgttcagagttaaattgttctcagtactttcaatgtaggggaatgtaataaacatagtgtgtatgtttgggttttaattacacattttatatatgagccatttagatatgcagtgttaattctatactgcatttgaagtgtatgtaacttagcttatgttaatgcagtcatgaagttggtttgctccagcatccggtagtctttaaacattcttttagtgaaattgtcattgttttatcagtgctaatgtgtgcaagcagtttttttattttgcttttctcctggcatcagaaagtggtggcgttttctgtactggattgcaccaaggaagcttttggggaggaaggaaggacattaaattctttccctggtaatgaaaagagccctttatcaatacagtgctgcaatttctggatatcagctacactttgtttttaagtttgtttttgacatgtttatttggcaaattttataatgaagttttaagttgaaaataaaatgtagcaacattttgatcact

SEQ ID NO: 2074 - protein, 615 aa, Homo sapiens; identical to SEQ ID NO: 94

SEQ ID NO: 2075 - DNA, 3885 bp, Homo sapiens
agcagaaaaaaaaaagcttaggatccgtaacagattcggagtcaacaatgacatgactcagcattttggggttcaattaaaaccaggcttgtaggttgcaggtcaagttgtgtttcggtgtgtaacgcataaaacttcttgttccacgctccgcggtgttggggattttctactgcatctcgacagcatctcgggtaacaaccgagcccctcctcgcagcgttaattatagaaaatgccaagtaggaaatttgccgatggtgaagtggtaagaggtcgatggcctgggagttcactttattatgaagtagaaattctgagccacgacagcacctcccagctttacactgtgaagtataaagatggaacagagcttgaattgaaagagaatgatattaagcctttaacttcctttaggcaaaggaaaggtggctcaacttccagttccccttccagacgccgagggagtcgatcaaggtcacgctcccgatcccctggtcgaccacctaaaagtgcccgccgatctgcttctgcttcccaccaggccgacattaaggaagcaaggagggaagtggaagttaaattgactccgctgattctgaagccatttggaaatagcatcagcagatataatggggagcctgagcatattgagagaaatgacgcacctcataaaaatacacaggaaaaattcagtttgtcacaagaaagcagttacatagcaacacagtatagccttcgtccaagaagagaagaagtcaaattaaaagaaatagattctaaggaagaaaaatacgttgcaaaagaactggcagtgagaacctttgaagtgacccccatccgggcaaaggacttggagtttggaggagtacctggtgtgtttctcatcatgtttggcctgcctgtgttcctcttcctgttgctgttgatgtgtaaacagaaagatcccagtcttctgaatttccctcctcctttgccagctttgtatgagttatgggaaaccagagtatttggggtctacctcctgtggtttttgattcaagtcctgttctacctactgccaattggaaaggttgtagaaggaacgcctcttattgatggaagaagactcaagtatagattaaatggattctatgcttttatcctgacatctgcagtcatcggaacatctctcttccagggcgtagagtttcattacgtgtacagtcattttcttcagtttgcacttgcggccactgttttttgtgtggtcttgagtgtgtatctctacatgcgctctttgaaagcgccccggaatgacctgtcgcctgccagctctggaaatgctgtctatgatttcttcattggccgtgaattaaaccctcgaattggtacttttgatctcaaatacttttgtgaattgcgccccggattgattggatgggtggttattaacttggtgatgcttttggctgaaatgaaaatacaggaccgcgctgttccatccttggccatgattttagttaatagtttccagcttctctatgtggtggatgctctctggaatgaggaagcgttgttgacgaccatggacatcatccacgatggatttggattcatgctggcttttggagacttggtgtgggttccctttatttacagcttccaagccttttatttagtcagtcatccaaatgaagtgtcttggccaatggcttctctaattattgttctgaaactttgtggttatgtaatcttccgaggtgcaaattctcagaaaaatgcattccggaaaaatcccagtgatccaaagcttgcacatttaaaaaccattcatacttcaacgggaaaaaatcttctagtttctggatggtggggctttgttcgccaccccaattacttgggtgatctcatcatggccttggcgtggtccctcccatgtggttttaaccacattctgccttatttctacataatttatttcaccatgttgcttgtccaccgagaagctcgtgacgagtaccactgtaagaagaaatacggcgtggcttgggaaaagtactgtcagcgtgtgccctaccgtatatttccatacatctactaatgctcttctggcttttctacaaaatactcctgcaattccagctgccatttgcaaaaacaaggaaaaaaatccgaaactttcttttgttgcactgacagggtctgtacttttttttttctttttgagtcaggactatggagccgagtagttgatcttttaatatagccgtgtttacttgtattaacttacagttaacataggaaaaatacaagtaaggatgtgagaatttgcattttaatgggaaattttcaacccttaatctgaaaacagaagacagtcttaatataaatgtactgtgaagaatgctattgatgtttatggtttctgattacttttcaaattttgatgtttttttgccagttggcttttcttaaatgaaaacactgttccatttaaagtacatttatgttttattcagtaagagaatagaattttcatttgtttttctttaaatcctttactaattatataatttgaaagcaaaaagaagggcctatattaaatgctgaaagtgaaaagtgatgacattattagcagacactgcttaaaggagaccatttgtagcagttggcttaacctcaacttctaaaactacattgaaaatgtaaatacatagcttagttttttgtaatatatggtgacttcagatttttttgtacagtattttgaatgtgagatgattgtcaggactaactgtctttttaacaaaacattttcagtattttaaataaaattttgtaaagtaatgtgaattaaaaattttggaacaattagaattcattcactattgtatagaagatgctgttaaaacataggaagggtatttttcttgatccaaagtttgtgaatttggctttgctacctcaattgcaggtgtttgtttgcctttataaactgttgcaaatagaaaaaaaatagaataagtatatatttttggagtaacatcaatatttaaacatttttacacagatcggtgtttgaaaatttgccatttcaggctaatatttttatatatttttgactttttaaaagttcatcagtgtttttgctactgttaagcttatgcagtttatactgtattttttatgtatcctttatatttaccaaacctgactccctgtaaaggagtgctgtcttaaaaacaactgaaggggttaaagtcgtttcttttagtttaatagatgtgcataaggtagctttagcaattaaattctagtgaagttgatatagtctcatttttaattgtcctgtaatggaacagtagcaaattcactaaacttttgtgttcagagttaaattgttctcagtactttcaatgtaggggaatgtaataaacatagtgtgtatgtttgggttttaattacacattttatatatgagccatttagatatgcagtgttaattctatactgcatttgaagtgtatgtaacttagcttatgttaatgcagtcatgaagttggtttgctccagcatccggtagtctttaaacattcttttagtgaaattgtcattgttttatcagtgctaatgtgtgcaagcagtttttttattttgcttttctcctggcatcagaaagtggtggcgttttctgtactggattgcaccaaggaagcttttggggaggaaggaaggacattaaattctttccctggtaatgaaaagagccctttatcaatacagtgctgcaatttctggatatcagctacactttgtttttaagtttgtttttgacatgtttatttggcaaattttataatgaagttttaagttgaaaataaaatgtagcaacattttgatcact

SEQ ID NO: 2076 - protein, 615 aa, Homo sapiens; identical to SEQ ID NO: 94

SEQ ID NO: 2077 - DNA, 1522 bp, Homo sapiens
aaaggattctatgcttttatcctgacatctgcagtcatcggaacatctgtcgcctgccagctctggtgagcagtgatgaattgcatgttggatgaatgcgtcccagagccctccagcagccatttccagatttgaatagattgctttttttctaacttcatttttgggaaatgaagagaagtaagaaaaaatgaaaagatgaagaaaaacgttaaagagatatgaatttaaaggaagaaaatatttttgttttaccttcatactttcttactcatttcttttttttgcagttgcttgatgacagtaagacgtttagtaaacttacaggcattttgacttatgacaaatattatttctttgtccaaaatagtaaacactctttaaaaaacaaaaaacaacagaggttactggccgggtgaggtggctcatgcctgtaatcccagcacttcgggaggccaaggcgggtggatcacctgaggtcaggagtttgagaccagcctggccaatatggtgaaaccccatctctactaaaaatacaaaaatcagctgggcgtggtggtgcacacctataatcccatctactcgggaggctgaggcaagagaatcgcttgagcgtgggaggcggaggttgcagtgagccgagactgtgccactgcactgtagcctgggccacagagcgaggctccatctcaaaacaaaacaaacaaaaaacaagagaaacgagaggttacaaattggttgatgctgacctgaagtatttcaatataaaaaaatgtcgcctatctaaaaaaaatggagtgtaaagtcctttgggggggcccccatgattttggttaacttttttaagaaacctgggcccccggctcccccaaaggctggagcaactgccttttcagtcgggcaggcatctcctggttccgctcgtctgtgccgtcctgtctgcctctcaccaccagagccctgctcagggtcttgcaggcagtggaattgtgagcctggatagtgggcggcagtgccgttgtaaagcctcctgactgggtttggaatgctgtttgggtaaacacttttcctttctcaggaaatgctgtctatgatttcttcattggccgtgaattaaaccctcgaattggtacttttgatctcaaatacttttgtgaattgcgccccggattgattggatgggtatgtctggttttttttcttctaaatttcaattcaataggtctaattaactgctagaaagaaatgtagaccattcaaaaataagcagtgggtggtatatttttagggataattatggctttccataaatctatcaaaatactttcttgtaagtattttccagaggtttaagatgccctgttacaggttatgacaaattaaataacttttctttgctttatttttattatatcagtttatatttatgtaggaaagtgatagtgtggatgaattaatgtaagaaaaaatgcattttcctcctttttaaattttacctagttttaggcttggagttgcagat

SEQ ID NO: 2078 - protein, 65 aa, Homo sapiens [sequence omitted]

SEQ ID NO: 2079 - DNA, 425 bp, Homo sapiens
atctgatccattctcagatcctaacatttcccgtgctgattttagagttaatggtagcagttcctgcctttgttatcctcttctagtgtgggtctgtctgtatgtgttatgatttgtggtaaagctctttgccttcttccccctttctagcctttaacttcctttaggcaaaggaaaggtggctcaacttccagttccccttccagacgccgagggagtcgatcaaggtcacgctcccgatcccctggtcgaccacctaaaagtgcccgccgatctgcttctgcttcccaccaggccgacattaaggaagcaaggagggaagtggaagttaaattgactccgctgattctgaagccatttggaaatagcatcagcagatataatggggagcctgagcatattgagagaaatgacgcacctcataa

SEQ ID NO: 2080 - protein, 90 aa, Homo sapiens
PLTSFRQRKGGSTSSSPSRRRGSRSRSRSRSPGRPPKSARRSASASHQADIKEARREVEVKLTPLILKPFGNSISRYNGEPEHIERNDAP

SEQ ID NO: 2081 - DNA, 656 bp, Homo sapiens
gccctgctctcagatggaagtgtcaccaaacacccagatcgccgtgctcctgcttctctggagtggacacaacctgaaaaccaactggactgagcatccttctcctaaaatctcagccagaagccacgatggagggtcctgggaagggaagagatgtgaagatttctgtgattctaaaaccttgggtctgcctgcaaacttctctctgatcccagccgagagctgtgcacacgctagctagccctgtcacacaatagcccagtgttcccgtcacagtgcctgggaatgagaggcttttgaggccacagagctatgacaagtccccaggttgaattgactctgggaggacaaatttctgagagactcacgggacccttatccaggacaacctcacaaagatccctgaaactgagcttcctctgcttcgtgcatagtttgaggtataaactttccttgtgtctcggtcagatgaagtgaaggatgaatattatcccaggctaaagtaacgaaaagtccagaagccagcgatgacagagatgtgtgtggaagaaggctgtgagcatttccatcaaaccctgtgagtttccgaagatcttatcccgaagatatgtgtttggccaataaaacactgaataaaaatccatcatgtttccaga

SEQ ID NO: 2082 - protein, 75 aa, Homo sapiens
MEVSPNTQIAVLLLLWSGHNLKTNWTEHPSPKISARSHDGGSWEGKRCEDFCDSKTLGLPANFSLIPAESCAHAS

SEQ ID NO: 2083 - DNA, 462 bp, Homo sapiens
ggagacagagcgagaccctgtctcaaaagtataaatgtatggctgggcatgatggttcacacctgtaatcccagcactttggcaggctgaagagggcagatcacttgaggtcaagatttcaagaccagcctgacctcaggtgatccgtccaccttggcctcccaaagtgctgggattacaggcatgagccactgcacccagccacttttttcatactgacaaaaattactggtacttaacactggagatttgtatctaaccatccacttcatgccccagattactagacagaaagtggaatcatctcctttaatcaagcaaattcccgtctcataatggggctgtgggaatttctctagaggacatcatttagggaaaaacaaagaaggcagccacttccttggcctttgggtatgtgctcttgcttcttgtgccctgagagtgagacccctttataatctg

SEQ ID NO: 2084 - protein, 41 aa, Homo sapiens
WGCGNFSRGHHLGKNKEGSHFLGLWVCALASCALRVRPLYN

SEQ ID NO: 2085 - DNA, 1646 bp, Homo sapiens
ataaagagcagagagcagggcccgtagacgcttctggtgtaggacacaggaattctaggcagagggagaaaattaggggccccagttggtggctgagagtaaaaagaatataccatttgagtagtgctgttctttttcctcagtttttaaagacatataattcctagtagttaggacatctaaatagctcggtaaactggtcagaggcgggaggattgcttgaggccagaagttttgagatcagcctgggcaacatagcgaggcctgtctccttaaaaaataaataaataaataataaataaataaataaataaaaaccttgtccttgactattgtgctgtctgctgcccctttgtagggatggggttggggtcagaataagcatgtgcatgaatggcggaaagctttggtggtgtttgtttgtttgtttgttttttgagaggtgggggagtcagcagtgaacctttctggttaaagaacaacgtacataatttctattatgagatttagaaggttaaatacttttttttttcaggcctaccaagttgatagaccaaaagtatatagtagaacagcacagtagaaaaaatttaaaagtgaatttcttatggtccaaaaggatggatagtcacagtccataacctttcataatatatgctggaattggaatctcttgtcatcttgctttgctctgaattttagaactagaagtgtgcatgtatgtcaaaagattatgcagagctattttctttgctaacaatgtaaacatttgcaccccatgaatgggactttataatctggaagtgagcctaaggttgcgtatactgaagtcatgttttaaaagttaaggttgacttaaacatatacaaggctgtattttaattgtaactagaaatcatttactatgcatacagaacctcatgtatcttatcatggaatttgtgaattaatgggccttgccgaattcaagggtaagggaaactggtaacaacttgttttaaatcaacatactataagctcctgcttgcttgactcaagttgtttgaaaatctgaattaaacaggatctcattgtcaggaaacatcttctaagcttgacatctacgtttaagaagggaacgtggaagagaaggtgagacatgaaactaaaacagctgggagggtaggatcagactgcacctgatttttggaccaaagtttcatataggaataaataaaaaggaggaccacttgtgagccaacctaggaaggacttgccagaaagtagcagctcctgctgcaaaatacagtgccttcaaaatgattctctgtgtgaattgcatgcaatttcatgtaaccataaagtgtaacctgtatgtgcatgacatgtgtctagaatgtgtaaagttaggattcagcaggaaggggcctggccctgtcactgtggtggatcagtggacctgctgaagtcactggactcatgtgacttaggtttgcagcatcagacccctgtgtttgcattaagtggccacatcgttgaaatcggatcaatctctccctcagctttctttcctactttgcagctttgctggttttaactgcttcattcttctgcttcttggtatccttttttcttttgaaataaaaacatgaaatacttaattcaaa

SEQ ID NO: 2086 - protein, 66 aa, Homo sapiens
MCKVRIQQEGAWPCHCGGSVDLLKSLDSCDLGLQHQTPVFALSGHIVEIGSISPSAFFPTLQLCWF

SEQ ID NO: 2087 - DNA, 6170 bp, Homo sapiens
agaaaagtgaaaaaatgttgttttatgttctaatcagccctacaattttgataattttttaagaaaatggcttttttaaagaaatgtatttaaatctggtgttgggttggtaaatttgcaattatttatgaactcattaagtattaagaatgttgtttacctgtcctggaaatctcatttatacagaccaaaatccacacccttatcacagcccagtgccaatggagtccagacggaaggacttgactatgacaggctgaagcaggacattttagatgaaatgagaaaagaattaacaaagctaaaagaagagctcattgatgcaatcaggcaggaactgagcaagtcaaatactgcatagaggaacagactaaggagagataggactttaatctggaggaaaaatatcctacaaacaacaactgttcacaacagcaaacccctacatttatgagctgtaagaagaaaatggagacaaacagaaggagggaaaaaccaacctactctgaaagccttcagacattatgactctggtgataagctctttccctctccgtttgctgcttttttctggcctttacaacagaatggaagagaatcatttaagagttcctgtaacagttatgcagaaaatactaaaacccatcaggcaagatcaccacgcattgaaatattttcatatcaagataaagtcgcacattttccacaatacattgctaaaataaagaggagaaaggcttaggaagtttttttgcagagagtgctggtaaagaattgagcaagtttgctattgtattgtaatgtttctctcaggtttgttcttcctatcatgtttgatattccatgaataattgagatcagccctatgtaagttaagatcataatatgtggaacaaatggaattgtaagtgctttcaaagggtaatatttataagaaagtgtccgaaaaatgtttcttcagcttgagaaattttagaatgataggaagtttctcgagttagccttcatgcaattttgtagattaaaacataaaatttgtccagaacttaaagatttagatgccttcctaaattgttacaatgctttaccaaatctatgacttctacataacacaaaccagtggtcaaatgtaaacactatattgtagatttactgtaggttttcaaccttttttagatttatgcatgtggacatttttataatgtaattacaatcaccacaaggttagcttttttaattgcagacagtaatgcatgtcacactaatatgtagtggccttttcaaggcctagtcccagggaaaacattttgtagagtataggggagtgggaggaaggggaggaataattttttatttaaagttgatttctgcactatctttttctcagttacctgcatgaataaataatgagaaatattttgtgactttaattggtaaatatgttacaaaaccaagtacttaatcttttacatcatgtcttcagctatttgtattttaaccagtaatttcaatggtctgaaacatgattctgagcttcacataatatcttaactgtggaactcaaaagtttgatcactgaatttggcagttattattacctaggtacccccgctgttacacaggtgtttagatacgtgttcctgaatgaagctgcttttgaattttgttatgttgaaatgcaagaaataacaatgatggcagcaattaaggtcacagaaatcattaggtaaaggaaaaccaatgaggagttctgcagttttcttttaataagtaaagtgagacttgggtggtgggaagaaggaaggtgggaagaaggaattagacactctgcctgccactctgcgtgtgtgtgctctcgcgcacgtgctgtctatatggaagccactcccttttctttcctttgaaactggtaaggttaaaataggggagaaatcctacatgttggaatgatagctttttggaaaatttaagaaactctccaggctctccatcttgatttatgcttgagttgttatgtgccatatttgctttgaactctgattatcagaagttttactaaaactttgaaataattcactttcatctgctttctagattttgtacatctcagtccataaagcaaagcttgttgatagtgtagttttctaaacgctgcaaatttgcagcctttaccactacaaagaagtttggatgagggattttttttttctttgtcaaaatagttcctgtttctgtagaaatttcatttttagattaaactgtgatggatgagctatcataattcaagtatacatttcttttttctatcagatattcattgtcatgcagtagtagtaaaaacatcaaagatgcagcaagcttattaagtattattttctaaaagaaataggaggcattttcatctttattattgtacttttggttatgcaaacactttgataatataaacagttatgtcccctataaatctggtcagcaacctcttttgattttgttgggtaagttaaatagtctgtagtaggtagagtactgggtacaagtggtccaaactaagataagagactaaaataaaatgctaaatcttaaaagaaactgggtttatgcactaaacgttttgtgccttggtctaatattaacatgatgtatgtgtaaactgacaaaaaaaaaaaaaaaaaaaaaccagtgttgaatcatgctatatttcccatcatcccagattgctaaatgttctttccaagaagtctgaatgaattattatatacatttgctatcatacatgacagttgtgtcattattagagatttcagtaattaaaatgggaaacagaagcctaagttatttaccttatcaaaaccacgttccttggaaccacattattatgatggtttttgtgctcttgtacgttggatgtcttaagctgagtacagtttaggggatcctttctaatgacaggaaggcactgctttcctcaacactgtgatctgacctgtgacaagtctgtactatccactatgtaaatggctcacaagtcaattgcaaacaaactgaatgtacaaatcttagtgctggtgctgaaatctcttcagaatagtcatcatgatttaaaagtttgtttaaaaatttgcaagcatcaagtgtcaatcaaaactgaagatgaaacactaatgaatgttgaattctcatgcttttaggtgtacttcctttttagaattttcagttttctgctatttttaccgtaactatttcgtttaaatttgtttcatttaagtttcctacacgctaacttcgtttgtgcgattgaaataaaattgcagtatatatatgttgcttgtttgtgacacttagataatcttctgaaataatttgttttaaagtaagttatattggatgtgaaaaacaccttttaaagtccaagactttactacttaaaagtttacatgtcacgtcactattctttacagatttcatagaagtcgtgaatactaagtaatgtatacaaaagaaatatgtgatgatgtgtctactttttgtttgaaataactgttgggtgttccctcttcttattttctctctgcccaccttgacacagtaacttcctcttatagtcaagatgatgattaagtgtttaatttttattccattttgttctgcaacacgttcaggtacttaaaactcattcatgcagttagaattatcctttatgtagtttgcatggtaaaggacattgtgtggtaaagggcattattgagtaatgaattttaagtatagcaaaatatgtatagtgtttatacatgatgctgatttcttaaaacctacatataagcagtagtactttttctctattataaagtattaattttgagttccattttataattctgatgtcttcattagaaatacaaaaatacaatccttgtattttttctttgaccagacccaaattttccccttcccccctccattctcctctccacttctcgtggaccgcgtgttcccaatattcattaacatttgcagccattacagagttacagttgtaaaattttcagctgtttttttttttttttttttgctctagcctgtctcatgttcttgcttctcttcatatgtaagtcagtatttttgtctacaaattaaaagtcacttgtcattcaaaaatgagttaagtaacatgataatcttttaaatttacctagctacaacttttatgtctcttgtaaatttatatatactttcagtgccattgtgaagaattggccttttaattctaagtagtattaccctatgaagcacagtgtgcaaaggtatgctacaaggtctctttaattcctgtgtggccattataattttataacaccattaccctttaaattctaccgattataagcagcgtaaaagtaactatataaagcaaacatcgcaaaggaactctgcaggagctcttaattcctttatgtagctatcataaaattcactttcctgaagacatttactctcattcacttccaaactccaaacctttttctggtagcaccacttttgtttttaatagaaagatgagttcatatctgtacatctctccaaagctctaaggaatgagaaaaggatcctagtatattgaaattactgatgtttaatacctctgccttttcactaaaagccatttaatatttttaaagtcaaaacttgacatacaggtatttataaggaatctccatgactctgaaggaatgaaattgatgtaggtagctttggctatgtaaagacatagtagaggacaattacttaaagaagagttttcttttgaggatttgtagatttgactaagcagctgaagtcagtaacccctcaagaaagtccgtttatagaagccaagaactgttggaggtctgtgatgcaggtttttctgttcccaacatcaaaagctgtggattatttggtgtgttcccctttatgttatctctcgataatttttgagacatcaagattttttaaaatatcaatactggaaagatgaaaccttcaaattaaaacctaaaattgattagaaagaaaagtaaaatattaatgcagtaaatttaggatggttacagatactcaccatcaacataaataaatggagttctaggataaattatttgtggaatactaatggtcaagtcacataagagtaaaatcttttggtgaggagacacatttgacaactgctaaagaattaactaaatttgtctttctaaatagttttctttataaagtaacagaaacattgtaaaaggataaatgactgtcataatgacttaggatgttgtaagaatgtctgccacatttattggttatttctgttgaaatctgaaggaatcgatacatctgaaaattgagaaagggaaataggactgtccccgttacagatactctgtgatgcacacaaccttctaaacggaagtgttagtatcatttaaagcacatagtaggccttgagtatttgcagattaacatgcagaaaaaatcaaagatgaagccccaattaagtgtttgaaccaaagaatcacagtcactgagctgcacccccgttctgtgaagcatgttaaatactcataaagagcagagagcagggcccgtagacgcttctggtgtaggacacaggaattctaggcagagggagaaaattaggggccccagttggtggctgagagtaaaaagaatataccatttgagtagtgctgttctttttcctcagtttttaaagacatataattcctagtagttaggacatctaaatagctcggtaaactggtcagaggcgggaggattgcttgaggccagaagttttgagatcagcctgggtaacagggagactcatttctacaaaaaaatttaaaaatttaggccaggcatggtggtgcacacctgtaatcccagctactcaggagactgaagcgggaggatcacctgagcccagggaggacgcggctgcagtgagccgttatcatgccactgtactccagcctgggtgacagagcgagaacctgtctctaaaaaaaaaaaaaaaaaattctaagagaatatagcttttcatagaaattattagaaaagcttacatatttcattagagagcccagtttgttagactacatttattccgtaaaagttctatatacaaatgacaaccc

SEQ ID NO: 2088 - protein, 77 aa, Homo sapiens [sequence omitted]

SEQ ID NO: 2089 - DNA, 7544 bp, Homo sapiens
gcttgtgtaactgctcaagctgaaaaagttagcaattaccacccagtgtgcaaaatagcattttattcgttctgaaaacacccctcttaaaccttaactaaaagagcacctactgtttcaggattctgttattaaataaattcttgttcactccctttgtgattttataacatttgaacatttctcttcttgccccccattttgtgggataaaaacaactctacttcaaatcctatggtatttaattatttccgagcgttattttgaggttttactttgtactagtaaattcctttacttcagtgattctcagccttggctatccattgaatttaaatgtgaagtattttttaaaatgctgaagctgggacttactcctccttcatgtttttaatacagccactttgactgtaaacaattaaatgtatgtgttcactgttactgaatttactgtctcaacacttaaggttaatgtggattattttgggtctgatatttcaagtagtactaactgccatcctatatactagtttgttttttcagggacgcttacctctcttccaaattttataagtatttattttgcttatttaccaaatccccatgaaaaaaaaaagtcttaattagatgatctgttgcatagttctattactaaagctctaacctaaagtaagtagttatatatacttggaccttacatttcagtatctttcaaaaactgatctagacttttacaactatgataaattggactcattaagtaaatacatgagtcagtttaatttagcatggcattctgcgtaccttcccacataaaataatatcactcagctctattgttgatggtcttacttaacatttctctctctcaggcattgtcttgggaccacttgcacctccacctcctccaccactcccaccagggcctgcacaggcttcagtagccctccctcctcccccagggccccctccacctcctccactcccatccaccgggcctccaccgccccctcctccccctcctctccctaatcaagtaccccctcctcctccaccacctcctgccccacccctccctgcatctggattctttttggcatccatgtcagaagacaatcgccctttaactggacttgcagctgcaattgccggagcaaaacttaggaaagtgtcacggatggaggatacctctttcccaagtggagggaatgctattggtgtgaactccgcctcatctaaaacagatacaggccgtggaaatggaccccttcctttagggggtagtggtttaatggaagaaatgagtgccctgctggccaggaggagaagaattgctgaaaagggatcaacaatagaaacagaacaaaaagaggacaaaggtgaagattcagagcctgtaacttctaaggcctcttcaacaagtacacctgaaccaacaagaaaaccttgggaaagaacaaatacaatgaatggcagcaagtcacctgttatctccagacgggattctccaaggaaaaatcagattgtttttgacaacaggtcctatgattcattacacagaccaaaatccacacccttatcacagcccagtgccaatggagtccagacggaaggacttgactatgacaggctgaagcaggacattttagatgaaatgagaaaagaattaacaaagctaaaagaagagctcattgatgcaatcaggcaggaactgagcaagtcaaatactgcatagaggaacagactaaggagagataggactttaatctggaggaaaaatatcctacaaacaacaactgttcacaacagcaaacccctacatttatgagctgtaagaagaaaatggagacaaacagaaggagggaaaaaccaacctactctgaaagccttcagacattatgactctggtgataagctctttccctctccgtttgctgcttttttctggcctttacaacagaatggaagagaatcatttaagagttcctgtaacagttatgcagaaaatactaaaacccatcaggcaagatcaccacgcattgaaatattttcatatcaagataaagtcgcacattttccacaatacattgctaaaataaagaggagaaaggcttaggaagtttttttgcagagagtgctggtaaagaattgagcaagtttgctattgtattgtaatgtttctctcaggtttgttcttcctatcatgtttgatattccatgaataattgagatcagccctatgtaagttaagatcataatatgtggaacaaatggaattgtaagtgctttcaaagggtaatatttataagaaagtgtccgaaaaatgtttcttcagcttgagaaattttagaatgataggaagtttctcgagttagccttcatgcaattttgtagattaaaacataaaatttgtccagaacttaaagatttagatgccttcctaaattgttacaatgctttaccaaatctatgacttctacataacacaaaccagtggtcaaatgtaaacactatattgtagatttactgtaggttttcaaccttttttagatttatgcatgtggacatttttataatgtaattacaatcaccacaaggttagcttttttaattgcagacagtaatgcatgtcacactaatatgtagtggccttttcaaggcctagtcccagggaaaacattttgtagagtataggggagtgggaggaaggggaggaataattttttatttaaagttgatttctgcactatctttttctcagttacctgcatgaataaataatgagaaatattttgtgactttaattggtaaatatgttacaaaaccaagtacttaatcttttacatcatgtcttcagctatttgtattttaaccagtaatttcaatggtctgaaacatgattctgagcttcacataatatcttaactgtggaactcaaaagtttgatcactgaatttggcagttattattacctaggtacccccgctgttacacaggtgtttagatacgtgttcctgaatgaagctgcttttgaattttgttatgttgaaatgcaagaaataacaatgatggcagcaattaaggtcacagaaatcattaggtaaaggaaaaccaatgaggagttctgcagttttcttttaataagtaaagtgagacttgggtggtgggaagaaggaaggtgggaagaaggaattagacactctgcctgccactctgcgtgtgtgtgctctcgcgcacgtgctgtctatatggaagccactcccttttctttcctttgaaactggtaaggttaaaataggggagaaatcctacatgttggaatgatagctttttggaaaatttaagaaactctccaggctctccatcttgatttatgcttgagttgttatgtgccatatttgctttgaactctgattatcagaagttttactaaaactttgaaataattcactttcatctgctttctagattttgtacatctcagtccataaagcaaagcttgttgatagtgtagttttctaaacgctgcaaatttgcagcctttaccactacaaagaagtttggatgagggattttttttttctttgtcaaaatagttcctgtttctgtagaaatttcatttttagattaaactgtgatggatgagctatcataattcaagtatacatttcttttttctatcagatattcattgtcatgcagtagtagtaaaaacatcaaagatgcagcaagcttattaagtattattttctaaaagaaataggaggcattttcatctttattattgtacttttggttatgcaaacactttgataatataaacagttatgtcccctataaatctggtcagcaacctcttttgattttgttgggtaagttaaatagtctgtagtaggtagagtactgggtacaagtggtccaaactaagataagagactaaaataaaatgctaaatcttaaaagaaactgggtttatgcactaaacgttttgtgccttggtctaatattaacatgatgtatgtgtaaactgacaaaaaaaaaaaaaaaaaaaaaccagtgttgaatcatgctatatttcccatcatcccagattgctaaatgttctttccaagaagtctgaatgaattattatatacatttgctatcatacatgacagttgtgtcattattagagatttcagtaattaaaatgggaaacagaagcctaagttatttaccttatcaaaaccacgttccttggaaccacattattatgatggtttttgtgctcttgtacgttggatgtcttaagctgagtacagtttaggggatcctttctaatgacaggaaggcactgctttcctcaacactgtgatctgacctgtgacaagtctgtactatccactatgtaaatggctcacaagtcaattgcaaacaaactgaatgtacaaatcttagtgctggtgctgaaatctcttcagaatagtcatcatgatttaaaagtttgtttaaaaatttgcaagcatcaagtgtcaatcaaaactgaagatgaaacactaatgaatgttgaattctcatgcttttaggtgtacttcctttttagaattttcagttttctgctatttttaccgtaactatttcgtttaaatttgtttcatttaagtttcctacacgctaacttcgtttgtgcgattgaaataaaattgcagtatatatatgttgcttgtttgtgacacttagataatcttctgaaataatttgttttaaagtaagttatattggatgtgaaaaacaccttttaaagtccaagactttactacttaaaagtttacatgtcacgtcactattctttacagatttcatagaagtcgtgaatactaagtaatgtatacaaaagaaatatgtgatgatgtgtctactttttgtttgaaataactgttgggtgttccctcttcttattttctctctgcccaccttgacacagtaacttcctcttatagtcaagatgatgattaagtgtttaatttttattccattttgttctgcaacacgttcaggtacttaaaactcattcatgcagttagaattatcctttatgtagtttgcatggtaaaggacattgtgtggtaaagggcattattgagtaatgaattttaagtatagcaaaatatgtatagtgtttatacatgatgctgatttcttaaaacctacatataagcagtagtactttttctctattataaagtattaattttgagttccattttataattctgatgtcttcattagaaatacaaaaatacaatccttgtattttttctttgaccagacccaaattttccccttcccccctccattctcctctccacttctcgtggaccgcgtgttcccaatattcattaacatttgcagccattacagagttacagttgtaaaattttcagctgtttttttttttttttttttgctctagcctgtctcatgttcttgcttctcttcatatgtaagtcagtatttttgtctacaaattaaaagtcacttgtcattcaaaaatgagttaagtaacatgataatcttttaaatttacctagctacaacttttatgtctcttgtaaatttatatatactttcagtgccattgtgaagaattggccttttaattctaagtagtattaccctatgaagcacagtgtgcaaaggtatgctacaaggtctctttaattcctgtgtggccattataattttataacaccattaccctttaaattctaccgattataagcagcgtaaaagtaactatataaagcaaacatcgcaaaggaactctgcaggagctcttaattcctttatgtagctatcataaaattcactttcctgaagacatttactctcattcacttccaaactccaaacctttttctggtagcaccacttttgtttttaatagaaagatgagttcatatctgtacatctctccaaagctctaaggaatgagaaaaggatcctagtatattgaaattactgatgtttaatacctctgccttttcactaaaagccatttaatatttttaaagtcaaaacttgacatacaggtatttataaggaatctccatgactctgaaggaatgaaattgatgtaggtagctttggctatgtaaagacatagtagaggacaattacttaaagaagagttttcttttgaggatttgtagatttgactaagcagctgaagtcagtaacccctcaagaaagtccgtttatagaagccaagaactgttggaggtctgtgatgcaggtttttctgttcccaacatcaaaagctgtggattatttggtgtgttcccctttatgttatctctcgataatttttgagacatcaagattttttaaaatatcaatactggaaagatgaaaccttcaaattaaaacctaaaattgattagaaagaaaagtaaaatattaatgcagtaaatttaggatggttacagatactcaccatcaacataaataaatggagttctaggataaattatttgtggaatactaatggtcaagtcacataagagtaaaatcttttggtgaggagacacatttgacaactgctaaagaattaactaaatttgtctttctaaatagttttctttataaagtaacagaaacattgtaaaaggataaatgactgtcataatgacttaggatgttgtaagaatgtctgccacatttattggttatttctgttgaaatctgaaggaatcgatacatctgaaaattgagaaagggaaataggactgtccccgttacagatactctgtgatgcacacaaccttctaaacggaagtgttagtatcatttaaagcacatagtaggccttgagtatttgcagattaacatgcagaaaaaatcaaagatgaagccccaattaagtgtttgaaccaaagaatcacagtcactgagctgcacccccgttctgtgaagcatgttaaatactcataaagagcagagagcagggcccgtagacgcttctggtgtaggacacaggaattctaggcagagggagaaaattaggggccccagttggtggctgagagtaaaaagaatataccatttgagtagtgctgttctttttcctcagtttttaaagacatataattcctagtagttaggacatctaaatagctcggtaaactggtcagaggcgggaggattgcttgaggccagaagttttgagatcagcctgggtaacagggagactcatttctacaaaaaaatttaaaaatttaggccaggcatggtggtgcacacctgtaatcccagctactcaggagactgaagcgggaggatcacctgagcccagggaggacgcggctgcagtgagccgttatcatgccactgtactccagcctgggtgacagagcgagaacctgtctctaaaaaaaaaaaaaaaaaattctaagagaatatagcttttcatagaaattattagaaaagcttacatatttcattagagagcccagtttgttagactacatttattccgtaaaagttctatatacaaatgacaaccc

SEQ ID NO: 2090 - protein, 210 aa, Homo sapiens [sequence omitted]

SEQ ID NO: 2091 - DNA, 7295 bp, Homo sapiens
ctctgatactaactgtagtctacatttatacattgtgtctgaatgctggttttgtggcttcactagctccctttttctctctccttttttatcctgtcttttgctgctgctttccaccttctgtccagctccatcttcagacagctccctgtataacgctccacttcctgagtattccagttgccagcctccttcagcacctcctccatcatacgctaaagtcatctcagctccagtgtcagatgccactcctgattatgctgtagtgactgctttgccacctacttccacaccccctacaccaccactgcgacactcagcgacacgttttgcaacatctttaggttcagccttccaccctgttcttccccattacgctacagttcctcgtcctctgaacaaaaactctcgaccttcttctcctgtgaacacaccctcttctcagcctccagctacgaagccctgtgcctggtctacttccaatttttcgcccctccctccatctcctccaataatgattagcagccccccaggcaaagctactggtccaaggcctgtcctccctgtttgtgtttcttctcctgtgccccaaatgcctccatcaccgacagcacccaatgggctggttgactctgtaacatatccagtgtctccaccgcctacctcagggccagcagctcctccgccgccgcctccactgccttccctcgcatcactctcacactgtggatctcaagcttctcctcctccaagcacccctattgcctcaactccctcatccaagcctagtgttctcccttctccctctgcagctgcccctgcctctgttgagactcctctccctaatcaagtaccccctcctcctccaccacctcctgccccacccctccctgcatctggattctttttggcatccatgtcagaagacaatcgccctttaactggacttgcagctgcaattgccggagcaaaacttaggaaagtgtcacggatggaggatacctctttcccaagtggagggaatgctattggtgtgaactccgcctcatctaaaacagatacaggccgtggaaatggaccccttcctttagggggtagtggtttaatggaagaaatgagtgccctgctggccaggaggagaagaattgctgaaaagggatcaacaatagaaacagaacaaaaagaggacaaaggtgaagattcagagcctgtaacttctaaggcctcttcaacaagtacacctgaaccaacaagaaaaccttgggaaagaacaaatacaatgaatggcagcaagtcacctgttatctccagaccaaaatccacacccttatcacagcccagtgccaatggagtccagacggaaggacttgactatgacaggctgaagcaggacattttagatgaaatgagaaaagaattaacaaagctaaaagaagagctcattgatgcaatcaggcaggaactgagcaagtcaaatactgcatagaggaacagactaaggagagataggactttaatctggaggaaaaatatcctacaaacaacaactgttcacaacagcaaacccctacatttatgagctgtaagaagaaaatggagacaaacagaaggagggaaaaaccaacctactctgaaagccttcagacattatgactctggtgataagctctttccctctccgtttgctgcttttttctggcctttacaacagaatggaagagaatcatttaagagttcctgtaacagttatgcagaaaatactaaaacccatcaggcaagatcaccacgcattgaaatattttcatatcaagataaagtcgcacattttccacaatacattgctaaaataaagaggagaaaggcttaggaagtttttttgcagagagtgctggtaaagaattgagcaagtttgctattgtattgtaatgtttctctcaggtttgttcttcctatcatgtttgatattccatgaataattgagatcagccctatgtaagttaagatcataatatgtggaacaaatggaattgtaagtgctttcaaagggtaatatttataagaaagtgtccgaaaaatgtttcttcagcttgagaaattttagaatgataggaagtttctcgagttagccttcatgcaattttgtagattaaaacataaaatttgtccagaacttaaagatttagatgccttcctaaattgttacaatgctttaccaaatctatgacttctacataacacaaaccagtggtcaaatgtaaacactatattgtagatttactgtaggttttcaaccttttttagatttatgcatgtggacatttttataatgtaattacaatcaccacaaggttagcttttttaattgcagacagtaatgcatgtcacactaatatgtagtggccttttcaaggcctagtcccagggaaaacattttgtagagtataggggagtgggaggaaggggaggaataattttttatttaaagttgatttctgcactatctttttctcagttacctgcatgaataaataatgagaaatattttgtgactttaattggtaaatatgttacaaaaccaagtacttaatcttttacatcatgtcttcagctatttgtattttaaccagtaatttcaatggtctgaaacatgattctgagcttcacataatatcttaactgtggaactcaaaagtttgatcactgaatttggcagttattattacctaggtacccccgctgttacacaggtgtttagatacgtgttcctgaatgaagctgcttttgaattttgttatgttgaaatgcaagaaataacaatgatggcagcaattaaggtcacagaaatcattaggtaaaggaaaaccaatgaggagttctgcagttttcttttaataagtaaagtgagacttgggtggtgggaagaaggaaggtgggaagaaggaattagacactctgcctgccactctgcgtgtgtgtgctctcgcgcacgtgctgtctatatggaagccactcccttttctttcctttgaaactggtaaggttaaaataggggagaaatcctacatgttggaatgatagctttttggaaaatttaagaaactctccaggctctccatcttgatttatgcttgagttgttatgtgccatatttgctttgaactctgattatcagaagttttactaaaactttgaaataattcactttcatctgctttctagattttgtacatctcagtccataaagcaaagcttgttgatagtgtagttttctaaacgctgcaaatttgcagcctttaccactacaaagaagtttggatgagggattttttttttctttgtcaaaatagttcctgtttctgtagaaatttcatttttagattaaactgtgatggatgagctatcataattcaagtatacatttcttttttctatcagatattcattgtcatgcagtagtagtaaaaacatcaaagatgcagcaagcttattaagtattattttctaaaagaaataggaggcattttcatctttattattgtacttttggttatgcaaacactttgataatataaacagttatgtcccctataaatctggtcagcaacctcttttgattttgttgggtaagttaaatagtctgtagtaggtagagtactgggtacaagtggtccaaactaagataagagactaaaataaaatgctaaatcttaaaagaaactgggtttatgcactaaacgttttgtgccttggtctaatattaacatgatgtatgtgtaaactgacaaaaaaaaaaaaaaaaaaaaaccagtgttgaatcatgctatatttcccatcatcccagattgctaaatgttctttccaagaagtctgaatgaattattatatacatttgctatcatacatgacagttgtgtcattattagagatttcagtaattaaaatgggaaacagaagcctaagttatttaccttatcaaaaccacgttccttggaaccacattattatgatggtttttgtgctcttgtacgttggatgtcttaagctgagtacagtttaggggatcctttctaatgacaggaaggcactgctttcctcaacactgtgatctgacctgtgacaagtctgtactatccactatgtaaatggctcacaagtcaattgcaaacaaactgaatgtacaaatcttagtgctggtgctgaaatctcttcagaatagtcatcatgatttaaaagtttgtttaaaaatttgcaagcatcaagtgtcaatcaaaactgaagatgaaacactaatgaatgttgaattctcatgcttttaggtgtacttcctttttagaattttcagttttctgctatttttaccgtaactatttcgtttaaatttgtttcatttaagtttcctacacgctaacttcgtttgtgcgattgaaataaaattgcagtatatatatgttgcttgtttgtgacacttagataatcttctgaaataatttgttttaaagtaagttatattggatgtgaaaaacaccttttaaagtccaagactttactacttaaaagtttacatgtcacgtcactattctttacagatttcatagaagtcgtgaatactaagtaatgtatacaaaagaaatatgtgatgatgtgtctactttttgtttgaaataactgttgggtgttccctcttcttattttctctctgcccaccttgacacagtaacttcctcttatagtcaagatgatgattaagtgtttaatttttattccattttgttctgcaacacgttcaggtacttaaaactcattcatgcagttagaattatcctttatgtagtttgcatggtaaaggacattgtgtggtaaagggcattattgagtaatgaattttaagtatagcaaaatatgtatagtgtttatacatgatgctgatttcttaaaacctacatataagcagtagtactttttctctattataaagtattaattttgagttccattttataattctgatgtcttcattagaaatacaaaaatacaatccttgtattttttctttgaccagacccaaattttccccttcccccctccattctcctctccacttctcgtggaccgcgtgttcccaatattcattaacatttgcagccattacagagttacagttgtaaaattttcagctgtttttttttttttttttttgctctagcctgtctcatgttcttgcttctcttcatatgtaagtcagtatttttgtctacaaattaaaagtcacttgtcattcaaaaatgagttaagtaacatgataatcttttaaatttacctagctacaacttttatgtctcttgtaaatttatatatactttcagtgccattgtgaagaattggccttttaattctaagtagtattaccctatgaagcacagtgtgcaaaggtatgctacaaggtctctttaattcctgtgtggccattataattttataacaccattaccctttaaattctaccgattataagcagcgtaaaagtaactatataaagcaaacatcgcaaaggaactctgcaggagctcttaattcctttatgtagctatcataaaattcactttcctgaagacatttactctcattcacttccaaactccaaacctttttctggtagcaccacttttgtttttaatagaaagatgagttcatatctgtacatctctccaaagctctaaggaatgagaaaaggatcctagtatattgaaattactgatgtttaatacctctgccttttcactaaaagccatttaatatttttaaagtcaaaacttgacatacaggtatttataaggaatctccatgactctgaaggaatgaaattgatgtaggtagctttggctatgtaaagacatagtagaggacaattacttaaagaagagttttcttttgaggatttgtagatttgactaagcagctgaagtcagtaacccctcaagaaagtccgtttatagaagccaagaactgttggaggtctgtgatgcaggtttttctgttcccaacatcaaaagctgtggattatttggtgtgttcccctttatgttatctctcgataatttttgagacatcaagattttttaaaatatcaatactggaaagatgaaaccttcaaattaaaacctaaaattgattagaaagaaaagtaaaatattaatgcagtaaatttaggatggttacagatactcaccatcaacataaataaatggagttctaggataaattatttgtggaatactaatggtcaagtcacataagagtaaaatcttttggtgaggagacacatttgacaactgctaaagaattaactaaatttgtctttctaaatagttttctttataaagtaacagaaacattgtaaaaggataaatgactgtcataatgacttaggatgttgtaagaatgtctgccacatttattggttatttctgttgaaatctgaaggaatcgatacatctgaaaattgagaaagggaaataggactgtccccgttacagatactctgtgatgcacacaaccttctaaacggaagtgttagtatcatttaaagcacatagtaggccttgagtatttgcagattaacatgcagaaaaaatcaaagatgaagccccaattaagtgtttgaaccaaagaatcacagtcactgagctgcacccccgttctgtgaagcatgttaaatactcataaagagcagagagcagggcccgtagacgcttctggtgtaggacacaggaattctaggcagagggagaaaattaggggccccagttggtggctgagagtaaaaagaatataccatttgagtagtgctgttctttttcctcagtttttaaagacatataattcctagtagttaggacatctaaatagctcggtaaactggtcagaggcgggaggattgcttgaggccagaagttttgagatcagcctgggtaacagggagactcatttctacaaaaaaatttaaaaatttaggccaggcatggtggtgcacacctgtaatcccagctactcaggagactgaagcgggaggatcacctgagcccagggaggacgcggctgcagtgagccgttatcatgccactgtactccagcctgggtgacagagcgagaacctgtctctaaaaaaaaaaaaaaaaaattctaagagaatatagcttttcatagaaattattagaaaagcttacatatttcattagagagcccagtttgttagactacatttattccgtaaaagttctatatacaaatgacaaccc

SEQ ID NO: 2092 - protein, 323 aa, Homo sapiens
MISSPPGKATGPRPVLPVCVSSPVPQMPPSPTAPNGLVDSVTYPVSPPPTSGPAAPPPPPPLPSLASLSHCGSQASPPPSTPIASTPSSKPSVLPSPSAAAPASVETPLPNQVPPPPPPPPAPPLPASGFFLASMSEDNRPLTGLAAAIAGAKLRKVSRMEDTSFPSGGNAIGVNSASSKTDTGRGNGPLPLGGSGLMEEMSALLARRRRIAEKGSTIETEQKEDKGEDSEPVTSKASSTSTPEPTRKPWERTNTMNGSKSPVISRPKSTPLSQPSANGVQTEGLDYDRLKQDILDEMRKELTKLKEELIDAIRQELSKSNTA

SEQ ID NO: 2093 - DNA, 7975 bp, Homo sapiens
gggttcctcgcggcgatcccgactctcctcccgcggctgcagcagctgccggttgcacacggcctcggcggcggcgcggcgagcgcgggcctgtggagcggcggccgggcgcgcggccccggcgggcacccctcagagggcggccgaggaagctccgggaggaggagcaggaccacgaggaggtgggaggcggcggccgcctggggaccagctccgcgcctcggcctctccgccccctccccagcctttctctcgccctcttctcccacactcccggccggcgcctcggctttgtgcgaggagatggtgtagccccctggccgccgaaggaggagccggacacttgtctcccgtctccgagctgctccccacccctggaggagagacccccccctcggctcggcgccttctgcgtctcccggctggtggggaagcctctgcgccgccggcaccatgagtgaacagagtatctgtcaggcaagagctgctgtgatggtttatgatgatgccaataagaagtgggtgccagctggtggctcaactggattcagcagagttcatatctatcaccatacaggcaacaacacattcagagtggtgggcaggaagattcaggaccatcaggtcgtgataaactgtgccattcctaaagggttgaagtacaatcaagctacacagaccttccaccagtggcgagatgctagacaggtgtatggtctcaactttggcagcaaagaggatgccaatgtcttcgcaagtgccatgatgcatgccttagaagtgttaaattcacaggaaacagggccaacattgcctagacaaaactcacaactacctgctcaagttcaaaatggcccatcccaagaagaattggaaattcaaagaagacaactacaagaacagcaacggcaaaaggagctggagcgggaaaggctggagcgagaaagaatggaaagagaaaggttggagagagagaggttagaaagggaaaggctggagagggagcgactggaacaagaacagctggagagagagagacaagaacgggaacggcaggaacgcctggagcggcaggaacgcctggagcggcaggaacgcctggagcggcaggaacgcctggatcgggagaggcaagaaagacaagaacgagagaggctggagagactggaacgggagaggcaagaaagggagcgacaagagcagttagaaagggaacagctggaatgggagagagagcgcagaatatcaagtgctgctgcccctgcctctgttgagactcctctaaactctgtgctgggagactcttctgcttctgagccaggcttgcaggcagcctctcagccggccgagactccatcccaacagggcattgtcttgggaccacttgcacctccacctcctccaccactcccaccagggcctgcacaggcttcagtagccctccctcctcccccagggccccctccacctcctccactcccatccaccgggcctccaccgccccctcctccccctcctctccctaatcaagtaccccctcctcctccaccacctcctgccccacccctccctgcatctggattctttttggcatccatgtcagaagacaatcgccctttaactggacttgcagctgcaattgccggagcaaaacttaggaaagtgtcacggatggaggatacctctttcccaagtggagggaatgctattggtgtgaactccgcctcatctaaaacagatacaggccgtggaaatggaccccttcctttagggggtagtggtttaatggaagaaatgagtgccctgctggccaggaggagaagaattgctgaaaagggatcaacaatagaaacagaacaaaaagaggacaaaggtgaagattcagagcctgtaacttctaaggcctcttcaacaagtacacctgaaccaacaagaaaaccttgggaaagaacaaatacaatgaatggcagcaagtcacctgttatctccagaccaaaatccacacccttatcacagcccagtgccaatggagtccagacggaaggacttgactatgacaggctgaagcaggacattttagatgaaatgagaaaagaattaacaaagctaaaagaagagctcattgatgcaatcaggcaggaactgagcaagtcaaatactgcatagaggaacagactaaggagagataggactttaatctggaggaaaaatatcctacaaacaacaactgttcacaacagcaaacccctacatttatgagctgtaagaagaaaatggagacaaacagaaggagggaaaaaccaacctactctgaaagccttcagacattatgactctggtgataagctctttccctctccgtttgctgcttttttctggcctttacaacagaatggaagagaatcatttaagagttcctgtaacagttatgcagaaaatactaaaacccatcaggcaagatcaccacgcattgaaatattttcatatcaagataaagtcgcacattttccacaatacattgctaaaataaagaggagaaaggcttaggaagtttttttgcagagagtgctggtaaagaattgagcaagtttgctattgtattgtaatgtttctctcaggtttgttcttcctatcatgtttgatattccatgaataattgagatcagccctatgtaagttaagatcataatatgtggaacaaatggaattgtaagtgctttcaaagggtaatatttataagaaagtgtccgaaaaatgtttcttcagcttgagaaattttagaatgataggaagtttctcgagttagccttcatgcaattttgtagattaaaacataaaatttgtccagaacttaaagatttagatgccttcctaaattgttacaatgctttaccaaatctatgacttctacataacacaaaccagtggtcaaatgtaaacactatattgtagatttactgtaggttttcaaccttttttagatttatgcatgtggacatttttataatgtaattacaatcaccacaaggttagcttttttaattgcagacagtaatgcatgtcacactaatatgtagtggccttttcaaggcctagtcccagggaaaacattttgtagagtataggggagtgggaggaaggggaggaataattttttatttaaagttgatttctgcactatctttttctcagttacctgcatgaataaataatgagaaatattttgtgactttaattggtaaatatgttacaaaaccaagtacttaatcttttacatcatgtcttcagctatttgtattttaaccagtaatttcaatggtctgaaacatgattctgagcttcacataatatcttaactgtggaactcaaaagtttgatcactgaatttggcagttattattacctaggtacccccgctgttacacaggtgtttagatacgtgttcctgaatgaagctgcttttgaattttgttatgttgaaatgcaagaaataacaatgatggcagcaattaaggtcacagaaatcattaggtaaaggaaaaccaatgaggagttctgcagttttcttttaataagtaaagtgagacttgggtggtgggaagaaggaaggtgggaagaaggaattagacactctgcctgccactctgcgtgtgtgtgctctcgcgcacgtgctgtctatatggaagccactcccttttctttcctttgaaactggtaaggttaaaataggggagaaatcctacatgttggaatgatagctttttggaaaatttaagaaactctccaggctctccatcttgatttatgcttgagttgttatgtgccatatttgctttgaactctgattatcagaagttttactaaaactttgaaataattcactttcatctgctttctagattttgtacatctcagtccataaagcaaagcttgttgatagtgtagttttctaaacgctgcaaatttgcagcctttaccactacaaagaagtttggatgagggattttttttttctttgtcaaaatagttcctgtttctgtagaaatttcatttttagattaaactgtgatggatgagctatcataattcaagtatacatttcttttttctatcagatattcattgtcatgcagtagtagtaaaaacatcaaagatgcagcaagcttattaagtattattttctaaaagaaataggaggcattttcatctttattattgtacttttggttatgcaaacactttgataatataaacagttatgtcccctataaatctggtcagcaacctcttttgattttgttgggtaagttaaatagtctgtagtaggtagagtactgggtacaagtggtccaaactaagataagagactaaaataaaatgctaaatcttaaaagaaactgggtttatgcactaaacgttttgtgccttggtctaatattaacatgatgtatgtgtaaactgacaaaaaaaaaaaaaaaaaaaaaccagtgttgaatcatgctatatttcccatcatcccagattgctaaatgttctttccaagaagtctgaatgaattattatatacatttgctatcatacatgacagttgtgtcattattagagatttcagtaattaaaatgggaaacagaagcctaagttatttaccttatcaaaaccacgttccttggaaccacattattatgatggtttttgtgctcttgtacgttggatgtcttaagctgagtacagtttaggggatcctttctaatgacaggaaggcactgctttcctcaacactgtgatctgacctgtgacaagtctgtactatccactatgtaaatggctcacaagtcaattgcaaacaaactgaatgtacaaatcttagtgctggtgctgaaatctcttcagaatagtcatcatgatttaaaagtttgtttaaaaatttgcaagcatcaagtgtcaatcaaaactgaagatgaaacactaatgaatgttgaattctcatgcttttaggtgtacttcctttttagaattttcagttttctgctatttttaccgtaactatttcgtttaaatttgtttcatttaagtttcctacacgctaacttcgtttgtgcgattgaaataaaattgcagtatatatatgttgcttgtttgtgacacttagataatcttctgaaataatttgttttaaagtaagttatattggatgtgaaaaacaccttttaaagtccaagactttactacttaaaagtttacatgtcacgtcactattctttacagatttcatagaagtcgtgaatactaagtaatgtatacaaaagaaatatgtgatgatgtgtctactttttgtttgaaataactgttgggtgttccctcttcttattttctctctgcccaccttgacacagtaacttcctcttatagtcaagatgatgattaagtgtttaatttttattccattttgttctgcaacacgttcaggtacttaaaactcattcatgcagttagaattatcctttatgtagtttgcatggtaaaggacattgtgtggtaaagggcattattgagtaatgaattttaagtatagcaaaatatgtatagtgtttatacatgatgctgatttcttaaaacctacatataagcagtagtactttttctctattataaagtattaattttgagttccattttataattctgatgtcttcattagaaatacaaaaatacaatccttgtattttttctttgaccagacccaaattttccccttcccccctccattctcctctccacttctcgtggaccgcgtgttcccaatattcattaacatttgcagccattacagagttacagttgtaaaattttcagctgtttttttttttttttttttgctctagcctgtctcatgttcttgcttctcttcatatgtaagtcagtatttttgtctacaaattaaaagtcacttgtcattcaaaaatgagttaagtaacatgataatcttttaaatttacctagctacaacttttatgtctcttgtaaatttatatatactttcagtgccattgtgaagaattggccttttaattctaagtagtattaccctatgaagcacagtgtgcaaaggtatgctacaaggtctctttaattcctgtgtggccattataattttataacaccattaccctttaaattctaccgattataagcagcgtaaaagtaactatataaagcaaacatcgcaaaggaactctgcaggagctcttaattcctttatgtagctatcataaaattcactttcctgaagacatttactctcattcacttccaaactccaaacctttttctggtagcaccacttttgtttttaatagaaagatgagttcatatctgtacatctctccaaagctctaaggaatgagaaaaggatcctagtatattgaaattactgatgtttaatacctctgccttttcactaaaagccatttaatatttttaaagtcaaaacttgacatacaggtatttataaggaatctccatgactctgaaggaatgaaattgatgtaggtagctttggctatgtaaagacatagtagaggacaattacttaaagaagagttttcttttgaggatttgtagatttgactaagcagctgaagtcagtaacccctcaagaaagtccgtttatagaagccaagaactgttggaggtctgtgatgcaggtttttctgttcccaacatcaaaagctgtggattatttggtgtgttcccctttatgttatctctcgataatttttgagacatcaagattttttaaaatatcaatactggaaagatgaaaccttcaaattaaaacctaaaattgattagaaagaaaagtaaaatattaatgcagtaaatttaggatggttacagatactcaccatcaacataaataaatggagttctaggataaattatttgtggaatactaatggtcaagtcacataagagtaaaatcttttggtgaggagacacatttgacaactgctaaagaattaactaaatttgtctttctaaatagttttctttataaagtaacagaaacattgtaaaaggataaatgactgtcataatgacttaggatgttgtaagaatgtctgccacatttattggttatttctgttgaaatctgaaggaatcgatacatctgaaaattgagaaagggaaataggactgtccccgttacagatactctgtgatgcacacaaccttctaaacggaagtgttagtatcatttaaagcacatagtaggccttgagtatttgcagattaacatgcagaaaaaatcaaagatgaagccccaattaagtgtttgaaccaaagaatcacagtcactgagctgcacccccgttctgtgaagcatgttaaatactcataaagagcagagagcagggcccgtagacgcttctggtgtaggacacaggaattctaggcagagggagaaaattaggggccccagttggtggctgagagtaaaaagaatataccatttgagtagtgctgttctttttcctcagtttttaaagacatataattcctagtagttaggacatctaaatagctcggtaaactggtcagaggcgggaggattgcttgaggccagaagttttgagatcagcctgggtaacagggagactcatttctacaaaaaaatttaaaaatttaggccaggcatggtggtgcacacctgtaatcccagctactcaggagactgaagcgggaggatcacctgagcccagggaggacgcggctgcagtgagccgttatcatgccactgtactccagcctgggtgacagagcgagaacctgtctctaaaaaaaaaaaaaaaaaattctaagagaatatagcttttcatagaaattattagaaaagcttacatatttcattagagagcccagtttgttagactacatttattccgtaaaagttctatatacaaatgacaaccc

SEQ ID NO: 2094 - protein, 570 aa, Homo sapiens; identical to SEQ ID NO: 100

SEQ ID NO: 2095 - DNA, 3321 bp, Homo sapiens
agaaaagtgaaaaaatgttgttttatgttctaatcagccctacaattttgataattttttaagaaaatggcttttttaaagaaatgtatttaaatctggtgttgggttggtaaatttgcaattatttatgaactcattaagtattaagaatgttgtttacctgtcctggaaatctcatttatacagaccaaaatccacacccttatcacagcccagtgccaatggagtccagacggaaggacttgactatgacaggctgaagcaggacattttagatgaaatgagaaaagaattaacaaagctaaaagaagagctcattgatgcaatcaggcaggaactgagcaagtcaaatactgcatagaggaacagactaaggagagataggactttaatctggaggaaaaatatcctacaaacaacaactgttcacaacagcaaacccctacatttatgagctgtaagaagaaaatggagacaaacagaaggagggaaaaaccaacctactctgaaagccttcagacattatgactctggtgataagctctttccctctccgtttgctgcttttttctggcctttacaacagaatggaagagaatcatttaagagttcctgtaacagttatgcagaaaatactaaaacccatcaggcaagatcaccacgcattgaaatattttcatatcaagataaagtcgcacattttccacaatacattgctaaaataaagaggagaaaggcttaggaagtttttttgcagagagtgctggtaaagaattgagcaagtttgctattgtattgtaatgtttctctcaggtttgttcttcctatcatgtttgatattccatgaataattgagatcagccctatgtaagttaagatcataatatgtggaacaaatggaattgtaagtgctttcaaagggtaatatttataagaaagtgtccgaaaaatgtttcttcagcttgagaaattttagaatgataggaagtttctcgagttagccttcatgcaattttgtagattaaaacataaaatttgtccagaacttaaagatttagatgccttcctaaattgttacaatgctttaccaaatctatgacttctacataacacaaaccagtggtcaaatgtaaacactatattgtagatttactgtaggttttcaaccttttttagatttatgcatgtggacatttttataatgtaattacaatcaccacaaggttagcttttttaattgcagacagtaatgcatgtcacactaatatgtagtggccttttcaaggcctagtcccagggaaaacattttgtagagtataggggagtgggaggaaggggaggaataattttttatttaaagttgatttctgcactatctttttctcagttacctgcatgaataaataatgagaaatattttgtgactttaattggtaaatatgttacaaaaccaagtacttaatcttttacatcatgtcttcagctatttgtattttaaccagtaatttcaatggtctgaaacatgattctgagcttcacataatatcttaactgtggaactcaaaagtttgatcactgaatttggcagttattattacctaggtacccccgctgttacacaggtgtttagatacgtgttcctgaatgaagctgcttttgaattttgttatgttgaaatgcaagaaataacaatgatggcagcaattaaggtcacagaaatcattaggtaaaggaaaaccaatgaggagttctgcagttttcttttaataagtaaagtgagacttgggtggtgggaagaaggaaggtgggaagaaggaattagacactctgcctgccactctgcgtgtgtgtgctctcgcgcacgtgctgtctatatggaagccactcccttttctttcctttgaaactggtaaggttaaaataggggagaaatcctacatgttggaatgatagctttttggaaaatttaagaaactctccaggctctccatcttgatttatgcttgagttgttatgtgccatatttgctttgaactctgattatcagaagttttactaaaactttgaaataattcactttcatctgctttctagattttgtacatctcagtccataaagcaaagcttgttgatagtgtagttttctaaacgctgcaaatttgcagcctttaccactacaaagaagtttggatgagggattttttttttctttgtcaaaatagttcctgtttctgtagaaatttcatttttagattaaactgtgatggatgagctatcataattcaagtatacatttcttttttctatcagatattcattgtcatgcagtagtagtaaaaacatcaaagatgcagcaagcttattaagtattattttctaaaagaaataggaggcattttcatctttattattgtacttttggttatgcaaacactttgataatataaacagttatgtcccctataaatctggtcagcaacctcttttgattttgttgggtaagttaaatagtctgtagtaggtagagtactgggtacaagtggtccaaactaagataagagactaaaataaaatgctaaatcttaaaagaaactgggtttatgcactaaacgttttgtgccttggtctaatattaacatgatgtatgtgtaaactgacaaaaaaaaaaaaaaaaaaaaaccagtgttgaatcatgctatatttcccatcatcccagattgctaaatgttctttccaagaagtctgaatgaattattatatacatttgctatcatacatgacagttgtgtcattattagagatttcagtaattaaaatgggaaacagaagcctaagttatttaccttatcaaaaccacgttccttggaaccacattattatgatggtttttgtgctcttgtacgttggatgtcttaagctgagtacagtttaggggatcctttctaatgacaggaaggcactgctttcctcaacactgtgatctgacctgtgacaagtctgtactatccactatgtaaatggctcacaagtcaattgcaaacaaactgaatgtacaaatcttagtgctggtgctgaaatctcttcagaatagtcatcatgatttaaaagtttgtttaaaaatttgcaagcatcaagtgtcaatcaaaactgaagatgaaacactaatgaatgttgaattctcatgcttttaggtgtacttcctttttagaattttcagttttctgctatttttaccgtaactatttcgtttaaatttgtttcatttaagtttcctacacgctaacttcgtttgtgcgattgaaataaaattgcagtatatat

SEQ ID NO: 2096 - protein, 77 aa, Homo sapiens [sequence omitted]

SEQ ID NO: 2097 - DNA, 4695 bp, Homo sapiens
gcttgtgtaactgctcaagctgaaaaagttagcaattaccacccagtgtgcaaaatagcattttattcgttctgaaaacacccctcttaaaccttaactaaaagagcacctactgtttcaggattctgttattaaataaattcttgttcactccctttgtgattttataacatttgaacatttctcttcttgccccccattttgtgggataaaaacaactctacttcaaatcctatggtatttaattatttccgagcgttattttgaggttttactttgtactagtaaattcctttacttcagtgattctcagccttggctatccattgaatttaaatgtgaagtattttttaaaatgctgaagctgggacttactcctccttcatgtttttaatacagccactttgactgtaaacaattaaatgtatgtgttcactgttactgaatttactgtctcaacacttaaggttaatgtggattattttgggtctgatatttcaagtagtactaactgccatcctatatactagtttgttttttcagggacgcttacctctcttccaaattttataagtatttattttgcttatttaccaaatccccatgaaaaaaaaaagtcttaattagatgatctgttgcatagttctattactaaagctctaacctaaagtaagtagttatatatacttggaccttacatttcagtatctttcaaaaactgatctagacttttacaactatgataaattggactcattaagtaaatacatgagtcagtttaatttagcatggcattctgcgtaccttcccacataaaataatatcactcagctctattgttgatggtcttacttaacatttctctctctcaggcattgtcttgggaccacttgcacctccacctcctccaccactcccaccagggcctgcacaggcttcagtagccctccctcctcccccagggccccctccacctcctccactcccatccaccgggcctccaccgccccctcctccccctcctctccctaatcaagtaccccctcctcctccaccacctcctgccccacccctccctgcatctggattctttttggcatccatgtcagaagacaatcgccctttaactggacttgcagctgcaattgccggagcaaaacttaggaaagtgtcacggatggaggatacctctttcccaagtggagggaatgctattggtgtgaactccgcctcatctaaaacagatacaggccgtggaaatggaccccttcctttagggggtagtggtttaatggaagaaatgagtgccctgctggccaggaggagaagaattgctgaaaagggatcaacaatagaaacagaacaaaaagaggacaaaggtgaagattcagagcctgtaacttctaaggcctcttcaacaagtacacctgaaccaacaagaaaaccttgggaaagaacaaatacaatgaatggcagcaagtcacctgttatctccagacgggattctccaaggaaaaatcagattgtttttgacaacaggtcctatgattcattacacagaccaaaatccacacccttatcacagcccagtgccaatggagtccagacggaaggacttgactatgacaggctgaagcaggacattttagatgaaatgagaaaagaattaacaaagctaaaagaagagctcattgatgcaatcaggcaggaactgagcaagtcaaatactgcatagaggaacagactaaggagagataggactttaatctggaggaaaaatatcctacaaacaacaactgttcacaacagcaaacccctacatttatgagctgtaagaagaaaatggagacaaacagaaggagggaaaaaccaacctactctgaaagccttcagacattatgactctggtgataagctctttccctctccgtttgctgcttttttctggcctttacaacagaatggaagagaatcatttaagagttcctgtaacagttatgcagaaaatactaaaacccatcaggcaagatcaccacgcattgaaatattttcatatcaagataaagtcgcacattttccacaatacattgctaaaataaagaggagaaaggcttaggaagtttttttgcagagagtgctggtaaagaattgagcaagtttgctattgtattgtaatgtttctctcaggtttgttcttcctatcatgtttgatattccatgaataattgagatcagccctatgtaagttaagatcataatatgtggaacaaatggaattgtaagtgctttcaaagggtaatatttataagaaagtgtccgaaaaatgtttcttcagcttgagaaattttagaatgataggaagtttctcgagttagccttcatgcaattttgtagattaaaacataaaatttgtccagaacttaaagatttagatgccttcctaaattgttacaatgctttaccaaatctatgacttctacataacacaaaccagtggtcaaatgtaaacactatattgtagatttactgtaggttttcaaccttttttagatttatgcatgtggacatttttataatgtaattacaatcaccacaaggttagcttttttaattgcagacagtaatgcatgtcacactaatatgtagtggccttttcaaggcctagtcccagggaaaacattttgtagagtataggggagtgggaggaaggggaggaataattttttatttaaagttgatttctgcactatctttttctcagttacctgcatgaataaataatgagaaatattttgtgactttaattggtaaatatgttacaaaaccaagtacttaatcttttacatcatgtcttcagctatttgtattttaaccagtaatttcaatggtctgaaacatgattctgagcttcacataatatcttaactgtggaactcaaaagtttgatcactgaatttggcagttattattacctaggtacccccgctgttacacaggtgtttagatacgtgttcctgaatgaagctgcttttgaattttgttatgttgaaatgcaagaaataacaatgatggcagcaattaaggtcacagaaatcattaggtaaaggaaaaccaatgaggagttctgcagttttcttttaataagtaaagtgagacttgggtggtgggaagaaggaaggtgggaagaaggaattagacactctgcctgccactctgcgtgtgtgtgctctcgcgcacgtgctgtctatatggaagccactcccttttctttcctttgaaactggtaaggttaaaataggggagaaatcctacatgttggaatgatagctttttggaaaatttaagaaactctccaggctctccatcttgatttatgcttgagttgttatgtgccatatttgctttgaactctgattatcagaagttttactaaaactttgaaataattcactttcatctgctttctagattttgtacatctcagtccataaagcaaagcttgttgatagtgtagttttctaaacgctgcaaatttgcagcctttaccactacaaagaagtttggatgagggattttttttttctttgtcaaaatagttcctgtttctgtagaaatttcatttttagattaaactgtgatggatgagctatcataattcaagtatacatttcttttttctatcagatattcattgtcatgcagtagtagtaaaaacatcaaagatgcagcaagcttattaagtattattttctaaaagaaataggaggcattttcatctttattattgtacttttggttatgcaaacactttgataatataaacagttatgtcccctataaatctggtcagcaacctcttttgattttgttgggtaagttaaatagtctgtagtaggtagagtactgggtacaagtggtccaaactaagataagagactaaaataaaatgctaaatcttaaaagaaactgggtttatgcactaaacgttttgtgccttggtctaatattaacatgatgtatgtgtaaactgacaaaaaaaaaaaaaaaaaaaaaccagtgttgaatcatgctatatttcccatcatcccagattgctaaatgttctttccaagaagtctgaatgaattattatatacatttgctatcatacatgacagttgtgtcattattagagatttcagtaattaaaatgggaaacagaagcctaagttatttaccttatcaaaaccacgttccttggaaccacattattatgatggtttttgtgctcttgtacgttggatgtcttaagctgagtacagtttaggggatcctttctaatgacaggaaggcactgctttcctcaacactgtgatctgacctgtgacaagtctgtactatccactatgtaaatggctcacaagtcaattgcaaacaaactgaatgtacaaatcttagtgctggtgctgaaatctcttcagaatagtcatcatgatttaaaagtttgtttaaaaatttgcaagcatcaagtgtcaatcaaaactgaagatgaaacactaatgaatgttgaattctcatgcttttaggtgtacttcctttttagaattttcagttttctgctatttttaccgtaactatttcgtttaaatttgtttcatttaagtttcctacacgctaacttcgtttgtgcgattgaaataaaattgcagtatatat

SEQ ID NO: 2098 - protein, 210 aa, Homo sapiens [sequence omitted]

SEQ ID NO: 2099 - DNA, 4446 bp, Homo sapiens
ctctgatactaactgtagtctacatttatacattgtgtctgaatgctggttttgtggcttcactagctccctttttctctctccttttttatcctgtcttttgctgctgctttccaccttctgtccagctccatcttcagacagctccctgtataacgctccacttcctgagtattccagttgccagcctccttcagcacctcctccatcatacgctaaagtcatctcagctccagtgtcagatgccactcctgattatgctgtagtgactgctttgccacctacttccacaccccctacaccaccactgcgacactcagcgacacgttttgcaacatctttaggttcagccttccaccctgttcttccccattacgctacagttcctcgtcctctgaacaaaaactctcgaccttcttctcctgtgaacacaccctcttctcagcctccagctacgaagccctgtgcctggtctacttccaatttttcgcccctccctccatctcctccaataatgattagcagccccccaggcaaagctactggtccaaggcctgtcctccctgtttgtgtttcttctcctgtgccccaaatgcctccatcaccgacagcacccaatgggctggttgactctgtaacatatccagtgtctccaccgcctacctcagggccagcagctcctccgccgccgcctccactgccttccctcgcatcactctcacactgtggatctcaagcttctcctcctccaagcacccctattgcctcaactccctcatccaagcctagtgttctcccttctccctctgcagctgcccctgcctctgttgagactcctctccctaatcaagtaccccctcctcctccaccacctcctgccccacccctccctgcatctggattctttttggcatccatgtcagaagacaatcgccctttaactggacttgcagctgcaattgccggagcaaaacttaggaaagtgtcacggatggaggatacctctttcccaagtggagggaatgctattggtgtgaactccgcctcatctaaaacagatacaggccgtggaaatggaccccttcctttagggggtagtggtttaatggaagaaatgagtgccctgctggccaggaggagaagaattgctgaaaagggatcaacaatagaaacagaacaaaaagaggacaaaggtgaagattcagagcctgtaacttctaaggcctcttcaacaagtacacctgaaccaacaagaaaaccttgggaaagaacaaatacaatgaatggcagcaagtcacctgttatctccagaccaaaatccacacccttatcacagcccagtgccaatggagtccagacggaaggacttgactatgacaggctgaagcaggacattttagatgaaatgagaaaagaattaacaaagctaaaagaagagctcattgatgcaatcaggcaggaactgagcaagtcaaatactgcatagaggaacagactaaggagagataggactttaatctggaggaaaaatatcctacaaacaacaactgttcacaacagcaaacccctacatttatgagctgtaagaagaaaatggagacaaacagaaggagggaaaaaccaacctactctgaaagccttcagacattatgactctggtgataagctctttccctctccgtttgctgcttttttctggcctttacaacagaatggaagagaatcatttaagagttcctgtaacagttatgcagaaaatactaaaacccatcaggcaagatcaccacgcattgaaatattttcatatcaagataaagtcgcacattttccacaatacattgctaaaataaagaggagaaaggcttaggaagtttttttgcagagagtgctggtaaagaattgagcaagtttgctattgtattgtaatgtttctctcaggtttgttcttcctatcatgtttgatattccatgaataattgagatcagccctatgtaagttaagatcataatatgtggaacaaatggaattgtaagtgctttcaaagggtaatatttataagaaagtgtccgaaaaatgtttcttcagcttgagaaattttagaatgataggaagtttctcgagttagccttcatgcaattttgtagattaaaacataaaatttgtccagaacttaaagatttagatgccttcctaaattgttacaatgctttaccaaatctatgacttctacataacacaaaccagtggtcaaatgtaaacactatattgtagatttactgtaggttttcaaccttttttagatttatgcatgtggacatttttataatgtaattacaatcaccacaaggttagcttttttaattgcagacagtaatgcatgtcacactaatatgtagtggccttttcaaggcctagtcccagggaaaacattttgtagagtataggggagtgggaggaaggggaggaataattttttatttaaagttgatttctgcactatctttttctcagttacctgcatgaataaataatgagaaatattttgtgactttaattggtaaatatgttacaaaaccaagtacttaatcttttacatcatgtcttcagctatttgtattttaaccagtaatttcaatggtctgaaacatgattctgagcttcacataatatcttaactgtggaactcaaaagtttgatcactgaatttggcagttattattacctaggtacccccgctgttacacaggtgtttagatacgtgttcctgaatgaagctgcttttgaattttgttatgttgaaatgcaagaaataacaatgatggcagcaattaaggtcacagaaatcattaggtaaaggaaaaccaatgaggagttctgcagttttcttttaataagtaaagtgagacttgggtggtgggaagaaggaaggtgggaagaaggaattagacactctgcctgccactctgcgtgtgtgtgctctcgcgcacgtgctgtctatatggaagccactcccttttctttcctttgaaactggtaaggttaaaataggggagaaatcctacatgttggaatgatagctttttggaaaatttaagaaactctccaggctctccatcttgatttatgcttgagttgttatgtgccatatttgctttgaactctgattatcagaagttttactaaaactttgaaataattcactttcatctgctttctagattttgtacatctcagtccataaagcaaagcttgttgatagtgtagttttctaaacgctgcaaatttgcagcctttaccactacaaagaagtttggatgagggattttttttttctttgtcaaaatagttcctgtttctgtagaaatttcatttttagattaaactgtgatggatgagctatcataattcaagtatacatttcttttttctatcagatattcattgtcatgcagtagtagtaaaaacatcaaagatgcagcaagcttattaagtattattttctaaaagaaataggaggcattttcatctttattattgtacttttggttatgcaaacactttgataatataaacagttatgtcccctataaatctggtcagcaacctcttttgattttgttgggtaagttaaatagtctgtagtaggtagagtactgggtacaagtggtccaaactaagataagagactaaaataaaatgctaaatcttaaaagaaactgggtttatgcactaaacgttttgtgccttggtctaatattaacatgatgtatgtgtaaactgacaaaaaaaaaaaaaaaaaaaaaccagtgttgaatcatgctatatttcccatcatcccagattgctaaatgttctttccaagaagtctgaatgaattattatatacatttgctatcatacatgacagttgtgtcattattagagatttcagtaattaaaatgggaaacagaagcctaagttatttaccttatcaaaaccacgttccttggaaccacattattatgatggtttttgtgctcttgtacgttggatgtcttaagctgagtacagtttaggggatcctttctaatgacaggaaggcactgctttcctcaacactgtgatctgacctgtgacaagtctgtactatccactatgtaaatggctcacaagtcaattgcaaacaaactgaatgtacaaatcttagtgctggtgctgaaatctcttcagaatagtcatcatgatttaaaagtttgtttaaaaatttgcaagcatcaagtgtcaatcaaaactgaagatgaaacactaatgaatgttgaattctcatgcttttaggtgtacttcctttttagaattttcagttttctgctatttttaccgtaactatttcgtttaaatttgtttcatttaagtttcctacacgctaacttcgtttgtgcgattgaaataaaattgcagtatatat

SEQ ID NO: 2100 - protein, 323 aa, Homo sapiens; identical to SEQ ID NO: 2092

SEQ ID NO: 2101 - DNA, 5126 bp, Homo sapiens
gggttcctcgcggcgatcccgactctcctcccgcggctgcagcagctgccggttgcacacggcctcggcggcggcgcggcgagcgcgggcctgtggagcggcggccgggcgcgcggccccggcgggcacccctcagagggcggccgaggaagctccgggaggaggagcaggaccacgaggaggtgggaggcggcggccgcctggggaccagctccgcgcctcggcctctccgccccctccccagcctttctctcgccctcttctcccacactcccggccggcgcctcggctttgtgcgaggagatggtgtagccccctggccgccgaaggaggagccggacacttgtctcccgtctccgagctgctccccacccctggaggagagacccccccctcggctcggcgccttctgcgtctcccggctggtggggaagcctctgcgccgccggcaccatgagtgaacagagtatctgtcaggcaagagctgctgtgatggtttatgatgatgccaataagaagtgggtgccagctggtggctcaactggattcagcagagttcatatctatcaccatacaggcaacaacacattcagagtggtgggcaggaagattcaggaccatcaggtcgtgataaactgtgccattcctaaagggttgaagtacaatcaagctacacagaccttccaccagtggcgagatgctagacaggtgtatggtctcaactttggcagcaaagaggatgccaatgtcttcgcaagtgccatgatgcatgccttagaagtgttaaattcacaggaaacagggccaacattgcctagacaaaactcacaactacctgctcaagttcaaaatggcccatcccaagaagaattggaaattcaaagaagacaactacaagaacagcaacggcaaaaggagctggagcgggaaaggctggagcgagaaagaatggaaagagaaaggttggagagagagaggttagaaagggaaaggctggagagggagcgactggaacaagaacagctggagagagagagacaagaacgggaacggcaggaacgcctggagcggcaggaacgcctggagcggcaggaacgcctggagcggcaggaacgcctggatcgggagaggcaagaaagacaagaacgagagaggctggagagactggaacgggagaggcaagaaagggagcgacaagagcagttagaaagggaacagctggaatgggagagagagcgcagaatatcaagtgctgctgcccctgcctctgttgagactcctctaaactctgtgctgggagactcttctgcttctgagccaggcttgcaggcagcctctcagccggccgagactccatcccaacagggcattgtcttgggaccacttgcacctccacctcctccaccactcccaccagggcctgcacaggcttcagtagccctccctcctcccccagggccccctccacctcctccactcccatccaccgggcctccaccgccccctcctccccctcctctccctaatcaagtaccccctcctcctccaccacctcctgccccacccctccctgcatctggattctttttggcatccatgtcagaagacaatcgccctttaactggacttgcagctgcaattgccggagcaaaacttaggaaagtgtcacggatggaggatacctctttcccaagtggagggaatgctattggtgtgaactccgcctcatctaaaacagatacaggccgtggaaatggaccccttcctttagggggtagtggtttaatggaagaaatgagtgccctgctggccaggaggagaagaattgctgaaaagggatcaacaatagaaacagaacaaaaagaggacaaaggtgaagattcagagcctgtaacttctaaggcctcttcaacaagtacacctgaaccaacaagaaaaccttgggaaagaacaaatacaatgaatggcagcaagtcacctgttatctccagaccaaaatccacacccttatcacagcccagtgccaatggagtccagacggaaggacttgactatgacaggctgaagcaggacattttagatgaaatgagaaaagaattaacaaagctaaaagaagagctcattgatgcaatcaggcaggaactgagcaagtcaaatactgcatagaggaacagactaaggagagataggactttaatctggaggaaaaatatcctacaaacaacaactgttcacaacagcaaacccctacatttatgagctgtaagaagaaaatggagacaaacagaaggagggaaaaaccaacctactctgaaagccttcagacattatgactctggtgataagctctttccctctccgtttgctgcttttttctggcctttacaacagaatggaagagaatcatttaagagttcctgtaacagttatgcagaaaatactaaaacccatcaggcaagatcaccacgcattgaaatattttcatatcaagataaagtcgcacattttccacaatacattgctaaaataaagaggagaaaggcttaggaagtttttttgcagagagtgctggtaaagaattgagcaagtttgctattgtattgtaatgtttctctcaggtttgttcttcctatcatgtttgatattccatgaataattgagatcagccctatgtaagttaagatcataatatgtggaacaaatggaattgtaagtgctttcaaagggtaatatttataagaaagtgtccgaaaaatgtttcttcagcttgagaaattttagaatgataggaagtttctcgagttagccttcatgcaattttgtagattaaaacataaaatttgtccagaacttaaagatttagatgccttcctaaattgttacaatgctttaccaaatctatgacttctacataacacaaaccagtggtcaaatgtaaacactatattgtagatttactgtaggttttcaaccttttttagatttatgcatgtggacatttttataatgtaattacaatcaccacaaggttagcttttttaattgcagacagtaatgcatgtcacactaatatgtagtggccttttcaaggcctagtcccagggaaaacattttgtagagtataggggagtgggaggaaggggaggaataattttttatttaaagttgatttctgcactatctttttctcagttacctgcatgaataaataatgagaaatattttgtgactttaattggtaaatatgttacaaaaccaagtacttaatcttttacatcatgtcttcagctatttgtattttaaccagtaatttcaatggtctgaaacatgattctgagcttcacataatatcttaactgtggaactcaaaagtttgatcactgaatttggcagttattattacctaggtacccccgctgttacacaggtgtttagatacgtgttcctgaatgaagctgcttttgaattttgttatgttgaaatgcaagaaataacaatgatggcagcaattaaggtcacagaaatcattaggtaaaggaaaaccaatgaggagttctgcagttttcttttaataagtaaagtgagacttgggtggtgggaagaaggaaggtgggaagaaggaattagacactctgcctgccactctgcgtgtgtgtgctctcgcgcacgtgctgtctatatggaagccactcccttttctttcctttgaaactggtaaggttaaaataggggagaaatcctacatgttggaatgatagctttttggaaaatttaagaaactctccaggctctccatcttgatttatgcttgagttgttatgtgccatatttgctttgaactctgattatcagaagttttactaaaactttgaaataattcactttcatctgctttctagattttgtacatctcagtccataaagcaaagcttgttgatagtgtagttttctaaacgctgcaaatttgcagcctttaccactacaaagaagtttggatgagggattttttttttctttgtcaaaatagttcctgtttctgtagaaatttcatttttagattaaactgtgatggatgagctatcataattcaagtatacatttcttttttctatcagatattcattgtcatgcagtagtagtaaaaacatcaaagatgcagcaagcttattaagtattattttctaaaagaaataggaggcattttcatctttattattgtacttttggttatgcaaacactttgataatataaacagttatgtcccctataaatctggtcagcaacctcttttgattttgttgggtaagttaaatagtctgtagtaggtagagtactgggtacaagtggtccaaactaagataagagactaaaataaaatgctaaatcttaaaagaaactgggtttatgcactaaacgttttgtgccttggtctaatattaacatgatgtatgtgtaaactgacaaaaaaaaaaaaaaaaaaaaaccagtgttgaatcatgctatatttcccatcatcccagattgctaaatgttctttccaagaagtctgaatgaattattatatacatttgctatcatacatgacagttgtgtcattattagagatttcagtaattaaaatgggaaacagaagcctaagttatttaccttatcaaaaccacgttccttggaaccacattattatgatggtttttgtgctcttgtacgttggatgtcttaagctgagtacagtttaggggatcctttctaatgacaggaaggcactgctttcctcaacactgtgatctgacctgtgacaagtctgtactatccactatgtaaatggctcacaagtcaattgcaaacaaactgaatgtacaaatcttagtgctggtgctgaaatctcttcagaatagtcatcatgatttaaaagtttgtttaaaaatttgcaagcatcaagtgtcaatcaaaactgaagatgaaacactaatgaatgttgaattctcatgcttttaggtgtacttcctttttagaattttcagttttctgctatttttaccgtaactatttcgtttaaatttgtttcatttaagtttcctacacgctaacttcgtttgtgcgattgaaataaaattgcagtatatat

SEQ ID NO: 2102 - protein, 570 aa, Homo sapiens; identical to SEQ ID NO: 100

SEQ ID NO: 2103 - DNA, 681 bp, Homo sapiens
ttataggggacataactgtttatattatcaaagtgtttgcataaccaaaagtacaataataaagatgaaaatgcctcctatttcttttagaaaataatacttaataagcttgctgcatctttgatgtttttactactactgcatgacaatgaatatctgatagaaaaaagaaatgtatacttgaattatgatagctcatccatcacagtttaatctaaaaatgaaatttctacagaaacaggaactattttgacaaagaaaaaaaaaatccctcatccaaacttctttgtagtggtaaaggctgcaaatttgcagcgtttagaaaactacactatcaacaagctttgctttatggactgagatgtacaaaatctagaaagcagatgaaagtgaattatttcaaagttttagtaaaacttctgataatcagagttcaaagcaaatatggcacataacaactcaagcataaatcaagatggagagcctggagagtttcttaaattttccaaaaagctatcattccaacatgtaggatttctcccctattttaaccttaccagtttcaaaggaaagaaaagggagtggcttccatatagacagcacgtgcgcgagagcacacacacgcagatggcatcatcataaaccatcacagcagctcttgcctgacagatactctgttca

SEQ ID NO: 2104 - protein, 65 aa, Homo sapiens [sequence omitted]

SEQ ID NO: 2105 - DNA, 2853 bp, Homo sapiens
gggttcctcgcggcgatcccgactctcctcccgcggctgcagcagctgccggttgcacacggcctcggcggcggcgcggcgagcgcgggcctgtggagcggcggccgggcgcgcggccccggcgggcacccctcagagggcggccgaggaagctccgggaggaggagcaggaccacgaggaggtgggaggcggcggccgcctggggaccagctccgcgcctcggcctctccgccccctccccagcctttctctcgccctcttctcccacactcccggccggcgcctcggctttgtgcgaggagatggtgtagccccctggccgccgaaggaggagccggacacttgtctcccgtctccgagctgctccccacccctggaggagagacccccccctcggctcggcgccttctgcgtctcccggctggtggggaagcctctgcgccgccggcaccatgagtgaacagagtatctgtcaggcaagagctgctgtgatggtttatgatgatgccaataagaagtgggtgccagctggtggctcaactggattcagcagagttcatatctatcaccatacaggcaacaacacattcagagtggtgggcaggaagattcaggaccatcaggtcgtgataaactgtgccattcctaaagggttgaagtacaatcaagctacacagaccttccaccagtggcgagatgctagacaggtgtatggtctcaactttggcagcaaagaggatgccaatgtcttcgcaagtgccatgatgcatgccttagaagtgttaaattcacaggaaacagggccaacattgcctagacaaaactcacaactacctgctcaagttcaaaatggcccatcccaagaagaattggaaattcaaagaagacaactacaagaacagcaacggcaaaaggagctggagcgggaaaggctggagcgagaaagaatggaaagagaaaggttggagagagagaggttagaaagggaaaggctggagagggagcgactggaacaagaacagctggagagagagagacaagaacgggaacggcaggaacgcctggagcggcaggaacgcctggagcggcaggaacgcctggagcggcaggaacgcctggatcgggagaggcaagaaagacaagaacgagagaggctggagagactggaacgggagaggcaagaaagggagcgacaagagcagttagaaagggaacagctggaatgggagagagagcgcagaatatcaagtgctgctgcccctgcctctgttgagactcctctaaactctgtgctgggagactcttctgcttctgagccaggcttgcaggcagcctctcagccggccgagactccatcccaacagggcattgtcttgggaccacttgcacctccacctcctccaccactcccaccagggcctgcacaggcttcagtagccctccctcctcccccagggccccctccacctcctccactcccatccaccgggcctccaccgccccctcctccccctcctctccctaatcaagtaccccctcctcctccaccacctcctgccccacccctccctgcatctggattctttttggcatccatgtcagaagacaatcgccctttaactggacttgcagctgcaattgccggagcaaaacttaggaaagtgtcacggatggaggatacctctttcccaagtggagggaatgctattggtgtgaactccgcctcatctaaaacagatacaggccgtggaaatggaccccttcctttagggggtagtggtttaatggaagaaatgagtgccctgctggccaggaggagaagaattgctgaaaagggatcaacaatagaaacagaacaaaaagaggacaaaggtgaagattcagagcctgtaacttctaaggcctcttcaacaagtacacctgaaccaacaagaaaaccttgggaaagaacaaatacaatgaatggcagcaagtcacctgttatctccagaccaaaatccacacccttatcacagcccagtgccaatggagtccagacggaaggacttgactatgacaggctgaagcaggacattttagatgaaatgagaaaagaattaacaaagctaaaagaagagctcattgatgcaatcaggcaggaactgagcaagtcaaatactgcatagaggaacagactaaggagagataggactttaatctggaggaaaaatatcctacaaacaacaactgttcacaacagcaaacccctacatttatgagctgtaagaagaaaatggagacaaacagaaggagggaaaaaccaacctactctgaaagccttcagacattatgactctggtgataagctctttccctctccgtttgctgcttttttctggcctttacaacagaatggaagagaatcatttaagagttcctgtaacagttatgcagaaaatactaaaacccatcaggcaagatcaccacgcattgaaatattttcatatcaagataaagtcgcacattttccacaatacattgctaaaataaagaggagaaaggcttaggaagtttttttgcagagagtgctggtaaagaattgagcaagtttgctattgtattgtaatgtttctctcaggtttgttcttcctatcatgtttgatattccatgaataattgagatcagccctatgtaagttaagatcataatatgtggaacaaatggaattgtaagtgctttcaaagggtaatatttataagaaagtgtccgaaaaatgtttcttcagcttgagaaattttagaatgataggaagtttctcgagttagccttcatgcaattttgtagattaaaacataaaatttgtccagaactt

SEQ ID NO: 2106 - protein, 570 aa, Homo sapiens; identical to SEQ ID NO: 100

SEQ ID NO: 2107 - DNA, 1043 bp, Homo sapiens
agaaaagtgaaaaaatgttgttttatgttctaatcagccctacaattttgataattttttaagaaaatggcttttttaaagaaatgtatttaaatctggtgttgggttggtaaatttgcaattatttatgaactcattaagtattaagaatgttgtttacctgtcctggaaatctcatttatacagaccaaaatccacacccttatcacagcccagtgccaatggagtccagacggaaggacttgactatgacaggctgaagcaggacattttagatgaaatgagaaaagaattaacaaagctaaaagaagagctcattgatgcaatcaggcaggaactgagcaagtcaaatactgcatagaggaacagactaaggagagataggactttaatctggaggaaaaatatcctacaaacaacaactgttcacaacagcaaacccctacatttatgagctgtaagaagaaaatggagacaaacagaaggagggaaaaaccaacctactctgaaagccttcagacattatgactctggtgataagctctttccctctccgtttgctgcttttttctggcctttacaacagaatggaagagaatcatttaagagttcctgtaacagttatgcagaaaatactaaaacccatcaggcaagatcaccacgcattgaaatattttcatatcaagataaagtcgcacattttccacaatacattgctaaaataaagaggagaaaggcttaggaagtttttttgcagagagtgctggtaaagaattgagcaagtttgctattgtattgtaatgtttctctcaggtttgttcttcctatcatgtttgatattccatgaataattgagatcagccctatgtaagttaagatcataatatgtggaacaaatggaattgtaagtgctttcaaagggtaatatttataagaaagtgtccgaaaaatgtttcttcagcttgagaaattttagaatgataggaagtttctcgagttagccttcatgcaattttgtagattaaaacataaaatttgtccag

SEQ ID NO: 2108 - protein, 77 aa, Homo sapiens [sequence omitted]

SEQ ID NO: 2109 - DNA, 1328 bp, Homo sapiens
ccctaatcaagtaccccctcctcctccaccacctcctgccccacccctccctgcatctggattctttttggcatccatgtcagaagacaatcgccctttaactggacttgcagctgcaattgccggagcaaaacttaggaaagtgtcacggatggaggatacctctttcccaagtggagggaatgctattggtgtgaactccgcctcatctaaaacagatacaggccgtggaaatggaccccttcctttagggggtagtggtttaatggaagaaatgagtgccctgctggccaggaggagaagaattgctgaaaagggatcaacaatagaaacagaacaaaaagaggacaaaggtgaagattcagagcctgtaacttctaaggcctcttcaacaagtacacctgaaccaacaagaaaaccttgggaaagaacaaatacaatgaatggcagcaagtcacctgttatctccagaccaaaatccacacccttatcacagcccagtgccaatggagtccagacggaaggacttgactatgacaggctgaagcaggacattttagatgaaatgagaaaagaattaacaaagctaaaagaagagctcattgatgcaatcaggcaggaactgagcaagtcaaatactgcatagaggaacagactaaggagagataggactttaatctggaggaaaaatatcctacaaacaacaactgttcacaacagcaaacccctacatttatgagctgtaagaagaaaatggagacaaacagaaggagggaaaaaccaacctactctgaaagccttcagacattatgactctggtgataagctctttccctctccgtttgctgcttttttctggcctttacaacagaatggaagagaatcatttaagagttcctgtaacagttatgcagaaaatactaaaacccatcaggcaagatcaccacgcattgaaatattttcatatcaagataaagtcgcacattttccacaatacattgctaaaataaagaggagaaaggcttaggaagtttttttgcagagagtgctggtaaagaattgagcaagtttgctattgtattgtaatgtttctctcaggtttgttcttcctatcatgtttgatattccatgaataattgagatcagccctatgtaagttaagatcataatatgtggaacaaatggaattgtaagtgctttcaaagggtaatatttataagaaagtgtccgaaaaatgtttcttcagcttgagaaattttagaatgataggaagtttctcgagttagccttcatgcaattttgtagattaaaacataaaatttgtccag

SEQ ID NO: 2110 - protein, 189 aa, Homo sapiens
MSEDNRPLTGLAAAIAGAKLRKVSRMEDTSFPSGGNAIGVNSASSKTDTGRGNGPLPLGGSGLMEEMSALLARRRRIAEKGSTIETEQKEDKGEDSEPVTSKASSTSTPEPTRKPWERTNTMNGSKSPVISRPKSTPLSQPSANGVQTEGLDYDRLKQDILDEMRKELTKLKEELIDAIRQELSKSNTA

SEQ ID NO: 2111 - DNA, 317 bp, Homo sapiens
tcctccaccacctcctgccccacccctccctgcatctggattctttttggcatccatgtcagaagacaatcgccctttaactggacttgcagctgcaattgccggagcaaaacttaggaaagtgtcacggatggaggatacctctttcccaagtggagggaatgctattggtgtgaactccgcctcatctaaaacagatacaggccgtggaaatggaccccttcctttagggggtagtggtttaatggaagaaatgagtgccctgctggccaggaggagaagaattgctgaaaagggatcaacaatagaaacagaac

SEQ ID NO: 2112 - protein, 86 aa, Homo sapiens
MSEDNRPLTGLAAAIAGAKLRKVSRMEDTSFPSGGNAIGVNSASSKTDTGRGNGPLPLGGSGLMEEMSALLARRRRIAEKGSTIET

SEQ ID NO: 2113 - DNA, 637 bp, Homo sapiens
tgacatttattgtatgtcctcaataaaggtgttggccaggcactgtgactcaagcttataatccagcactgctgggattacaggcatgagccaccacacctggcctcctgtattttttaaatataacttaattttgctattgtcctctttagttgaattatcatagtagatatccattgccagcattccttcttccattttagaactctgttccttctacccattggtgcccaccacagtacctcatcccccattaaagaagaagggacaaagatgcaagttggactttaccagtctttttcaggattttcctccctgaagattacaggaaacatcctttgactctccatttatgaaagctggaataatgggaatctagaaaaaccatgaagaaagactgcagggaaaaaaaataaagctaagcaaatatgaaagagtcctatttaaccaaaatggtcagctctgttctcatctttgaggtcctcaagctgccctagctccagcaactctcactttgcctctaccaggagaactaacttgagtttctatcagtgccaacaaaaaaatcttgtctgataaacagtcagcttaagtacaaactgggtatcgttctactgaggttaaatgctacagtttg

SEQ ID NO: 2114 - protein, 49 aa, Homo sapiens
ISIASIPSSILELCSFYPLVPTTVPHPPLKKKGQRCKLDFTSLFQDFPP

SEQ ID NO: 2115 - DNA, 416 bp, Homo sapiens
gactgctctgatcactacgtgctgtgaagggcacggtgccagcctctgatctgggtccttgctgccatatgaagacacccacctaccctgctggagaggggctctggagggccagggagagagaggatagctgggctccagtcggtgccccatccagagcccacagacaggacaaagccatcccgggccctccagcccccgttggccatcgcagcacacgccacctgcacaaagatccggcaggcaccgggagccggctggcaggtacctctgagcacactggattaattcccagggcggccgtcacagcagtgacgttggcactgaccacccacggaaaggacagaatttaaagaggctgagtttttcatctctctctgctgttttctctctggtttcccttttaccattttgac

SEQ ID NO: 2116 - protein, 94 aa, Homo sapiens
MKTPTYPAGEGLWRAREREDSWAPVGAPSRAHRQDKAIPGPPAPVGHRSTRHLHKDPAGTGSRLAGTSEHTGLIPRAAVTAVTLALTTHGKDRI

SEQ ID NO: 2117 - DNA, 435 bp, Homo sapiens
cctggatctactctagatgtacagccctttcagaatctttgaagaagagtgatttgggccagtcagtgggcactggcgccgtcagattgcaggggacctgaggagggagaggaaataaacaccatgctcagtcatcttgaatcagaatccagccaagtctgtcgaacagaggactggtgccaggtgctttggccttgggctaaggggctgttcaggaagaggtgggcgaggaggatccgtggctcgcctggtcacaagcatgttgagatgaatccagcctggtgccacctacagccgtgaaggcccgcggtctgaccctataatgtgctgccttcctgagacggctgcacttctgcaaagccctcgtgccctcatgtcctagccatgaaatcatgcagactttcgatcacaggccttagcagtgagaaacagaaa

SEQ ID NO: 2118 - protein, 58 aa, Homo sapiens
MLSHLESESSQVCRTEDWCQVLWPWAKGLFRKRWARRIRGSPGHKHVEMNPAWCHLQP

SEQ ID NO: 2119 - DNA, 1229 bp, Homo sapiens
atgctttcattctcaagatgataccaagtcacatttttgacggctacaaagcaaaaattccttccacggctcgcccagagggtcacagatacgcttctggagagatgagcgtggtgcgaccacacagggttgctgggatggaggaggtggcgccagcctcttcctgcagggcaggaacgccgaggggatgagagcaccctgggccgggggattagacagggtcccgggaaaccagtgtgtgcccgcagcacgcagtggcttttcctaatccatttactattttcctttgctgttcttccttctccctcagccagatctactgcatagagaatgcccacggacagctggtgcgggaccttgactttaatcccaataagcagtactacttggccagctgcggagacgactgtaaggtgaagttctgggacacccgaaatgtcaccgaacccgtgaagaccctggaggagcactcccactgggtgtggaacgtccgctacaaccactctcatgaccagctggtcctcacgggcagcagtgacagcagagtcatcctttccaacatggtgtccatctcgtcggagcccttcggccacttggtagacgacgatgacatcagtgaccaggaggaccaccgttctgaagagaagagcaaggagcccctgcaggacaacgtgatcgccacctacgaggagcacgaggacagcgtctatgccgtggactggtcctcggctgacccgtggctgtttgcctccctgagctatgacgggaggctcgtgatcaacagggtgcccagggccctgaagtaccacatcctgctatgactcccgggcctgggttatccaggtcccattgagtggttttcctcttggcagattctcaaacagtcgcagctctttggaggtgactcgtgttccaggtggatccctctctgggagagccgctgttcccttcctgtagcagcagcatttatgaatggggtgaatggggctattgtcgacggcacagctaatgcccgaacccagcccctgtcggcagagacagagccccacattattatgtgaataacaatgttttctgttttaagggtgtcaggagtttcgctttttaaaaaaatgtctgttcctgcaatagtaactcttctttctcttgagagtaaaaaatgaaataaaataaatccacgctgcacaggtgctcggctcattctttcaggagctctgccctgtgacccc

SEQ ID NO: 2120 - protein, 86 aa, Homo sapiens [sequence omitted]

SEQ ID NO: 2121 - DNA, 1289 bp, Homo sapiens
actctatctctgtattgttatttggagaaggttctataaatggaatcacccacagtgtaacctttaataactgatgttctttactcggcttgattccctggaggttgagttgctgcttcattttcaagtttgggttccagccaccatgcgtgctggtcagtggctggttcctctttgctgcggcgggatatcccatggcatgacgcaccacggaaagctcgagccaggctgtgctggccagctcagcgtccctggaagggaagggacaactgaagttcacctcaggacggtggagcccacatcataactgcacccaggtggccacagcgaacgacaccaccctccgtggctgggacacccggagcatgagccagatctactgcatagagaatgcccacggacagctggtgcgggaccttgactttaatcccaataagcagtactacttggccagctgcggagacgactgtaaggtgaagttctgggacacccgaaatgtcaccgaacccgtgaagaccctggaggagcactcccactgggtgtggaacgtccgctacaaccactctcatgaccagctggtcctcacgggcagcagtgacagcagagtcatcctttccaacatggtgtccatctcgtcggagcccttcggccacttggtagacgacgatgacatcagtgaccaggaggaccaccgttctgaagagaagagcaaggagcccctgcaggacaacgtgatcgccacctacgaggagcacgaggacagcgtctatgccgtggactggtcctcggctgacccgtggctgtttgcctccctgagctatgacgggaggctcgtgatcaacagggtgcccagggccctgaagtaccacatcctgctatgactcccgggcctgggttatccaggtcccattgagtggttttcctcttggcagattctcaaacagtcgcagctctttggaggtgactcgtgttccaggtggatccctctctgggagagccgctgttcccttcctgtagcagcagcatttatgaatggggtgaatggggctattgtcgacggcacagctaatgcccgaacccagcccctgtcggcagagacagagccccacattattatgtgaataacaatgttttctgttttaagggtgtcaggagtttcgctttttaaaaaaatgtctgttcctgcaatagtaactcttctttctcttgagagtaaaaaatgaaataaaataaatccacgctgcacaggtgctcggctcattctttcaggagctctgccctgtgacccc

SEQ ID NO: 2122 - protein, 171 aa, Homo sapiens
MSQIYCIENAHGQLVRDLDFNPNKQYYLASCGDDCKVKFWDTRNVTEPVKTLEEHSHWVWNVRYNHSHDQLVLTGSSDSRVILSNMVSISSEPFGHLVDDDDISDQEDHRSEEKSKEPLQDNVIATYEEHEDSVYAVDWSSADPWLFASLSYDGRLVINRVPRALKYHILL

SEQ ID NO: 2123 - DNA, 2755 bp, Homo sapiens
aaatagttcatttgttagtgataaatgttaacatagcctagcaaagagagcgtctgtgccctcccaccttagtgcaagaagaggaagcagagttgctgggggctgcctctgggactttgtatgcaggacctggagcacacaggtgcagtgttgtccgcaggtgtggtgttttcctgcccgcaggtgcggtgttgcccacaggtgtcgtgctgtctgcaggtgcggtgttgtcctgcccgcaggtgtggtgtcatccgcaggtatagtgttgtctgcaggtgtggtgttgccctgcctgcaggtgtggtgttggctgcaggtgtgttatccccaggtatggtgttgccctgcctgcaggtgcgggtcacccataggtgcggtgttgcctgcaggggtggtgttgcccgcaggggtggtgttgcccccaggggcggtgttgccctgcctgcaggtgcggtgttgcccgcaggtgtgatattgctctgcctgcaggggtggtgttgcccgcaggtgcagtattgctctgcctcaggggtggtgttgcccgcaggtgtggtattgctctgcctcaggggtggtgttgcccgcaggggtggtgttgcccgcaggtgcagtattgccctgcccacaggtgcggtgttgtccacaggtgcggtgttgtccacaggggtggtgttgcccgcaggggtggttgttgtttgctggagggaggaagagcacaccgggcgtggtggacagaacagcctcgactgtagccggtaacgggataacgaagatgaccgtgaagatgatgacaatgacagctcccatcgagtgctcatgtgccaggcacggggatcggcgctttctgggaatgatcaagttgagtcctctgtgccattggccttttcccctgagggagttgttgcaatgacctgccgggccagcagcgctaattaggagcacacagcgcacttccagagcacctgacctacagctacaaggcttcaaggatgctgcttctgaggagacatcatagaatcgtttggcattcttcctgtagctcagagtcccacgattgtctttgtaaacacgttgcaccaggtcttcttcaggggacaggtcgcaggacagcgtgcatttgacggtctgtgtacacacatcatgtgcctgagggcctgggaatctgctctaacaagactccacagctggcactgtggatctgagtgggctcctgctttgttgagcttagagtcatccacaggcattctccagggcccattagctttctgcagaagccaatggtgaattcagcaaagccacacccacttcatatccttgattcttaaagtcacaggcccggtatgggtatttcacaaactgcccaggatgtcaatcccatttgaccttaacagaccttggagttgcccaccaggtgcgcccacagactcagaggatctgcgcttcagacagcaaagtcctgacatgtgcagccgtgtggaggatgccgaaggaattggaatcaggcagccacgagtcccctgatgattcatccagcactgcacagaccctggagctgctctgtcaccttgacaacacagcccatggcaacatggcctgtgtcgtgtgggagccaatgggagatgggaagaaaatcatttccttggctgataaccatatcctgctgtgggatttacaggaaagctcgagccaggctgtgctggccagctcagcgtccctggaagggaagggacaactgaagttcacctcaggacggtggagcccacatcataactgcacccaggtggccacagcgaacgacaccaccctccgtggctgggacacccggagcatgagccagatctactgcatagagaatgcccacggacagctggtgcgggaccttgactttaatcccaataagcagtactacttggccagctgcggagacgactgtaaggtgaagttctgggacacccgaaatgtcaccgaacccgtgaagaccctggaggagcactcccactgggtgtggaacgtccgctacaaccactctcatgaccagctggtcctcacgggcagcagtgacagcagagtcatcctttccaacatggtgtccatctcgtcggagcccttcggccacttggtagacgacgatgacatcagtgaccaggaggaccaccgttctgaagagaagagcaaggagcccctgcaggacaacgtgatcgccacctacgaggagcacgaggacagcgtctatgccgtggactggtcctcggctgacccgtggctgtttgcctccctgagctatgacgggaggctcgtgatcaacagggtgcccagggccctgaagtaccacatcctgctatgactcccgggcctgggttatccaggtcccattgagtggttttcctcttggcagattctcaaacagtcgcagctctttggaggtgactcgtgttccaggtggatccctctctgggagagccgctgttcccttcctgtagcagcagcatttatgaatggggtgaatggggctattgtcgacggcacagctaatgcccgaacccagcccctgtcggcagagacagagccccacattattatgtgaataacaatgttttctgttttaagggtgtcaggagtttcgctttttaaaaaaatgtctgttcctgcaatagtaactcttctttctcttgagagtaaaaaatgaaataaaataaatccacgctgcacaggtgctcggctcattctttcaggagctctgccctgtgacccc

SEQ ID NO: 2124 - protein, 287 aa, Homo sapiens
MPKELESGSHESPDDSSSTAQTLELLCHLDNTAHGNMACVVWEPMGDGKKIISLADNHILLWDLQESSSQAVLASSASLEGKGQLKFTSGRWSPHHNCTQVATANDTTLRGWDTRSMSQIYCIENAHGQLVRDLDFNPNKQYYLASCGDDCKVKFWDTRNVTEPVKTLEEHSHWVWNVRYNHSHDQLVLTGSSDSRVILSNMVSISSEPFGHLVDDDDISDQEDHRSEEKSKEPLQDNVIATYEEHEDSVYAVDWSSADPWLFASLSYDGRLVINRVPRALKYHILL

SEQ ID NO: 2125 - DNA, 1336 bp, Homo sapiens
aagacttccagtttggagtcgtttgctgcggggagggaatgaatgggcgctgggaacacgcccgcgaggtggggacgcgccggccgtagcgaggtccttagcgtgtgagtggccggggtcgggtcgcttccccgcagcatggaggacgatgcaccagtgatctacgggctggagttccagtgtcgtgtgggagccaatgggagatgggaagaaaatcatttccttggctgataaccatatcctgctgtgggatttacaggaaagctcgagccaggctgtgctggccagctcagcgtccctggaagggaagggacaactgaagttcacctcaggacggtggagcccacatcataactgcacccaggtggccacagcgaacgacaccaccctccgtggctgggacacccggagcatgagccagatctactgcatagagaatgcccacggacagctggtgcgggaccttgactttaatcccaataagcagtactacttggccagctgcggagacgactgtaaggtgaagttctgggacacccgaaatgtcaccgaacccgtgaagaccctggaggagcactcccactgggtgtggaacgtccgctacaaccactctcatgaccagctggtcctcacgggcagcagtgacagcagagtcatcctttccaacatggtgtccatctcgtcggagcccttcggccacttggtagacgacgatgacatcagtgaccaggaggaccaccgttctgaagagaagagcaaggagcccctgcaggacaacgtgatcgccacctacgaggagcacgaggacagcgtctatgccgtggactggtcctcggctgacccgtggctgtttgcctccctgagctatgacgggaggctcgtgatcaacagggtgcccagggccctgaagtaccacatcctgctatgactcccgggcctgggttatccaggtcccattgagtggttttcctcttggcagattctcaaacagtcgcagctctttggaggtgactcgtgttccaggtggatccctctctgggagagccgctgttcccttcctgtagcagcagcatttatgaatggggtgaatggggctattgtcgacggcacagctaatgcccgaacccagcccctgtcggcagagacagagccccacattattatgtgaataacaatgttttctgttttaagggtgtcaggagtttcgctttttaaaaaaatgtctgttcctgcaatagtaactcttctttctcttgagagtaaaaaatgaaataaaataaatccacgctgcacaggtgctcggctcattctttcaggagctctgccctgtgacccc

SEQ ID NO: 2126 - protein, 243 aa, Homo sapiens
MGDGKKIISLADNHILLWDLQESSSQAVLASSASLEGKGQLKFTSGRWSPHHNCTQVATANDTTLRGWDTRSMSQIYCIENAHGQLVRDLDFNPNKQYYLASCGDDCKVKFWDTRNVTEPVKTLEEHSHWVWNVRYNHSHDQLVLTGSSDSRVILSNMVSISSEPFGHLVDDDDISDQEDHRSEEKSKEPLQDNVIATYEEHEDSVYAVDWSSADPWLFASLSYDGRLVINRVPRALKYHILL

SEQ ID NO: 2127 - DNA, 1747 bp, Homo sapiens
taggaagtggccactacggaagctgttctgggccagaaagacttccagtttggagtcgtttgctgcggggagggaatgaatgggcgctgggaacacgcccgcgaggtggggacgcgccggccgtagcgaggtccttagcgtgtgagtggccggggtcgggtcgcttccccgcagcatggaggacgatgcaccagtgatctacgggctggagttccaggcacgtgccttaacacctcaaactgcagaaacagatgccattcggtttttggttgggacgcagtctcttaaatatgataatcagatccatatcatagattttgacgatgaaaacaacattataaataaaaatgtcctcctccatcaagcgggtgaaatctggcatattagcgctagccctgcagacagaggtgtgctgacgacctgctacaacagaacttcagacagcaaagtcctgacatgtgcagccgtgtggaggatgccgaaggaattggaatcaggcagccacgagtcccctgatgattcatccagcactgcacagaccctggagctgctctgtcaccttgacaacacagcccatggcaacatggcctgtgtcgtgtgggagccaatgggagatgggaagaaaatcatttccttggctgataaccatatcctgctgtgggatttacaggaaagctcgagccaggctgtgctggccagctcagcgtccctggaagggaagggacaactgaagttcacctcaggacggtggagcccacatcataactgcacccaggtggccacagcgaacgacaccaccctccgtggctgggacacccggagcatgagccagatctactgcatagagaatgcccacggacagctggtgcgggaccttgactttaatcccaataagcagtactacttggccagctgcggagacgactgtaaggtgaagttctgggacacccgaaatgtcaccgaacccgtgaagaccctggaggagcactcccactgggtgtggaacgtccgctacaaccactctcatgaccagctggtcctcacgggcagcagtgacagcagagtcatcctttccaacatggtgtccatctcgtcggagcccttcggccacttggtagacgacgatgacatcagtgaccaggaggaccaccgttctgaagagaagagcaaggagcccctgcaggacaacgtgatcgccacctacgaggagcacgaggacagcgtctatgccgtggactggtcctcggctgacccgtggctgtttgcctccctgagctatgacgggaggctcgtgatcaacagggtgcccagggccctgaagtaccacatcctgctatgactcccgggcctgggttatccaggtcccattgagtggttttcctcttggcagattctcaaacagtcgcagctctttggaggtgactcgtgttccaggtggatccctctctgggagagccgctgttcccttcctgtagcagcagcatttatgaatggggtgaatggggctattgtcgacggcacagctaatgcccgaacccagcccctgtcggcagagacagagccccacattattatgtgaataacaatgttttctgttttaagggtgtcaggagtttcgctttttaaaaaaatgtctgttcctgcaatagtaactcttctttctcttgagagtaaaaaatgaaataaaataaatccacgctgcacaggtgctcggctcattctttcaggagctctgccctgtgacccc

SEQ ID NO: 2128 - protein, 387 aa, Homo sapiens; identical to SEQ ID NO: 102

SEQ ID NO: 2129 - DNA, 1704 bp, Homo sapiens
taggaagtggccactacggaagctgttctgggccagaaagacttccagtttggagtcgtttgctgcggggagggaatgaatgggcgctgggaacacgcccgcgaggtggggacgcgccggccgtagcgaggtccttagcgtgtgagtggccggggtcgggtcgcttccccgcagcatggaggacgatgcaccagtgatctacgggctggagttccaggcacgtgccttaacacctcaaactgcagaaacagatgccattcggtttttggttgggacgcagtctcttaaatatgataatcagatccatatcatagattttgacgatgaaaacaacattataaataaaaatgtcctcctccatcaagcgggtgaaatctggcatattagcgctagccctgcagacagaggtgtgctgacgacctgctacaacagaacttcagacagcaaagtcctgacatgtgcagccgtgtggaggatgccgaaggaattggaatcaggcagccacgagtcccctgatgattcatccagcactgcacagaccctggagctgctctgtcaccttgacaacacagcccatggcaacatggcctgtgtcgtgtgggagccaatgggagatgggaagaaaatcatttccttggctgataaccatatcctgctgtgggatttacaggaaagctcgagccaggctgtgctggccagctcagcgtccctggaagggaagggacaactgaagttcacctcaggacggtggagcccacatcataactgcacccaggtggccacagcgaacgacaccaccctccgtggctgggacacccggagcatgagccagatctactgcatagagaatgcccacggacagctggtgcgggaccttgactttaatcccaataagcagtactacttggccagctgcggagacgactgtaaggtgaagttctgggacacccgaaatgtcaccgaacccgtgaagaccctggaggagcactcccactgggtgtggaacgtccgctacaaccactctcatgaccagctggtcctcacgggcagcagtgacagcagagtcatcctttccaacatggtgtccatctcgtcggagcccttcggccacttggtagacgacgatgacatcagtgaccaggaggaccaccgttctgaagagaagagcaaggagcccctgcaggacaacgtgatcgccacctacgaggagcacgaggacagcgtctatgccgtggactggtcctcggctgacccgtggctgtttgcctccctgagctatgacgggaggctcgtgatcaacagggtgcccagggccctgaagtaccacatcctgctatgactcccgggcctgggttatccaggtcccattgagtggttttcctcttggcagattctcaaacagtcgcagctctttggaggtgactcgtgttccaggtggatccctctctgggagagccgctgttcccttcctgtagcagcagcatttatgaatggggtgaatggggctattgtcgacggcacagctaatgcccgaacccagcccctgtcggcagagacagagccccacattattatgtgaataacaatgttttctgttttaagggtgtcaggagtttcgctttttaaaaaaatgtctgttcctgcaatagtaactcttctttctcttgagagtaaaaaatgaaataaaataaatccacgctgcac

SEQ ID NO: 2130 - protein, 387 aa, Homo sapiens; identical to SEQ ID NO: 102

SEQ ID NO: 2131 - DNA, 1186 bp, Homo sapiens
atgctttcattctcaagatgataccaagtcacatttttgacggctacaaagcaaaaattccttccacggctcgcccagagggtcacagatacgcttctggagagatgagcgtggtgcgaccacacagggttgctgggatggaggaggtggcgccagcctcttcctgcagggcaggaacgccgaggggatgagagcaccctgggccgggggattagacagggtcccgggaaaccagtgtgtgcccgcagcacgcagtggcttttcctaatccatttactattttcctttgctgttcttccttctccctcagccagatctactgcatagagaatgcccacggacagctggtgcgggaccttgactttaatcccaataagcagtactacttggccagctgcggagacgactgtaaggtgaagttctgggacacccgaaatgtcaccgaacccgtgaagaccctggaggagcactcccactgggtgtggaacgtccgctacaaccactctcatgaccagctggtcctcacgggcagcagtgacagcagagtcatcctttccaacatggtgtccatctcgtcggagcccttcggccacttggtagacgacgatgacatcagtgaccaggaggaccaccgttctgaagagaagagcaaggagcccctgcaggacaacgtgatcgccacctacgaggagcacgaggacagcgtctatgccgtggactggtcctcggctgacccgtggctgtttgcctccctgagctatgacgggaggctcgtgatcaacagggtgcccagggccctgaagtaccacatcctgctatgactcccgggcctgggttatccaggtcccattgagtggttttcctcttggcagattctcaaacagtcgcagctctttggaggtgactcgtgttccaggtggatccctctctgggagagccgctgttcccttcctgtagcagcagcatttatgaatggggtgaatggggctattgtcgacggcacagctaatgcccgaacccagcccctgtcggcagagacagagccccacattattatgtgaataacaatgttttctgttttaagggtgtcaggagtttcgctttttaaaaaaatgtctgttcctgcaatagtaactcttctttctcttgagagtaaaaaatgaaataaaataaatccacgctgcac

SEQ ID NO: 2132 - protein, 86 aa, Homo sapiens [sequence omitted]

SEQ ID NO: 2133 - DNA, 1246 bp, Homo sapiens
actctatctctgtattgttatttggagaaggttctataaatggaatcacccacagtgtaacctttaataactgatgttctttactcggcttgattccctggaggttgagttgctgcttcattttcaagtttgggttccagccaccatgcgtgctggtcagtggctggttcctctttgctgcggcgggatatcccatggcatgacgcaccacggaaagctcgagccaggctgtgctggccagctcagcgtccctggaagggaagggacaactgaagttcacctcaggacggtggagcccacatcataactgcacccaggtggccacagcgaacgacaccaccctccgtggctgggacacccggagcatgagccagatctactgcatagagaatgcccacggacagctggtgcgggaccttgactttaatcccaataagcagtactacttggccagctgcggagacgactgtaaggtgaagttctgggacacccgaaatgtcaccgaacccgtgaagaccctggaggagcactcccactgggtgtggaacgtccgctacaaccactctcatgaccagctggtcctcacgggcagcagtgacagcagagtcatcctttccaacatggtgtccatctcgtcggagcccttcggccacttggtagacgacgatgacatcagtgaccaggaggaccaccgttctgaagagaagagcaaggagcccctgcaggacaacgtgatcgccacctacgaggagcacgaggacagcgtctatgccgtggactggtcctcggctgacccgtggctgtttgcctccctgagctatgacgggaggctcgtgatcaacagggtgcccagggccctgaagtaccacatcctgctatgactcccgggcctgggttatccaggtcccattgagtggttttcctcttggcagattctcaaacagtcgcagctctttggaggtgactcgtgttccaggtggatccctctctgggagagccgctgttcccttcctgtagcagcagcatttatgaatggggtgaatggggctattgtcgacggcacagctaatgcccgaacccagcccctgtcggcagagacagagccccacattattatgtgaataacaatgttttctgttttaagggtgtcaggagtttcgctttttaaaaaaatgtctgttcctgcaatagtaactcttctttctcttgagagtaaaaaatgaaataaaataaatccacgctgcac

SEQ ID NO: 2134 - protein, 171 aa, Homo sapiens; identical to SEQ ID NO: 2122

SEQ ID NO: 2135 - DNA, 2712 bp, Homo sapiens
aaatagttcatttgttagtgataaatgttaacatagcctagcaaagagagcgtctgtgccctcccaccttagtgcaagaagaggaagcagagttgctgggggctgcctctgggactttgtatgcaggacctggagcacacaggtgcagtgttgtccgcaggtgtggtgttttcctgcccgcaggtgcggtgttgcccacaggtgtcgtgctgtctgcaggtgcggtgttgtcctgcccgcaggtgtggtgtcatccgcaggtatagtgttgtctgcaggtgtggtgttgccctgcctgcaggtgtggtgttggctgcaggtgtgttatccccaggtatggtgttgccctgcctgcaggtgcgggtcacccataggtgcggtgttgcctgcaggggtggtgttgcccgcaggggtggtgttgcccccaggggcggtgttgccctgcctgcaggtgcggtgttgcccgcaggtgtgatattgctctgcctgcaggggtggtgttgcccgcaggtgcagtattgctctgcctcaggggtggtgttgcccgcaggtgtggtattgctctgcctcaggggtggtgttgcccgcaggggtggtgttgcccgcaggtgcagtattgccctgcccacaggtgcggtgttgtccacaggtgcggtgttgtccacaggggtggtgttgcccgcaggggtggttgttgtttgctggagggaggaagagcacaccgggcgtggtggacagaacagcctcgactgtagccggtaacgggataacgaagatgaccgtgaagatgatgacaatgacagctcccatcgagtgctcatgtgccaggcacggggatcggcgctttctgggaatgatcaagttgagtcctctgtgccattggccttttcccctgagggagttgttgcaatgacctgccgggccagcagcgctaattaggagcacacagcgcacttccagagcacctgacctacagctacaaggcttcaaggatgctgcttctgaggagacatcatagaatcgtttggcattcttcctgtagctcagagtcccacgattgtctttgtaaacacgttgcaccaggtcttcttcaggggacaggtcgcaggacagcgtgcatttgacggtctgtgtacacacatcatgtgcctgagggcctgggaatctgctctaacaagactccacagctggcactgtggatctgagtgggctcctgctttgttgagcttagagtcatccacaggcattctccagggcccattagctttctgcagaagccaatggtgaattcagcaaagccacacccacttcatatccttgattcttaaagtcacaggcccggtatgggtatttcacaaactgcccaggatgtcaatcccatttgaccttaacagaccttggagttgcccaccaggtgcgcccacagactcagaggatctgcgcttcagacagcaaagtcctgacatgtgcagccgtgtggaggatgccgaaggaattggaatcaggcagccacgagtcccctgatgattcatccagcactgcacagaccctggagctgctctgtcaccttgacaacacagcccatggcaacatggcctgtgtcgtgtgggagccaatgggagatgggaagaaaatcatttccttggctgataaccatatcctgctgtgggatttacaggaaagctcgagccaggctgtgctggccagctcagcgtccctggaagggaagggacaactgaagttcacctcaggacggtggagcccacatcataactgcacccaggtggccacagcgaacgacaccaccctccgtggctgggacacccggagcatgagccagatctactgcatagagaatgcccacggacagctggtgcgggaccttgactttaatcccaataagcagtactacttggccagctgcggagacgactgtaaggtgaagttctgggacacccgaaatgtcaccgaacccgtgaagaccctggaggagcactcccactgggtgtggaacgtccgctacaaccactctcatgaccagctggtcctcacgggcagcagtgacagcagagtcatcctttccaacatggtgtccatctcgtcggagcccttcggccacttggtagacgacgatgacatcagtgaccaggaggaccaccgttctgaagagaagagcaaggagcccctgcaggacaacgtgatcgccacctacgaggagcacgaggacagcgtctatgccgtggactggtcctcggctgacccgtggctgtttgcctccctgagctatgacgggaggctcgtgatcaacagggtgcccagggccctgaagtaccacatcctgctatgactcccgggcctgggttatccaggtcccattgagtggttttcctcttggcagattctcaaacagtcgcagctctttggaggtgactcgtgttccaggtggatccctctctgggagagccgctgttcccttcctgtagcagcagcatttatgaatggggtgaatggggctattgtcgacggcacagctaatgcccgaacccagcccctgtcggcagagacagagccccacattattatgtgaataacaatgttttctgttttaagggtgtcaggagtttcgctttttaaaaaaatgtctgttcctgcaatagtaactcttctttctcttgagagtaaaaaatgaaataaaataaatccacgctgcac

SEQ ID NO: 2136 - protein, 287 aa, Homo sapiens; identical to SEQ ID NO: 2124

SEQ ID NO: 2137 - DNA, 1293 bp, Homo sapiens
aagacttccagtttggagtcgtttgctgcggggagggaatgaatgggcgctgggaacacgcccgcgaggtggggacgcgccggccgtagcgaggtccttagcgtgtgagtggccggggtcgggtcgcttccccgcagcatggaggacgatgcaccagtgatctacgggctggagttccagtgtcgtgtgggagccaatgggagatgggaagaaaatcatttccttggctgataaccatatcctgctgtgggatttacaggaaagctcgagccaggctgtgctggccagctcagcgtccctggaagggaagggacaactgaagttcacctcaggacggtggagcccacatcataactgcacccaggtggccacagcgaacgacaccaccctccgtggctgggacacccggagcatgagccagatctactgcatagagaatgcccacggacagctggtgcgggaccttgactttaatcccaataagcagtactacttggccagctgcggagacgactgtaaggtgaagttctgggacacccgaaatgtcaccgaacccgtgaagaccctggaggagcactcccactgggtgtggaacgtccgctacaaccactctcatgaccagctggtcctcacgggcagcagtgacagcagagtcatcctttccaacatggtgtccatctcgtcggagcccttcggccacttggtagacgacgatgacatcagtgaccaggaggaccaccgttctgaagagaagagcaaggagcccctgcaggacaacgtgatcgccacctacgaggagcacgaggacagcgtctatgccgtggactggtcctcggctgacccgtggctgtttgcctccctgagctatgacgggaggctcgtgatcaacagggtgcccagggccctgaagtaccacatcctgctatgactcccgggcctgggttatccaggtcccattgagtggttttcctcttggcagattctcaaacagtcgcagctctttggaggtgactcgtgttccaggtggatccctctctgggagagccgctgttcccttcctgtagcagcagcatttatgaatggggtgaatggggctattgtcgacggcacagctaatgcccgaacccagcccctgtcggcagagacagagccccacattattatgtgaataacaatgttttctgttttaagggtgtcaggagtttcgctttttaaaaaaatgtctgttcctgcaatagtaactcttctttctcttgagagtaaaaaatgaaataaaataaatccacgctgcac

SEQ ID NO: 2138 - protein, 243 aa, Homo sapiens; identical to SEQ ID NO: 2126

SEQ ID NO: 2139 - DNA, 368 bp, Homo sapiens
ccagggagcagatgagtgagactctgcgcaggtcagtggtcacgttagggaggttagcatgtgtagcggatggcagtcctgctgggatgtgcagagacaggtgagctcagaaaagggaccttggccctgcctggggacaaggagctgtcagactgcttctcaacttcccaccttgtgcagacactgtatgcaaagacaggccacatgggtgtgtgtcatggggaactgattattagattgtaatgttaaattgcaggtgtgagccaccgtgcctggccttgcttgtgaattcttagtgttagagtgcttgtttctgttgagctatgcccaagttctatgaagcatatacttaggctgttaattattga

SEQ ID NO: 2140 - protein, 57 aa, Homo sapiens
MAVLLGCAETGELRKGTLALPGDKELSDCFSTSHLVQTLYAKTGHMGVCHGELIIRL

SEQ ID NO: 2141 - DNA, 718 bp, Homo sapiens
ctggcaggcacagggagtgaaggccagttctccttggagcattctctaacttagtgacctggcctgggagactcctcagtgttcagatggctgtcccctggcaggcacagggagtgaaggccagttctccttggagtccccgggacctgcctccatgcttgttgttgtgaaggggtcagaaagaagatgtgtgtttgttgccgtctactgcatctcacttggaactgagtcactcatcccggaagctgcatctgaaaagcaaggctcattgcggaatctcatgcagacacagaggaacttgcgtgcccgtgatgctgacctctgcttgtccaaagaaactgtcatttcccaaaacatttttggaacttttctttcagaaatgctctaaaagtcagcttcagtgccatctgagaaaatctctctgctgtgtttttgtaggatactttttggctcctgataatttagccctatgaatcatctttttcattcatcaggctggcctctgagatttttgactattttgagaactgtaccctgaaaaacaagatttctcctaatgaagaacacacagaagcctgtgctgttggaattggcactgtccggagttcacagacaagatgggtccaggggaagcaatagatgtaatctgacactagcaagacttggattctctcccacacaacccagccatcaataaaacggcagtatctaggccaga

SEQ ID NO: 2142 - protein, 46 aa, Homo sapiens
MKNTQKPVLLELALSGVHRQDGSRGSNRCNLTLARLGFSPTQPSHQ

SEQ ID NO: 2143 - DNA, 2524 bp, Homo sapiens
tttccggcctgggggcagggcctcgggttcctgcatcgggcctgagcagaactaggcgcgccgcggcccggcacgcgcaggcgtacagagctccccgggggtgccagttcctctccgattcccggcttctgtcaccttcctcacggaccttggtcacggccgcaggtgaccccttagcccagctccagtgggcgggtggcagggtcatggaggacgctggcggcggcgaggagaccccggccccggaggccccgcacccccctcagctcgcgcctccggaggagcaggggttgctcttccaggaggaaaccatcgatcttggcggagatgagtttggatccgaagagaacgagaccgcatcggaaggctcgagtcctctcgcggacaagctgaacgaacacatgatggagagcgtcctcatctctgactcccccaacagcgagggcgacgcgggcgacctgggccgagtgcgggacgaagctgagcccggaggggaaggcgacccaggcccggagcccgcgggcaccccgagtcccagcggcgaggccgacggcgactgtgcccccgaggacgcggcacccagtagcggaggggccccgaggcaggacgcggcccgcgaggtcccaggcagcgaagccgcgcgcccggagcaggagcctcccgttgcggagccggtcccggtgtgcaccatcttcagccagcgcgcgcccccagcctccggggacggcttcgagccgcagatggtgaagtcgcccagcttcggtggcgccagcgaggcctcggccaggacaccgccccaggtcgtgcagcccagccccagcctcagcacgttcttcggagacacggccgccagccactccttggcctcggacttcttcgactcctttactacctccgccttcatttccgtcagcaatcccggcgcgggctccccggcccccgccagcccgcctcccctcgctgtgcccgggaccgaggggcgccccgaacccgtggccatgcgagggccccaggcagctgcgcccccggcgtcgccagagcctttcgcgcacatccaggcagtgtttgcagggagtgacgacccctttgccaccgccctgagcatgagcgagatggaccggaggaacgacgcctggcttcccggcgaggctacgcgtggagtcctgcgggccgtggccacccagcagcgcggcgccgtgttcgtggacaaggagaacctcaccatgccgggcctcaggttcgacaacatccagggagatgcagttaaagacttgatgcttcgctttctgggtgaaaaagctgcagcaaagagacaagtcctaaatgccgactcagtggaacaatcttttgttggattgaaacagctaatcagctgcagaaactggagggcagcagtggacctgtgcggacgtctcctcacagcccacggccagggctacggcaagagcgggctgctcaccagccacacgacagattcactgcagctctggtttgtcaggctggcactactagtgaagttgggccttttccagaatgctgagatggaatttgaacccttcggaaatcttgatcagccagatctttattacgagtactacccgcacgtgtaccctgggcgcaggggctccatggtccccttctcgatgcgcatcttgcacgcggagcttcagcagtacctggggaacccacaggagtcgctggatagactgcacaaggtgaagactgtctgcagcaagatcctggccaatttggagcaaggcttagcagaagacggcggcatgagcagcgtgactcaggagggcagacaagcctctatccggctgtggaggtcacgtctgggccgggtgatgtactccatggcaaactgtctgctcctgatgaaggattatgtgctggccgtggaggcgtatcattcggttatcaagtattacccagagcaagagccccagctgctcagcggcatcggccggatttccctgcagattggagacataaaaacagctgaaaagtattttcaagacgttgagaaagtaacacagaaattagatggactacagggtaaaatcatggttttgatgaacagcgcgttccttcacctcgggcagaataactttgcagaagcccacaggttcttcacagagatcttaaggatggatccaagaaacgcagtggccaacaacaacgctgccgtgtgtctgctctacctgggcaagctcaaggactccctgcggcagctggaggccatggtccagcaggaccccaggcactacctgcacgagagcgtgctcttcaacctgaccaccatgtacgagctggagtcctcacggagcatgcagaagaaacaggccctgctggaggctgtcgccggcaaggagggggacagcttcaacacacagtgcctcaagctggcctagctgcctccaacacactacgtcagaaggacccgggtctttgaaactgtgtcttgaagctaatgtattaatgtgacatggaggaactcaataaaactcctgcttcactggtg

SEQ ID NO: 2144 - protein, 735 aa, Homo sapiens; identical to SEQ ID NO: 104

SEQ ID NO: 2145 - DNA, 2484 bp, Homo sapiens
ccggcctgggggcagggcctcgggttcctgcatcgggcctgagcagaactaggcgcgccgcggcccggcacgcgcaggcgtacagagctccccgggggtgccagttcctctccgattcccggcttctgtcaccttcctcacggaccttggtcacggccgcagggtcatggaggacgctggcggcggcgaggagaccccggccccggaggccccgcacccccctcagctcgcgcctccggaggagcaggggttgctcttccaggaggaaaccatcgatcttggcggagatgagtttggatccgaagagaacgagaccgcatcggaaggctcgagtcctctcgcggacaagctgaacgaacacatgatggagagcgtcctcatctctgactcccccaacagcgagggcgacgcgggcgacctgggccgagtgcgggacgaagctgagcccggaggggaaggcgacccaggcccggagcccgcgggcaccccgagtcccagcggcgaggccgacggcgactgtgcccccgaggacgcggcacccagtagcggaggggccccgaggcaggacgcggcccgcgaggtcccaggcagcgaagccgcgcgcccggagcaggagcctcccgttgcggagccggtcccggtgtgcaccatcttcagccagcgcgcgcccccagcctccggggacggcttcgagccgcagatggtgaagtcgcccagcttcggtggcgccagcgaggcctcggccaggacaccgccccaggtcgtgcagcccagccccagcctcagcacgttcttcggagacacggccgccagccactccttggcctcggacttcttcgactcctttactacctccgccttcatttccgtcagcaatcccggcgcgggctccccggcccccgccagcccgcctcccctcgctgtgcccgggaccgaggggcgccccgaacccgtggccatgcgagggccccaggcagctgcgcccccggcgtcgccagagcctttcgcgcacatccaggcagtgtttgcagggagtgacgacccctttgccaccgccctgagcatgagcgagatggaccggaggaacgacgcctggcttcccggcgaggctacgcgtggagtcctgcgggccgtggccacccagcagcgcggcgccgtgttcgtggacaaggagaacctcaccatgccgggcctcaggttcgacaacatccagggagatgcagttaaagacttgatgcttcgctttctgggtgaaaaagctgcagcaaagagacaagtcctaaatgccgactcagtggaacaatcttttgttggattgaaacagctaatcagctgcagaaactggagggcagcagtggacctgtgcggacgtctcctcacagcccacggccagggctacggcaagagcgggctgctcaccagccacacgacagattcactgcagctctggtttgtcaggctggcactactagtgaagttgggccttttccagaatgctgagatggaatttgaacccttcggaaatcttgatcagccagatctttattacgagtactacccgcacgtgtaccctgggcgcaggggctccatggtccccttctcgatgcgcatcttgcacgcggagcttcagcagtacctggggaacccacaggagtcgctggatagactgcacaaggtgaagactgtctgcagcaagatcctggccaatttggagcaaggcttagcagaagacggcggcatgagcagcgtgactcaggagggcagacaagcctctatccggctgtggaggtcacgtctgggccgggtgatgtactccatggcaaactgtctgctcctgatgaaggattatgtgctggccgtggaggcgtatcattcggttatcaagtattacccagagcaagagccccagctgctcagcggcatcggccggatttccctgcagattggagacataaaaacagctgaaaagtattttcaagacgttgagaaagtaacacagaaattagatggactacagggtaaaatcatggttttgatgaacagcgcgttccttcacctcgggcagaataactttgcagaagcccacaggttcttcacagagatcttaaggatggatccaagaaacgcagtggccaacaacaacgctgccgtgtgtctgctctacctgggcaagctcaaggactccctgcggcagctggaggccatggtccagcaggaccccaggcactacctgcacgagagcgtgctcttcaacctgaccaccatgtacgagctggagtcctcacggagcatgcagaagaaacaggccctgctggaggctgtcgccggcaaggagggggacagcttcaacacacagtgcctcaagctggcctagctgcctccaacacactacgtcagaaggacccgggtctttgaaactgtgtcttgaagctaatgtattaatgtgacatggaggaactcaataaaactcctgcttcactggtg

SEQ ID NO: 2146 - protein, 735 aa, Homo sapiens; identical to SEQ ID NO: 104

SEQ ID NO: 2147 - DNA, 2711 bp, Homo sapiens
ccggcctgggggcagggcctcgggttcctgcatcgggcctgagcagaactaggcgcgccgcggcccggcacgcgcaggcgtacagagctccccgggggtgccagttcctctccgattcccggcttctgtcaccttcctcacggaccttggtcacggccgcagggtcatggaggacgctggcggcggcgaggagaccccggccccggaggccccgcacccccctcagctcgcgcctccggaggagcaggggttgctcttccaggaggaaaccatcgatcttggcggagatgagtttggatccgaagagaacgagaccgcatcggaaggctcgagtcctctcgcggacaagctgaacgaacacatgatggagagcgtcctcatctctgactcccccaacagcgagggcgacgcgggcgacctgggccgagtgcgggacgaagctgagcccggaggggaaggcgacccaggcccggagcccgcgggcaccccgagtcccagcggcgaggccgacggcgactgtgcccccgaggacgcggcacccagtagcggaggggccccgaggcaggacgcggcccgcgaggtcccaggcagcgaagccgcgcgcccggagcaggagcctcccgttgcggagccggtcccggtgtgcaccatcttcagccagcgcgcgcccccagcctccggggacggcttcgagccgcagatggtgaagtcgcccagcttcggtggcgccagcgaggcctcggccaggacaccgccccaggtcgtgcagcccagccccagcctcagcacgttcttcggagacacggccgccagccactccttggcctcggacttcttcgactcctttactacctccgccttcatttccgtcagcaatcccggcgcgggctccccggcccccgccagcccgcctcccctcgctgtgcccgggaccgaggggcgccccgaacccgtggccatgcgagggccccaggcagctgcgcccccggcgtcgccagagcctttcgcgcacatccaggcagtgtttgcagggagtgacgacccctttgccaccgccctgagcatgagcgagatggaccggaggaacgacgcctggcttcccggcgaggctacgcgtggagtcctgcgggccgtggccacccagcagcgcggcgccgtgttcgtggacaaggagaacctcaccatgccgggcctcaggttcgacaacatccagggagatgcagttaaagacttgatgcttcgctttctgggtgaaaaagctgcagcaaagagacaagtcctaaatgccgactcagtggaacaatcttttgttggattgaaacagctaatcagctgcagaaactggagggcagcagtggacctgtgcggacgtctcctcacagcccacggccagggctacggcaagagcgggctgctcaccagccacacgacagattcactgcagctctggtttgtcaggctggcactactagtgaagttgggccttttccagaatgctgagatggaatttgaacccttcggaaatcttgatcagccagatctttattacgagtactacccgcacgtgtaccctgggcgcaggggctccatggtccccttctcgatgcgcatcttgcacgcggagcttcagcagtacctggggaacccacaggagtcgctggatagactgcacaaggtgaagactgtctgcagcaagatcctggccaatttggagcaaggcttagcagaagacggcggcatgagcagcgtgactcaggagggcagacaagcctctatccggctgtggaggtcacgtctgggccgggtgatgtactccatggcaaactgtctgctcctgatgaaggattatgtgctggccgtggaggcgtatcattcggttatcaagtattacccagagcaagagccccagctgctcagcggcatcggccggatttccctgcagattggagacataaaaacagctgaaaagtattttcaagacgttgagaaagtaacacagaaattagatggactacagggtaaaatcatggttttgatgaacagcgcgttccttcacctcgggcagaataactttgcagaagcccacaggttcttcacagagatcttaaggatggatccaagaaacgcagtggccaacaacaacgctgccgtgtgtctgctctacctgggcaagctcaaggactccctgcggcagctggaggccatggtccagcaggaccccaggcactacctgcacgagagcgtgctcttcaacctgaccaccatgtacgagctggagtcctcacggagcatgcagaagaaacaggccctgctggaggctgtcgccggcaaggagggggacagcttcaacacacagtgcctcaagctggcctagctgcctccaacacactacgtcagaaggacccgggtctttgaaactgtgtcttgaagctaatgtattaatgtgacatggaggaactcaataaaactcctgcttcactggtgtctgctgcgtgtcttcttggtcccaagccacggcccagcccaggacttccccgcagttggtcggcgttcagccacgcagtccctgcagctgggtcactgttcatgaatgcaaggggcaggcgtgctgggaggacacagctcgtagacaggaaatctggagtcagcctcggggcctctgttctggaggccaatcctgctttgctcgttccttctggacatcctcagag

SEQ ID NO: 2148 - protein, 735 aa, Homo sapiens; identical to SEQ ID NO: 104

SEQ ID NO: 2149 - DNA, 2541 bp, Homo sapiens
ccggcctgggggcagggcctcgggttcctgcatcgggcctgagcagaactaggcgcgccgcggcccggcacgcgcaggcgtacagagctccccgggggtgccagttcctctccgattcccggcttctgtcaccttcctcacggaccttggtcacggccgcaggtgaccccttagcccagctccagtgggcgggtggcagggtcatggaggacgctggcggcggcgaggagaccccggccccggaggccccgcacccccctcagctcgcgcctccggaggagcaggggttgctcttccaggaggaaaccatcgatcttggcggagatgagtttggatccgaagagaacgagaccgcatcggaaggctcgagtcctctcgcggacaagctgaacgaacacatgatggagagcgtcctcatctctgactcccccaacagcgagggcgacgcgggcgacctgggccgagtgcgggacgaagctgagcccggaggggaaggcgacccaggcccggagcccgcgggcaccccgagtcccagcggcgaggccgacggcgactgtgcccccgaggacgcggcacccagtagcggaggggccccgaggcaggacgcggcccgcgaggtcccaggcagcgaagccgcgcgcccggagcaggagcctcccgttgcggagccggtcccggtgtgcaccatcttcagccagcgcgcgcccccagcctccggggacggcttcgagccgcagatggtgaagtcgcccagcttcggtggcgccagcgaggcctcggccaggacaccgccccaggtcgtgcagcccagccccagcctcagcacgttcttcggagacacggccgccagccactccttggcctcggacttcttcgactcctttactacctccgccttcatttccgtcagcaatcccggcgcgggctccccggcccccgccagcccgcctcccctcgctgtgcccgggaccgaggggcgccccgaacccgtggccatgcgagggccccaggcagctgcgcccccggcgtcgccagagcctttcgcgcacatccaggcagtgtttgcagggagtgacgacccctttgccaccgccctgagcatgagcgagatggaccggaggaacgacgcctggcttcccggcgaggctacgcgtggagtcctgcgggccgtggccacccagcagcgcggcgccgtgttcgtggacaaggagaacctcaccatgccgggcctcaggttcgacaacatccagggagatgcagttaaagacttgatgcttcgctttctgggtgaaaaagctgcagcaaagagacaagtcctaaatgccgactcagtggaacaatcttttgttggattgaaacagctaatcagctgcagaaactggagggcagcagtggacctgtgcggacgtctcctcacagcccacggccagggctacggcaagagcgggctgctcaccagccacacgacagattcactgcagctctggtttgtcaggctggcactactagtgaagttgggccttttccagaatgctgagatggaatttgaacccttcggaaatcttgatcagccagatctttattacgagtactacccgcacgtgtaccctgggcgcaggggctccatggtccccttctcgatgcgcatcttgcacgcggagcttcagcagtacctggggaacccacaggagtcgctggatagactgcacaaggtgaagactgtctgcagcaagatcctggccaatttggagcaaggcttagcagaagacggcggcatgagcagcgtgactcaggagggcagacaagcctctatccggctgtggaggtcacgtctgggccgggtgatgtactccatggcaaactgtctgctcctgatgaaggattatgtgctggccgtggaggcgtatcattcggttatcaagtattacccagagcaagagccccagctgctcagcggcatcggccggatttccctgcagattggagacataaaaacagctgaaaagtattttcaagacgttgagaaagtaacacagaaattagatggactacagggtaaaatcatggttttgatgaacagcgcgttccttcacctcgggcagaataactttgcagaagcccacaggttcttcacagagatcttaaggatggatccaagaaacgcagtgcagatgctgtcagcctcgcatcctacaggaaaggaaccatcgccaaaagacgctgaggaacatcccgagggtcacagggacagtgcagagccaggaccagcccggcccatggtcccccagcgtgcaccacctggcccggcactgtgtgctcagccatgaggactgggaagagtcctgcccacagctcaagtgtctacaccgcactgccatccaggctgtgagccgctgctgagcatggggaatgtggctgctgcagagacgttatgaaacacttctaaaagaatgtaaaagatctcattaataattttgagtacctgttaaaatgatagtaattttggatctagtagattaaataaaacatattattaaaatt

SEQ ID NO: 2150 - protein, 707 aa, Homo sapiens
MEDAGGGEETPAPEAPHPPQLAPPEEQGLLFQEETIDLGGDEFGSEENETASEGSSPLADKLNEHMMESVLISDSPNSEGDAGDLGRVRDEAEPGGEGDPGPEPAGTPSPSGEADGDCAPEDAAPSSGGAPRQDAAREVPGSEAARPEQEPPVAEPVPVCTIFSQRAPPASGDGFEPQMVKSPSFGGASEASARTPPQVVQPSPSLSTFFGDTAASHSLASDFFDSFTTSAFISVSNPGAGSPAPASPPPLAVPGTEGRPEPVAMRGPQAAAPPASPEPFAHIQAVFAGSDDPFATALSMSEMDRRNDAWLPGEATRGVLRAVATQQRGAVFVDKENLTMPGLRFDNIQGDAVKDLMLRFLGEKAAAKRQVLNADSVEQSFVGLKQLISCRNWRAAVDLCGRLLTAHGQGYGKSGLLTSHTTDSLQLWFVRLALLVKLGLFQNAEMEFEPFGNLDQPDLYYEYYPHVYPGRRGSMVPFSMRILHAELQQYLGNPQESLDRLHKVKTVCSKILANLEQGLAEDGGMSSVTQEGRQASIRLWRSRLGRVMYSMANCLLLMKDYVLAVEAYHSVIKYYPEQEPQLLSGIGRISLQIGDIKTAEKYFQDVEKVTQKLDGLQGKIMVLMNSAFLHLGQNNFAEAHRFFTEILRMDPRNAVQMLSASHPTGKEPSPKDAEEHPEGHRDSAEPGPARPMVPQRAPPGPALCAQP

SEQ ID NO: 2151 - DNA, 3406 bp, Homo sapiens
ctctgctaagatggagcctctgtttctgcatttatgcatcattggggtgggaaactctgtttccttttttctagacctttctcttcctgctgcccttctgaaggacctcattcccccttctcccctcattggccgtgatagtccacagggaacgtcagccccagcgcagcttgtgctgagaccaccatggccctgtggtgcgggtcttctctcaggccttgcgtgctcactacagaggtctggggtgtttctgcagggttttctcctccactcagcacgtggagagatcgcccatggcatggagagatggcccagacccacagagacctcgccgcatagaggatttgcccagacccctagaccccgccacgtgaggaggtcacccaggcccgtagggctcccgtggtgtgcggaggcgcagaacaagctcaggagtctgctgacctggtgcgccacaccccggggaccgccagtgggcgtgttcgaggctccgctgaccagggcgctgtcaggtctggttcgggcagcggctttgcctctgtgataggtgtcccgtccctctttcttcctgtgctccctctacactagcctaagggaagtcagtttcctttttttaataaattttaatttttgtagatacatagtaggtgtttatgggttataggagatattttgatacaggcaggcaatgcgtaataatcccatcagggtaaatggagtatccatcccctcaagcattgatcctttgtgttgcaacaatccaattatgctcccttagttatttttttaacgtacacttaaattactgtagtcacccttgtactagcaaacactaggtcttatttgttctattttttttttgtacccattaccatccccactccatcccccactactgttcccagcctctggtaaccatcctcctgctctccatctccatgagttcagttgtttaaagtttagctcccacagataagtgagaacatacgatgtttgtctttctgtgcctggcgtatgtcacttaacacagtgacctccagttccatccatgctgttgtaaatgacaggataccattcttttttatggccgaagagtactccatcgtgtatatatggcaattcctttatccccttgtctgctgatggacacttaggttgcttccaagtcttggctgttgtgaacagtgctgcagcacacacgggtgtgcagtgatctctgatagactgatttcctttcttttctttggagtatatatctaggcatggattgctgcgttgtatggtagctctattttttgtttttttgtagaaacctcaaactgttctccctagtggttgcactgatgtacattcccaccaactgtggacaaggggtgagggaagttaatttcatggtaacaccaagcctttcctttttgtcagtttctgttcttatgatcattcattagaaggcagattcactgaagaatgtcgttttacctagtttaaactggctagattcttttcaaggttacaattttgaaccccaccttgtcccctgagtcatcgaggtagcccaagataacggttaagaggaaacatcctttgtgttggcagcaaattgttctccagtttctgttaagtagtgtcccttgcaggtgaggagaggctgctttcatcctcagcaggtagagaccggggagtcggaccagcggaaatcctcacctcctggggtgggccgtgtggggagtgttaactggcaagacgatctaaattctctacccagatcacagcggctacagcagctttgctttcagagaagaaaacacaaaaaaaagtgcccaaaagttaaaaagcaagtggtaaaaccgggaagcgacacgttgcacaaaacgtatttggtacgttaaaaaggccagaagcacggtgccctgtaggaatgagactgacatcttcacaaaaggtcatcatcagtctcatgtgacattctccatgctttttttttaaagacagggtctcattctgtcacccagcctggagtgcagtggtgcagtccctggtcactgcagccttgacctcccaggctcaggtgatcctcccacctcagcctcccaggtagctgggaccacaggcgcacaccaccatgcccagctaatgttttgtatttttgtagagatggggttttgccatgttgccccagctggtctctaactcctgggctcaagtgacccacctgcctcggcctcccaaggtgttgggattacaggcttgagccaccgctcaatcccagaagtgttgggattacaggcttgatgcttttcttaaaaaacatattccccatgtatgatgtctgcagatacttcaagaacatcataaacaccactttcaccatcagctgggagcagagtccctccccattcactgtcgccccacgccatagggacttggtgatgtttacagtgtgtccctgtgggcgaacgggataaggaaaagatggtgcacatacactgtggaatactacgcagccgtaaaaaaagaaccaaatcatgttgtttgcagcaacatggatacagctggaggccattatcctaagtgaattaacacagaaacagaaaaccaaatagtgaatgttttcacatatcctggccaatttggagcaaggcttagcagaagacggcggcatgagcagcgtgactcaggagggcagacaagcctctatccggctgtggaggtcacgtctgggccgggtgatgtactccatggcaaactgtctgctcctgatgaaggattatgtgctggccgtggaggcgtatcattcggttatcaagtattacccagagcaagagccccagctgctcagcggcatcggccggatttccctgcagattggagacataaaaacagctgaaaagtattttcaagacgttgagaaagtaacacagaaattagatggactacagggtaaaatcatggttttgatgaacagcgcgttccttcacctcgggcagaataactttgcagaagcccacaggttcttcacagagatcttaaggatggatccaagaaacgcagtggccaacaacaacgctgccgtgtgtctgctctacctgggcaagctcaaggactccctgcggcagctggaggccatggtccagcaggaccccaggcactacctgcacgagagcgtgctcttcaacctgaccaccatgtacgagctggagtcctcacggagcatgcagaagaaacaggccctgctggaggctgtcgccggcaaggagggggacagcttcaacacacagtgcctcaagctggcctagctgcctccaacacactacgtcagaaggacccgggtctttgaaactgtgtcttgaagctaatgtattaatgtgacatggaggaactcaataaaactcctgcttcactggtg

SEQ ID NO: 2152 - protein, 229 aa, Homo sapiens
MFSHILANLEQGLAEDGGMSSVTQEGRQASIRLWRSRLGRVMYSMANCLLLMKDYVLAVEAYHSVIKYYPEQEPQLLSGIGRISLQIGDIKTAEKYFQDVEKVTQKLDGLQGKIMVLMNSAFLHLGQNNFAEAHRFFTEILRMDPRNAVANNNAAVCLLYLGKLKDSLRQLEAMVQQDPRHYLHESVLFNLTTMYELESSRSMQKKQALLEAVAGKEGDSFNTQCLKLA

SEQ ID NO: 2153 - DNA, 3633 bp, Homo sapiens
ctctgctaagatggagcctctgtttctgcatttatgcatcattggggtgggaaactctgtttccttttttctagacctttctcttcctgctgcccttctgaaggacctcattcccccttctcccctcattggccgtgatagtccacagggaacgtcagccccagcgcagcttgtgctgagaccaccatggccctgtggtgcgggtcttctctcaggccttgcgtgctcactacagaggtctggggtgtttctgcagggttttctcctccactcagcacgtggagagatcgcccatggcatggagagatggcccagacccacagagacctcgccgcatagaggatttgcccagacccctagaccccgccacgtgaggaggtcacccaggcccgtagggctcccgtggtgtgcggaggcgcagaacaagctcaggagtctgctgacctggtgcgccacaccccggggaccgccagtgggcgtgttcgaggctccgctgaccagggcgctgtcaggtctggttcgggcagcggctttgcctctgtgataggtgtcccgtccctctttcttcctgtgctccctctacactagcctaagggaagtcagtttcctttttttaataaattttaatttttgtagatacatagtaggtgtttatgggttataggagatattttgatacaggcaggcaatgcgtaataatcccatcagggtaaatggagtatccatcccctcaagcattgatcctttgtgttgcaacaatccaattatgctcccttagttatttttttaacgtacacttaaattactgtagtcacccttgtactagcaaacactaggtcttatttgttctattttttttttgtacccattaccatccccactccatcccccactactgttcccagcctctggtaaccatcctcctgctctccatctccatgagttcagttgtttaaagtttagctcccacagataagtgagaacatacgatgtttgtctttctgtgcctggcgtatgtcacttaacacagtgacctccagttccatccatgctgttgtaaatgacaggataccattcttttttatggccgaagagtactccatcgtgtatatatggcaattcctttatccccttgtctgctgatggacacttaggttgcttccaagtcttggctgttgtgaacagtgctgcagcacacacgggtgtgcagtgatctctgatagactgatttcctttcttttctttggagtatatatctaggcatggattgctgcgttgtatggtagctctattttttgtttttttgtagaaacctcaaactgttctccctagtggttgcactgatgtacattcccaccaactgtggacaaggggtgagggaagttaatttcatggtaacaccaagcctttcctttttgtcagtttctgttcttatgatcattcattagaaggcagattcactgaagaatgtcgttttacctagtttaaactggctagattcttttcaaggttacaattttgaaccccaccttgtcccctgagtcatcgaggtagcccaagataacggttaagaggaaacatcctttgtgttggcagcaaattgttctccagtttctgttaagtagtgtcccttgcaggtgaggagaggctgctttcatcctcagcaggtagagaccggggagtcggaccagcggaaatcctcacctcctggggtgggccgtgtggggagtgttaactggcaagacgatctaaattctctacccagatcacagcggctacagcagctttgctttcagagaagaaaacacaaaaaaaagtgcccaaaagttaaaaagcaagtggtaaaaccgggaagcgacacgttgcacaaaacgtatttggtacgttaaaaaggccagaagcacggtgccctgtaggaatgagactgacatcttcacaaaaggtcatcatcagtctcatgtgacattctccatgctttttttttaaagacagggtctcattctgtcacccagcctggagtgcagtggtgcagtccctggtcactgcagccttgacctcccaggctcaggtgatcctcccacctcagcctcccaggtagctgggaccacaggcgcacaccaccatgcccagctaatgttttgtatttttgtagagatggggttttgccatgttgccccagctggtctctaactcctgggctcaagtgacccacctgcctcggcctcccaaggtgttgggattacaggcttgagccaccgctcaatcccagaagtgttgggattacaggcttgatgcttttcttaaaaaacatattccccatgtatgatgtctgcagatacttcaagaacatcataaacaccactttcaccatcagctgggagcagagtccctccccattcactgtcgccccacgccatagggacttggtgatgtttacagtgtgtccctgtgggcgaacgggataaggaaaagatggtgcacatacactgtggaatactacgcagccgtaaaaaaagaaccaaatcatgttgtttgcagcaacatggatacagctggaggccattatcctaagtgaattaacacagaaacagaaaaccaaatagtgaatgttttcacatatcctggccaatttggagcaaggcttagcagaagacggcggcatgagcagcgtgactcaggagggcagacaagcctctatccggctgtggaggtcacgtctgggccgggtgatgtactccatggcaaactgtctgctcctgatgaaggattatgtgctggccgtggaggcgtatcattcggttatcaagtattacccagagcaagagccccagctgctcagcggcatcggccggatttccctgcagattggagacataaaaacagctgaaaagtattttcaagacgttgagaaagtaacacagaaattagatggactacagggtaaaatcatggttttgatgaacagcgcgttccttcacctcgggcagaataactttgcagaagcccacaggttcttcacagagatcttaaggatggatccaagaaacgcagtggccaacaacaacgctgccgtgtgtctgctctacctgggcaagctcaaggactccctgcggcagctggaggccatggtccagcaggaccccaggcactacctgcacgagagcgtgctcttcaacctgaccaccatgtacgagctggagtcctcacggagcatgcagaagaaacaggccctgctggaggctgtcgccggcaaggagggggacagcttcaacacacagtgcctcaagctggcctagctgcctccaacacactacgtcagaaggacccgggtctttgaaactgtgtcttgaagctaatgtattaatgtgacatggaggaactcaataaaactcctgcttcactggtgtctgctgcgtgtcttcttggtcccaagccacggcccagcccaggacttccccgcagttggtcggcgttcagccacgcagtccctgcagctgggtcactgttcatgaatgcaaggggcaggcgtgctgggaggacacagctcgtagacaggaaatctggagtcagcctcggggcctctgttctggaggccaatcctgctttgctcgttccttctggacatcctcagag

SEQ ID NO: 2154 - protein, 229 aa, Homo sapiens; identical to SEQ ID NO: 2152

SEQ ID NO: 2155 - DNA, 2943 bp, Homo sapiens
cttttcatttttctctttttgaaacaccctgtggttcatgttcttactcagagtaacagtccatgtccccatagcagcccacaaggcaccacgtggccccggctggcctgtccagtgctctcccctccgtccgctcgtcctctgcatgctggcctccctgtcatttctagaacactcaggcattctcttaagccaaggcctttgtagttgtgattccctctgcatggaatgctcttccccagccatctcctgtcactctctcacccaccccatgaggtcatgaccacgctatttagattgtcacaccccatctcctggattgcagatgagatgatatgcaatgtgctttttaaaaagactactatggacaatgtctaacatataccaaagtagagacaaatttaatgtgcttccatattcccagcacctgcttcagtagtcaacagtagctgaccctgtttcatcctcacttctacccattgtcccattattttgaaatatttgatccccagacgtcctattgtttcattcataaatcttcatagtggcttacttgtttatggttgattcgccagccccactcccttccatagcagcctagtaagggtagggatgtgggtttggatgcgttttgctcattgctgtgtatccagcatctagaacaatgtctggcacctcgtagctacttatcaatatttattagatgaataattaggtcaagtttgatgaagcctgaagattgaactctggctttaatacaagaggggtattaaatgttttgactgcagctgtttgagaggggctgggaatgctgaaaagcctaattggaatagttgaggagagaatggggaaaaggaatcagaaatagcgattatgcacaacagctgatacaggggaacagaaaataggacatctgagatcaagagagagctttctttaagagggtagatattatagcctgtctgtgtgcccctgggaatgatcaggaaagactgaaagcgatgatgccagacagagggcagctcctggagtgatgtcaggaagtccgtgtggtggtgctctgtcgctgcataacaaactacccactacttagaggtttaaaaattaaaagcaagttagctcacagtttcagtcgatcaggaatccagcttagcagggtgattctgtccaagttcctcctgagggtacagtcatctaaaagcttgtccggggctagaagaaccctcttccaagcttccacacatggcttttggcaggcggccattgttccttgccacatggcctctccacagggctgcttgaatgtcctcacagcatggctgacttcccccagagcaagccatccaagagagcaagagactaagatgggaaccacagtgtcttttgtgacctagtattagaagttgcatgtcatcccttactctgatttgttagaagggagtcactaagtacaaagtagggtggccagacatccaaataaagataaacaaaggcttattagtataggtgtattccaaatattgcatagggaattcttacactaaataatgactttatctgaaactcaaagttaatgtatgacctgtatttttatttgttagatttggcaacttcagaaggaatttgtggacatacttttaaactacggctagccaaagggaatgggatgtagtgcatatgtagagctcaggcctacagaaacacggcagatcatagggagagggctggcggagtacttggcaaatgtagataggtaggcgggtgggtaggcagaggcagtgaggggagcaggtggacatgctcttctgattgcttctcttttctcaccggagtaagcagcaaggttatgggcaaggtaaccttctcccgccccgccatacaccttgcacagagcttacccttgactcagaccctccatgctgggggaattacctccctgtgaccatcctaggaagacacctcttggctcttgcagagtcagaaaagcacaggacatggagttgagaaacccggtttcttctttttcttctttttcttttttttgagatggagtctcgctctgttgcccaggctggagtacagtggcacaatctcggctcactgcaacctccacctcccgggttcaagtgattctcctgtctcagcctcctgagtagctgggattacaggcacacgctgccatgaccagctaattttttgtattttagtagagatggggtttcactgttgttgcccaggctggtctcgaactcctgagctcaggcagtctacccaccttggcctcccaaagtgctaggattacaagtgtgagccaccgcacctggcctgctttttcttttccctgttatggcctctctgggtttccaaaattctatctcttttttctcttttttttttttttttttttttttttttgatggagtctcactctgtcaccaggttggagtgcagtggcacaatcttggctcactgcaacctccgcctcccgggttcaagtgattcttgtgtgcactccagcctgggcaacagagcaaaactccatctcaaaaaaataaaaaataaaaacctgtccaggttttttgtttgataaattttgtttttgaaatgattttcaaacctaactttacccatgtagccatgaagttaaaacaaaatcctagagtttatgctgtcattgtaagcaattacagatgatggccattacaaaacttcattttactctttgtggaagactagtctccatttcatatgcaatagaagattcaactctcttttgcacttgagaatactaaaagtaaatgtattttagtaaagaaaaaaaacccacatgtaaatgaatgtgtgtcttggagcaactgaattctattcaaaactttggaaggaaacagcaaagtgttagaatacgtgatttttaaagtgtatgtataaataaataccgtgagt

SEQ ID NO: 2156 - protein, 56 aa, Homo sapiens [sequence omitted]

SEQ ID NO: 2157 - DNA, 721 bp, Homo sapiens
ggtgggtgcctgtagtctcagctactcaggaggctgaggcaggagaatcacttgaacccgggaggcggaggttgcagactagtgagtagtatatcacacacacggaaaaattatggagtagagtatgaaagctgaataaaacttggaaacaggaaacttcgaagacatgaaggattagagcaggcacgctgggaatcagccctgaagaggcaggcctgcgttaagggctgaatcggtaggaaaactggggcaatgagggacgggtcaggcctaggaggagtacccatatagctgtcgtcagcggacactccttctgtgtccctcagactcagggcagtccctccgcctgcccttcagcaactctccagaacaaaagccgaggtcacctcccctgctcttgaaaaccctcaatggtcaagaagctttgtcaaatcctcatgagccttgcacagtgccaggtgctgtacctaatgtaagtgcctcattttactctaataaaaactaagtattaggctgatctacaggaggaaatgagattcacagagattaaggcaacagtcaaaagacacagaactagtaggcaacagacctggaattcgaccctgtgtcagggtggttccaaatgcaagctctttctactaaactgccagcctcccaggtgcccagaagtgatcctggccctcctcctctaccctgatgtcctgacctcctggtgtgctga

SEQ ID NO: 2158 - protein, 62 aa, Homo sapiens
MRFTEIKATVKRHRTSRQQTWNSTLCQGGSKCKLFLLNCQPPRCPEVILALLLYPDVLTSWC

SEQ ID NO: 2159 - DNA, 1649 bp, Homo sapiens
gttgacatgtaaccaagcccttgcttttcctctctggcacattgccctaaagatgacatttctgtctttggatgatggaggtgcagagggtggaggggacgagggaagcaggggagcaaaacccttgaagatcgtttgaaaattgaagcaaaaaatgggacattgagtgtatccgacaccaccgttggcagcaaacaattgacattcacgttaaagaggtctgaacagcagaagaagcaacaggaggctgagaaactgcatcgacaagaaaggaaaagactccgtcgttcggccggacacctgaagtcaagacacaaaagaggacggtcgtttcattgatttgggaagtggtcctacctgtgattagggaggggtacgtctcccccaaactgatcatcgttagggtgttaaacacagacgaggaaacacacgtttttaaagttcatgtacgttcttgtacacagaggtaaagatttgaaaacctgtgccttgtgggttggactttgaagctggccccgccgacggccaccgcacagccccaggggtgtgcttgcgagtcgttgctccctggaaacattgtcctttccccacggcgttaatcatgaaaaccaggctggggtttttttaatattgtgaaatgtacaccatgaaatgaaaggtttatcctgtgccagaaaccaaggtttatcatgctctaggaacttttttcttacactgcctaccgccattcatgattaaaccatccagaaataccatccctgttttacctggtgtctgtgtattgcctgtgtttgtgtttataagtttatgctgataggtttgttcggcttgtttatgtattagtttgggatttgtttttaaataatttataccaagagagtataatctaatggtgcaggttgagagcatcccaaatccgaaaatctaaaactgtttgagcactgtatttatctgttcttgcactgctataaagaactacctgaaactgggtaatttataagtaaagaaaagaggtttaattgactcacagttctacaggtggtacaggaagcatggctgtggaggccctgggaagcttacaatcgtggcagaaggtgaagcggaagcaggtatgtcctgcgtggctagagccagaggaggagggcaaaggggcagatgctgcacactttcaaacaccagatctccaagaactcactaacacagaatagcaagggggaagtctgcccccatgtttcagtcacctccctccaggcccctcctccaacaccgaagattacaatttgacatgagatttgtgtggggacacagagcaaaaccatatcaagcactgacatgacattggaggaaaatgctcattagagcttttcaggttttggattttcagatttgggatacttgactagtaaatataatacagatattccaaaacacacaaaaaaaccaaagtctaaaagacttctggtcccaagcatttcagataagggatacccaacctgtaataatgggaaacaagcagtagaggctgttggttaatcttggcacaagtttaattacaggttttttttttttcctgtttcttaagtacagtcaaacataaacttactggaggaaacatttataaaaataaatatactttcatttgaatagct

SEQ ID NO: 2160 - protein, 51 aa, Homo sapiens [sequence omitted]

SEQ ID NO: 2161 - DNA, 3341 bp, Homo sapiens
agtcggcgccagcggccgcacgccgcggagcaggggctcggaggtcccgggattacggtgctcgagcacgctggtgggaaaggacccgggacttgaacagtgttgtgcggcgccatgcaggtctccagcctcaatgaggtgaagatttacagcctcagctgcggcaagtcccttcctgagtggctttctgataggaagaagagagcgctacagaagaaagatgtagatgtccgtaggagaattgaacttattcaggactttgaaatgcctactgtgtgtaccactattaaggtgtcaaaagatggacagtacattttagcaactggaacatataaacctcgggttcgatgttatgacacctatcaattatccttgaagtttgaaaggtgtttagattcagaagttgtcacctttgaaattttgtctgatgactactcaaagattgtcttcttacataatgatagatacattgaatttcattcgcaatcaggtttttactacaaaaccagaataccaaagtttgggagagatttctcttaccactatccatcctgtgacttgtactttgttggtgcaagttctgaagtttataggttaaacttagaacaaggacgatacctgaatcctctacaaactgatgctgcggagaataatgtttgtgacataaattcagtgcatggcttgtttgccacaggaaccatagagggtagagtggagtgctgggacccaagaactcgaaacagagttggcctgttagactgcgccttaaacagtgtcacagcagattcagagataaacagtttaccaacaatctctgctttgaaatttaatggtgccttgaccatggcagttggaacaaccacagggcagggaaaaatatttacttccttggagccagagcatgaccttaatgatgtttgtctctaccccaactcaggcatgcttctgacggccaatgaaacccccaagatgggcatctattacattccagttttgggtcctgctcctcggtggtgttccttcttagacaacttgaccgaagaattagaagagaatccagaaagcacagtctatgatgattataaatttgtcaccaagaaagaccttgaaaatttagggctcacccacctcattggatctcctttcctccgggcatatatgcatgggtttttcatggatataagactctatcacaaggtgaaactgatggtaaatccatttgcttatgaagaatataggaaagataaaatacgacagaaaatagaagaaacacgtgcacagagagtccagttaaagaaattgccaaaagttaacaaagagctggcacttaaattaattgaggaagaagaggagaagcagaaatctacatggaaaaagaaagttaagagtcttcctaatattctcaccgatgatcgatttaaagttatgtttgagaaccctgacttccaagtagatgaagagagtgaagaatttaggcttctgaatccacttgtttcaaaaattagtgaaaaaaggaagaagaaactaagactcttagagcaacaagaacttcgtgaaaaagaagaggaggaagagccggaaggaaaaccaagtgatgcagaaagttcggagagttcagatgatgaaaaagcctgggttgaagaggtcaggaagcaacgcagactcctccagcaggaggaaaaagtgaagcggcaggaacgactcaaggaggaccagcagacagtcctaaagccccagttttatgagatcaaagcaggagaagaatttagaagcttcaaagattctgccacaaagcagaaactgatgaacaaaacccttgaagatcgtttgaaaattgaagcaaaaaatgggacattgagtgtatccgacaccaccgttggcagcaaacaattgacattcacgttaaagaggtctgaacagcagaagaagcaacaggaggctgagaaactgcatcgacaagaaaggaaaagactccgtcgttcggccggacacctgaagtcaagacacaaaagaggacggtcgtttcattgatttgggaagtggtcctacctgtgattagggaggggtacgtctcccccaaactgatcatcgttagggtgttaaacacagacgaggaaacacacgtttttaaagttcatgtacgttcttgtacacagaggtaaagatttgaaaacctgtgccttgtgggttggactttgaagctggccccgccgacggccaccgcacagccccaggggtgtgcttgcgagtcgttgctccctggaaacattgtcctttccccacggcgttaatcatgaaaaccaggctggggtttttttaatattgtgaaatgtacaccatgaaatgaaaggtttatcctgtgccagaaaccaaggtttatcatgctctaggaacttttttcttacactgcctaccgccattcatgattaaaccatccagaaataccatccctgttttacctggtgtctgtgtattgcctgtgtttgtgtttataagtttatgctgataggtttgttcggcttgtttatgtattagtttgggatttgtttttaaataatttataccaagagagtataatctaatggtgcaggttgagagcatcccaaatccgaaaatctaaaactgtttgagcactgtatttatctgttcttgcactgctataaagaactacctgaaactgggtaatttataagtaaagaaaagaggtttaattgactcacagttctacaggtggtacaggaagcatggctgtggaggccctgggaagcttacaatcgtggcagaaggtgaagcggaagcaggtatgtcctgcgtggctagagccagaggaggagggcaaaggggcagatgctgcacactttcaaacaccagatctccaagaactcactaacacagaatagcaagggggaagtctgcccccatgtttcagtcacctccctccaggcccctcctccaacaccgaagattacaatttgacatgagatttgtgtggggacacagagcaaaaccatatcaagcactgacatgacattggaggaaaatgctcattagagcttttcaggttttggattttcagatttgggatacttgactagtaaatataatacagatattccaaaacacacaaaaaaaccaaagtctaaaagacttctggtcccaagcatttcagataagggatacccaacctgtaataatgggaaacaagcagtagaggctgttggttaatcttggcacaagtttaattacaggttttttttttttcctgtttcttaagtacagtcaaacataaacttactggaggaaacatttataaaaataaatatactttcatttgaatagct

SEQ ID NO: 2162 - protein, 638 aa, Homo sapiens
MQVSSLNEVKIYSLSCGKSLPEWLSDRKKRALQKKDVDVRRRIELIQDFEMPTVCTTIKVSKDGQYILATGTYKPRVRCYDTYQLSLKFERCLDSEVVTFEILSDDYSKIVFLHNDRYIEFHSQSGFYYKTRIPKFGRDFSYHYPSCDLYFVGASSEVYRLNLEQGRYLNPLQTDAAENNVCDINSVHGLFATGTIEGRVECWDPRTRNRVGLLDCALNSVTADSEINSLPTISALKFNGALTMAVGTTTGQGKIFTSLEPEHDLNDVCLYPNSGMLLTANETPKMGIYYIPVLGPAPRWCSFLDNLTEELEENPESTVYDDYKFVTKKDLENLGLTHLIGSPFLRAYMHGFFMDIRLYHKVKLMVNPFAYEEYRKDKIRQKIEETRAQRVQLKKLPKVNKELALKLIEEEEEKQKSTWKKKVKSLPNILTDDRFKVMFENPDFQVDEESEEFRLLNPLVSKISEKRKKKLRLLEQQELREKEEEEEPEGKPSDAESSESSDDEKAWVEEVRKQRRLLQQEEKVKRQERLKEDQQTVLKPQFYEIKAGEEFRSFKDSATKQKLMNKTLEDRLKIEAKNGTLSVSDTTVGSKQLTFTLKRSEQQKKQQEAEKLHRQERKRLRRSAGHLKSRHKRGRSFH

SEQ ID NO: 2163 - DNA, 2613 bp, Homo sapiens
agtcggcgccagcggccgcacgccgcggagcaggggctcggaggtcccgggattacggtgctcgagcacgctggtgggaaaggacccgggacttgaacagtgttgtgcggcgccatgcaggtctccagcctcaatgaggtgaagatttacagcctcagctgcggcaagtcccttcctgagtggctttctgataggaagaagagagcgctacagaagaaagatgtagatgtccgtaggagaattgaacttattcaggactttgaaatgcctactgtgtgtaccactattaaggtgtcaaaagatggacagtacattttagcaactggaacatataaacctcgggttcgatgttatgacacctatcaattatccttgaagtttgaaaggtgtttagattcagaagttgtcacctttgaaattttgtctgatgactactcaaagattgtcttcttacataatgatagatacattgaatttcattcgcaatcaggtttttactacaaaaccagaataccaaagtttgggagagatttctcttaccactatccatcctgtgacttgtactttgttggtgcaagttctgaagtttataggttaaacttagaacaaggacgatacctgaatcctctacaaactgatgctgcggagaataatgtttgtgacataaattcagtgcatggcttgtttgccacaggaaccatagagggtagagtggagtgctgggacccaagaactcgaaacagagttggcctgttagactgcgccttaaacagtgtcacagcagattcagagataaacagtttaccaacaatctctgctttgaaatttaatggtgccttgaccatggcagttggaacaaccacagggcaggttttattatatgaccttcgatctgataagccattgctagttaaagatcaccagtatgggctgcccattaagtccgttcatttccaggattcattagatctgattttgtctgctgactctcgaattgtcaagatgtggaataagaactccggaaaaatatttacttccttggagccagagcatgaccttaatgatgtttgtctctaccccaactcaggcatgcttctgacggccaatgaaacccccaagatgggcatctattacattccagttttgggtcctgctcctcggtggtgttccttcttagacaacttgaccgaagaattagaagagaatccagaaagcacagtctatgatgattataaatttgtcaccaagaaagaccttgaaaatttagggctcacccacctcattggatctcctttcctccgggcatatatgcatgggtttttcatggatataagactctatcacaaggtgaaactgatggtaaatccatttgcttatgaagaatataggaaagataaaatacgacagaaaatagaagaaacacgtgcacagagagtccagttaaagaaattgccaaaagttaacaaagagctggcacttaaattaattgaggaagaagaggagaagcagaaatctacatggaaaaagaaagttaagagtcttcctaatattctcaccgatgatcgatttaaagttatgtttgagaaccctgacttccaagtagatgaagagagtgaagaatttaggcttctgaatccacttgtttcaaaaattagtgaaaaaaggaagaagaaactaagactcttagagcaacaagaacttcgtgaaaaagaagaggaggaagagccggaaggaaaaccaagtgatgcagaaagttcggagagttcagatgatgaaaaagcctgggttgaagaggtcaggaagcaacgcagactcctccagcaggaggaaaaagtgaagcggcaggaacgactcaaggaggaccagcagacagtcctaaagccccagttttatgagatcaaagcaggagaagaatttagaagcttcaaagattctgccacaaagcagaaactgatgaacaaaacccttgaagatcgtttgaaaattgaagcaaaaaatgggacattgagtgtatccgacaccaccgttggcagcaaacaattgacattcacgttaaagaggtctgaacagcagaagaagcaacaggaggctgagaaactgcatcgacaagaaaggaaaagactccgtcgttcggccggacacctgaagtcaagacacaaaagaggacggtcgtttcattgatttgggaagtggtcctacctgtgattagggaggggtacgtctcccccaaactgatcatcgttagggtgttaaacacagacgaggaaacacacgtttttaaagttcatgtacgttcttgtacacagaggtaaagatttgaaaacctgtgccttgtgggttggactttgaagctggccccgccgacggccaccgcacagccccaggggtgtgcttgcgagtcgttgctccctggaaacattgtcctttccccacggcgttaatcatgaaaaccaggctggggtttttttaatattgtgaaatgtacaccatgaaatgaaaggtttatcctgtgccagaaaccaaggtttatcatgctctaggaacttttttcttacactgcctaccgccattcatgattaaaccatccagaaataccatccctgttttacctgg

SEQ ID NO: 2164 - protein, 688 aa, Homo sapiens
MQVSSLNEVKIYSLSCGKSLPEWLSDRKKRALQKKDVDVRRRIELIQDFEMPTVCTTIKVSKDGQYILATGTYKPRVRCYDTYQLSLKFERCLDSEVVTFEILSDDYSKIVFLHNDRYIEFHSQSGFYYKTRIPKFGRDFSYHYPSCDLYFVGASSEVYRLNLEQGRYLNPLQTDAAENNVCDINSVHGLFATGTIEGRVECWDPRTRNRVGLLDCALNSVTADSEINSLPTISALKFNGALTMAVGTTTGQVLLYDLRSDKPLLVKDHQYGLPIKSVHFQDSLDLILSADSRIVKMWNKNSGKIFTSLEPEHDLNDVCLYPNSGMLLTANETPKMGIYYIPVLGPAPRWCSFLDNLTEELEENPESTVYDDYKFVTKKDLENLGLTHLIGSPFLRAYMHGFFMDIRLYHKVKLMVNPFAYEEYRKDKIRQKIEETRAQRVQLKKLPKVNKELALKLIEEEEEKQKSTWKKKVKSLPNILTDDRFKVMFENPDFQVDEESEEFRLLNPLVSKISEKRKKKLRLLEQQELREKEEEEEPEGKPSDAESSESSDDEKAWVEEVRKQRRLLQQEEKVKRQERLKEDQQTVLKPQFYEIKAGEEFRSFKDSATKQKLMNKTLEDRLKIEAKNGTLSVSDTTVGSKQLTFTLKRSEQQKKQQEAEKLHRQERKRLRRSAGHLKSRHKRGRSFH

SEQ ID NO: 2165 - DNA, 766 bp, Homo sapiens
gttgacatgtaaccaagcccttgcttttcctctctggcacattgccctaaagatgacatttctgtctttggatgatggaggtgcagagggtggaggggacgagggaagcaggggagcaaaacccttgaagatcgtttgaaaattgaagcaaaaaatgggacattgagtgtatccgacaccaccgttggcagcaaacaattgacattcacgttaaagaggtctgaacagcagaagaagcaacaggaggctgagaaactgcatcgacaagaaaggaaaagactccgtcgttcggccggacacctgaagtcaagacacaaaagaggacggtcgtttcattgatttgggaagtggtcctacctgtgattagggaggggtacgtctcccccaaactgatcatcgttagggtgttaaacacagacgaggaaacacacgtttttaaagttcatgtacgttcttgtacacagaggtaaagatttgaaaacctgtgccttgtgggttggactttgaagctggccccgccgacggccaccgcacagccccaggggtgtgcttgcgagtcgttgctccctggaaacattgtcctttccccacggcgttaatcatgaaaaccaggctggggtttttttaatattgtgaaatgtacaccatgaaatgaaaggtttatcctgtgccagaaaccaaggtttatcatgctctaggaacttttttcttacactgcctaccgccattcatgattaaaccatccagaaataccatccctgtttta

SEQ ID NO: 2166 - protein, 87 aa, Homo sapiens
WRCRGWRGRGKQGSKTLEDRLKIEAKNGTLSVSDTTVGSKQLTFTLKRSEQQKKQQEAEKLHRQERKRLRRSAGHLKSRHKRGRSFH

SEQ ID NO: 2167 - DNA, 1436 bp, Homo sapiens
agtcggcgccagcggccgcacgccgcggagcaggggctcggaggtcccgggattacggtgctcgagcacgctggtgggaaaggacccgggacttgaacagtgttgtgcggcgccatgcaggtctccagcctcaatgaggtgaagatttacagcctcagctgcggcaagtcccttcctgagtggctttctgataggaagaagagagcgctacagaagaaagatgtagatgtccgtaggagaattgaacttattcaggactttgaaatgcctactgtgtgtaccactattaaggtgtcaaaagatggacagtacattttagcaactggaacatataaacctcgggttcgatgttatgacacctatcaattatccttgaagtttgaaaggtgtttagattcagaagttgtcacctttgaaattttgtctgatgactactcaaagttctgaagtttataggttaaacttagaacaaggacgatacctgaatcctctacaaactgatgctgcggagaataatgtttgtgacataaattcagtgcatggcttgtttgccacaggaaccatagagggtagagtggagtgctgggacccaagaactcgaaacagagttggcctgttagactgcgccttaaacagtgtcacagcagattcagagataaacagtttaccaacaatctctgctttgaaatttaatggtgccttgaccatggcagttggaacaaccacagggcaggttttattatatgaccttcgatctgataagccattgctagttaaagatcaccagtatgggctgcccattaagtccgttcatttccaggattcattagatctgattttgtctgctgactctcgaattgtcaagatgtggaataagaactccggaaaaatatttacttccttggagccagagcatgaccttaatgatgtttgtctctaccccaactcaggcatgcttctgacggccaatgaaacccccaagatgggcatctattacattccaccttccctctgagctacagaggtacatatccaccagtctactcggcttctccacttggatgtctaatagcacatcctgtttaatgtgtctacatcagaacttctgatccagctccccacctgcaccccacctgccagggtctccatttcagctgaagccttgttgttgctcactcggctgtctaggcttagagcgcaggagccatccttgtttcctctcctctccacttcatgcctcgtcatccagtccatcagctgtttgcagattttgttccacatccagccatttctcagtgcttcccttccatcaggcctctggattactgtaatactggataactgatctttctgcttctgcttttgtctctcttgtaacctattttccatgtaacagccagactgatgtaaaatattaaaaatataaacaaaacagg

SEQ ID NO: 2168 - protein, 195 aa, Homo sapiens
MTTQSSEVYRLNLEQGRYLNPLQTDAAENNVCDINSVHGLFATGTIEGRVECWDPRTRNRVGLLDCALNSVTADSEINSLPTISALKFNGALTMAVGTTTGQVLLYDLRSDKPLLVKDHQYGLPIKSVHFQDSLDLILSADSRIVKMWNKNSGKIFTSLEPEHDLNDVCLYPNSGMLLTANETPKMGIYYIPPSL

SEQ ID NO: 2169 - DNA, 1857 bp, Homo sapiens
acgcgggcaagttcccggaagagggaaggtggctgaatccgggaagagcggcggccgggagaaaaactagtgaggctctgacaacccggcgtggctgtcggcgacgctgctacgggctgcagtgagctgagatcgcgccgctgcactccagcctgggggacagagcgagattccctctcaaaaaaaaaaaaaaaaaaaaaaaaactagacacagctctccctgctgttagcatcccgagcggcaggaggaggctttcgagtctctgcccaggccgagatgtcatcctcccgggcgggggcgaggcagttcagcgagtgaacccagcgaatgaaggcgaccagggtgcgaattccgagtggaagtgtattctcttctctcctccagtgtttctgcgatgttacgttagaagtactgtaggccgggtgcggtggctcacgcctgtaatcctaacactttgggaggccgaggcgggcggatcacctgaggtcaggagttcaagaccagcctagccaagatggtgaaaccccgtctctactaaaaatacaaaaatcagtcgggcctggtggcgcgcgcctgtaatctcagctactctgaaggctgaggtgggggaatcgcctgaacccgggaggcagaggttgccgtcagctgagatcgtgccactgcagtccagcctgggcaacagagtgagactccgtctcaaaaaaaaaaaaaaaaaaaaaagaagactgtggcgtcatcttcaacccattcctatctctggccctcactttcagtatctaaacctggatatttctaattatgaaatatttccttaaagtaatctgttttcattcctcctgctgaaactcaaatacttaactatttttggattataactttcccaagtgatcttcttacttcctttgatttaatgaacaaattattttatgccttactttctaaaacccaaatattattgttttgctctcctacccacaacattttggaaactctcaaataccaacaccacattgcatcagaattaggttgagagttcttcgtggaccctatatcatttgtccttatattccctatccaccccatccacccctacccagagtaccagaacagtgcctggcctctattaggcattgctacatatttacatttagccatgtacgtagggatatattccttaactctgtcctcaaatttaagatcctccacaaatttttaattttctacactggttacagttaagaaaaactgtaaacatctttgggaaaggtggcataatagaatggttagatcacagactctggcttggcttggtggtgcaggcctattgtcctagctactagtgaagccgaagcaggagaatcacttgagcccaggagttcttggctgtagcacgcaacgagcgttgggtgtcctcagtttggcatcaatatggtgaccccacaagagccagggaccaccatgttacctaaggaggtgtgaagcggctcaggtcagaaatggagcaagtcaaaactcccatgctcaccagtaatgggatcatgcctgtgactaacactgtactccagcttgggcaacacagcaagaccctatctcttgaaaaataaataaagatcacagactctgaagccagactggcaagattcaaatcccgactgccatttttaactgaaagaccttaggtaagttacctaacctctctgtacctgtgtaaaatggagataacagtagtatccacttcacagagttatgaggatgaaatacattcatatttataaaacgtttggaacccagtacttggcacatagtaagaccatgtaagtgtttgtaaaataaaactgaaaataaagccatatacc

SEQ ID NO: 2170 - protein, 39 aa, Homo sapiens
MNKLFYALLSKTQILLFCSPTHNILETLKYQHHIASELG

SEQ ID NO: 2171 - DNA, 1363 bp, Homo sapiens
gtcactgggtaagagaagactggaagcatgtcggagttttggttaatttctgcccctggcgataaggaaaatttgcaagctctggagaggatgaatactgtaacctccaagtccaacctgtcttataataccaaattcgctattcctgacttcaaggtggggaccttggattccctggttggcctctctgatgagttggggaaactcgacacctttgctgaaagcctcataaggagaatggctcagagcgtggtggaagtcatggaggactcaaaggggaaggtccaggagcacctcctggcaaacggagttgacttaacatcctttgtgacccactttgaatgggacatggccaaatatcctgtcaagcagccgctcgtgagtgtggtggacacaatagccaagcaactggcgcagatcgagatggacctgaagtcccgaacggccgcctacaacactctgaagacaaacctggagaacctggaaaagaaatccatggggaacctcttcacccggacactgagtgatattgtgagcaaagaggacttcgtgctggattctgaatatctcgtcacacttctggtcatcgtccccaaaccaaactactcacaatggcaaaaaacctacgaatctctctcagacatggtggtccctcgatcaaccaaactcattactgaggacaaggaagggggccttttcactgtgactctgtttcgaaaagtgattgaagatttcaaaaccaaggccaaagaaaacaagttcactgttcgtgaattttactatgatgagaaggaaattgaaagggaaagggaggagatggccagattgctgtctgataagaagcaacagtatggccccctgctgcgctggctcaaggtgaacttcagtgaagccttcattgcctggatccacatcaaggccctgagagtgtttgtggagtccgtgctcaggtatggactaccagtgaacttccaggcagtgctcctgcagccgcataagaagtcatccaccaagcgtttaagagaggttctaaactctgtcttccgacatctggatgaagtagccgctacaagtatactggatgcatctgtggagatcccgggactgcaactcaataaccaagactattttccttatgtctacttccatattgaccttagtcttcttgactagaaaggccagctggcacctctgtctcatgttcgtgcagattattacagacacctctttcctttagccagagaatggttcaaatgtcttacagaactaagatctttttcagagaaattgctcacaaaagttagtgacagttgtatttatttttttaagttacaataaaatgctctcaagtcctttgaatgtt

SEQ ID NO: 2172 - protein, 381 aa, Homo sapiens; identical to SEQ ID NO: 108

SEQ ID NO: 2173 - DNA, 3014 bp, Homo sapiens
gtcactgggtaagagaagactggaagcatgtcggagttttggttaatttctgcccctggcgataaggaaaatttgcaagctctggagaggatgaatactgtaacctccaagtccaacctgtcttataataccaaattcgctattcctgacttcaaggtggggaccttggattccctggttggcctctctgatgagttggggaaactcgacacctttgctgaaagcctcataaggagaatggctcagagcgtggtggaagtcatggaggactcaaaggggaaggtccaggagcacctcctggcaaacggagttgacttaacatcctttgtgacccactttgaatgggacatggccaaatatcctgtcaagcagccgctcgtgagtgtggtggacacaatagccaagcaactggcgcagatcgagatggacctgaagtcccgaacggccgcctacaacactctgaagacaaacctggagaacctggaaaagaaatccatggggaacctcttcacccggacactgagtgatattgtgagcaaagaggacttcgtgctggattctgaatatctcgtcacacttctggtcatcgtccccaaaccaaactactcacaatggcaaaaaacctacgaatctctctcagacatggtggtccctcgatcaaccaaactcattactgaggacaaggaagggggccttttcactgtgactctgtttcgaaaagtgattgaagatttcaaaaccaaggccaaagaaaacaagttcactgttcgtgaattttactatgatgagaaggaaattgaaagggaaagggaggagatggccagattgctgtctgataagaagcaacagtatggccccctgctgcgctggctcaaggtgaacttcagtgaagccttcattgcctggatccacatcaaggccctgagagtgtttgtggagtccgtgctcaggtatggactaccagtgaacttccaggcagtgctcctgcagccgcataagaagtcatccaccaagcgtttaagagaggttctaaactctgtcttccgacatctggatgaagtagccgctacaagtatactggatgcatctgtggagatcccgggactgcaactcaataaccaagactattttccttatgtctacttccatattgaccttagtcttcttgactagaaaggccagctggcacctctgtctcatgttcgtgcagattattacagacacctctttcctttagccagagaatggttcaaatgtcttacagaactaagatctttttcagagaaattgctcacaaaagttagtgacagttgtatttatttttttaagttacaataaaatgctctcaagtcctttgaatgttccaacaaattcaaaacttcattttctgaatgttttacataaatgcgaactacctgttcgcattggtaacctgctgctgtatttcatgtcttaacggctattttgaggttcattaacaacatagaaagccttgaactgtataaccagctagattccttaataattagtcactagagacagcccaaagacaaatattgggcaggaaatcagttctcactgagcccggtttccatgtaaaatctctgttgtggtgggcataggtggcaccatctaaagaaaagaggtcttgttttttgtttaaaaaagtttgtggggaggaaagacatctgtgtatcacttcaaaatattgatttactgctaaacatcactctgaatttatgatgtggatactaacttcatacatttatcggcattgtccaaaatattttattctttaatggaaaaagccattaatattcaaatgaagggatcacattaaaaaaaacccatacataagaaacagcctccaagaacattcaagcagcagtcagagagaaaaatgtttcgacagccaagttttcttcaaaatattatgtgacagaatacgactcaattcaccggctacaacaattcatagaatttttcaatgttttcttgagatgcaaaagttcactgttgcagtgttttcaaatgaccaatcaagtactacttcttggttaaaaggccactggtagagtcatctgagtgtagagaatgtcccttcactgctggaaaaatccactggctcccaagaaaagaaaatggtctgaagcctctgttgtggctctcacaactcatctttccctaagtcatcaagctccacatcactgaggtcaatgtcatcctccacgggaagctgggagacgacagaaagccactgttagatctgcagaaggggacaccctggaaggtcaacatctcattttatggaagagcgactctctggagctactcctgctacaatccaggttctcctcagtctgactcctaccctgaccttcgtacctatgattatacggatggaaaagctcagaactcaggtgaaacatttcaacatcacatcactcaccattttaacactggaagccacttgaacgtgtccttttgaggagggtgggacacaacagtacagaaataagtgctaatttcaaagctatcattttctatttttctaagataaagtaaatgaattccaggttaaatgttcactttaaggtaataatcaggaaagcaaccttactactgaaatgtatcttggctgtcaagagtatcaaatgccatgcagcacttaaacttgtgataaggaagatgaagggtcttcagagaagaacctcttaaaaggcccacgggtgcaccagggctgaggtctgatgggaaggacttgactccaggtgcagagatgcacaggctcaagagagtaaaccaggactgctgcccgcacagcttccctcccgggcactcacctcgccatccctgccgtcccaaggctctctctcaacgatggtagggaaagccccgcctcctacaggtgccgtggagccacgcccaaaagagagctcccttagggaaaaatgaccaaaacacacacacacatttacaatggactgctggtgcagaagaataaacaactttaa

SEQ ID NO: 2174 - protein, 381 aa, Homo sapiens; identical to SEQ ID NO: 108

SEQ ID NO: 2175 - DNA, 473 bp, Homo sapiens
caggaagacagctggcccagtgaccctcagaagtggattgcagaagtgggggtacctcccaggtaacattagcggggataatgccagtgctgagagccgactgtgccaggctccttcacattccctcctcgcagccccacgtcgtgacaccccaccagctttgacaaccagccacggcaggagcatttacaccacggtcatccacaaatgctacaggccagcacacggctgctgacgggagaatctcaagagtcaacagatgaagaaaatgggtgctccatagaatgccaacagctttagtctaaatatacacatttttatacatggaagaatccattgtcaacttttaaacattggttaccttttgggagaataaagggaatgggggcgatgatcacagctcggatgatattattattttaaagataaaatcataaaataattttaaagataaaataaatataattaaaatg

SEQ ID NO: 2176 - protein, 30 aa, Homo sapiens
MLQASTRLLTGESQESTDEENGCSIECQQL

SEQ ID NO: 2177 - DNA, 2415 bp, Homo sapiens
aaacgtcttgcatcctttttgtcactcatcaaccagagggacagaccaggccctggggtttgagtgtactttgagagcagagtgggatgtccctgtgtttcccacctgtttgcagagacagaatgggaaagggtgagtgtcctaactgcatgcccaactcatctcctgcactctgcatgccgaggtgccccccgaatgccaggaaggcatctgtggctgggcatggtggagccaccttgacagagcgcagagagccgtttccactaacgcctcccggtgctgtcctggtcggcctgcgatgggggtcctggctgagcccaagcaaggggagggagctcagggctgacccctctgccagagatcggctctgtgcttggaatatggaacccaaagaccttaacactgcccttctctctgccttcaccactccaggagcccggtgggcacctaccacatctctagtctagccagcacgcgagtcccgagggtgggcctgaattcctgagcttgctctcgcgtgcctttcaggcgatgagaatgatttatttgtttgtgatgcatgtttgctgaaagattaataaatcatttctgtgcctttagcaaacttcctgtgttgctcttaaaaagggatcatccaccttcccggaccacaaggttaaggtaaccccgctaggtaaccctgataggcctgctgcggggcagaccgacagagagagagagagtgagggcgagggtgaggtaagcaacgccccgggaaccccggggtccctggctcacatctcctcgccagctcaggcgccttctgggaaaatgaatccttgcatttttctgttctctaatatggcttttgaggtcttaaatttgaggagccggaatcatgccttcctcctaatctgcagggcctctttggagctgcccccgccagcagtgaagggtgcttgtcggccagggcgcctctccccgggcgcctggctggaggtggctggagctgggacgggcagggccctggctggggtggtggttggcagctcagctctcctcccttggctgcccttgctgaacccacccctgacctttgtgggcagctgcagtgtcaggcgggagctcggggctcttgctccaagactcttgagctcccaggaagacctgccacaccggcatcagtggctgctgctgtggccacgtgaggtggggctgtgaggggaggcggctgctgtggatgatgccaggaccctgggggcagagcctctgagaaggtgggctccctggctgcacagtgtcaggcagaagcccctggctgcctgctgaaagccccaaggtcaggggctgcccagctccccgcgctgcggtctgtggtggccccgtgcatgcaccgggtggctggcccgctgagcttccccggcaccaggtgccctggacctcgaggtcctgagcctgacccagggctggtctgaccgactctctgcttctggctcctgggcacttcttctcagctcagggcgtgctctgtcaaaacccaagtcctttcttggctctgtgtcaggcggggtgttcagcaggggtcacctggctcttctgtctttgcagggccccctgctgcgctggctcaaggtgaacttcagtgaagccttcattgcctggatccacatcaaggccctgagagtgtttgtggagtccgtgctcaggtgcgtggcagtgatgccccggctgggactgtcctgaggatgggcagggtctgggggagctatcggggcaccccagctcctgccttctctccatcctccacccgtctcctttctgagactgtggctgttggcaacacgctcaattccgagtcaagtacaccctcccctcagccctgtgtcccctgctgtctgctccctccgttcctgctacacttggggcaagtgtcacctgggttctccccagctgccctacctgcatgcccttgtggaccctctggctggctcctgtccccaccctcgtgaagcccgcagggcccgagtggctcctggaaggcgctctcgggctgcctccgtcctcagcctggaagccgcacccctcaaggcagtccagagagaaaaccaaaaccacaccaacaacaacaaagcttattttgccttttttttttttatttgagatggagtttcactcttgtcgcccaggctagagtgcaatggcatgttcctggctcactgaaacctccacctctcaggttcaagagattctcctgtctcagcctccctctactaaaaatacaaaaattagccgggtgtggtggcatgggcctgtagtactggctacttgggaggctgaggtgggaggatcacttgagcctcggagccggaggttgcagtgagccgagatcgcgtcactgcactcgagcctgggcaacaagagaaactccggctatag

SEQ ID NO: 2178 - protein, 60 aa, Homo sapiens
MACSWLTETSTSQVQEILLSQPPSTKNTKISRVWWHGPVVLATWEAEVGGSLEPRSRRLQ

SEQ ID NO: 2179 - DNA, 3128 bp, Homo sapiens
tttttgtcactcatcaaccagagggacagaccaggccctggggtttgagtgtactttgagagcagagtgggatgtccctgtgtttcccacctgtttgcagagacagaatgggaaagggtgagtgtcctaactgcatgcccaactcatctcctgcactctgcatgccgaggtgccccccgaatgccaggaaggcatctgtggctgggcatggtggagccaccttgacagagcgcagagagccgtttccactaacgcctcccggtgctgtcctggtcggcctgcgatgggggtcctggctgagcccaagcaaggggagggagctcagggctgacccctctgccagagatcggctctgtgcttggaatatggaacccaaagaccttaacactgcccttctctctgccttcaccactccaggagcccggtgggcacctaccacatctctagtctagccagcacgcgagtcccgagggtgggcctgaattcctgagcttgctctcgcgtgcctttcaggcgatgagaatgatttatttgtttgtgatgcatgtttgctgaaagattaataaatcatttctgtgcctttagcaaacttcctgtgttgctcttaaaaagggatcatccaccttcccggaccacaaggttaaggtaaccccgctaggtaaccctgataggcctgctgcggggcagaccgacagagagagagagagtgagggcgagggtgaggtaagcaacgccccgggaaccccggggtccctggctcacatctcctcgccagctcaggcgccttctgggaaaatgaatccttgcatttttctgttctctaatatggcttttgaggtcttaaatttgaggagccggaatcatgccttcctcctaatctgcagggcctctttggagctgcccccgccagcagtgaagggtgcttgtcggccagggcgcctctccccgggcgcctggctggaggtggctggagctgggacgggcagggccctggctggggtggtggttggcagctcagctctcctcccttggctgcccttgctgaacccacccctgacctttgtgggcagctgcagtgtcaggcgggagctcggggctcttgctccaagactcttgagctcccaggaagacctgccacaccggcatcagtggctgctgctgtggccacgtgaggtggggctgtgaggggaggcggctgctgtggatgatgccaggaccctgggggcagagcctctgagaaggtgggctccctggctgcacagtgtcaggcagaagcccctggctgcctgctgaaagccccaaggtcaggggctgcccagctccccgcgctgcggtctgtggtggccccgtgcatgcaccgggtggctggcccgctgagcttccccggcaccaggtgccctggacctcgaggtcctgagcctgacccagggctggtctgaccgactctctgcttctggctcctgggcacttcttctcagctcagggcgtgctctgtcaaaacccaagtcctttcttggctctgtgtcaggcggggtgttcagcaggggtcacctggctcttctgtctttgcagggccccctgctgcgctggctcaaggtgaacttcagtgaagccttcattgcctggatccacatcaaggccctgagagtgtttgtggagtccgtgctcaggtatggactaccagtgaacttccaggcagtgctcctgcagccgcataagaagtcatccaccaagcgtttaagagaggttctaaactctgtcttccgacatctggatgaagtagccgctacaagtatactggatgcatctgtggagatcccgggactgcaactcaataaccaagactattttccttatgtctacttccatattgaccttagtcttcttgactagaaaggccagctggcacctctgtctcatgttcgtgcagattattacagacacctctttcctttagccagagaatggttcaaatgtcttacagaactaagatctttttcagagaaattgctcacaaaagttagtgacagttgtatttatttttttaagttacaataaaatgctctcaagtcctttgaatgttccaacaaattcaaaacttcattttctgaatgttttacataaatgcgaactacctgttcgcattggtaacctgctgctgtatttcatgtcttaacggctattttgaggttcattaacaacatagaaagccttgaactgtataaccagctagattccttaataattagtcactagagacagcccaaagacaaatattgggcaggaaatcagttctcactgagcccggtttccatgtaaaatctctgttgtggtgggcataggtggcaccatctaaagaaaagaggtcttgttttttgtttaaaaaagtttgtggggaggaaagacatctgtgtatcacttcaaaatattgatttactgctaaacatcactctgaatttatgatgtggatactaacttcatacatttatcggcattgtccaaaatattttattctttaatggaaaaagccattaatattcaaatgaagggatcacatcactcaccattttaacactggaagccacttgaacgtgtccttttgaggagggtgggacacaacagtacagaaataagtgctaatttcaaagctatcattttctatttttctaagataaagtaaatgaattccaggttaaatgttcactttaaggtaataatcaggaaagcaaccttactactgaaatgtatcttggctgtcaagagtatcaaatgccatgcagcacttaaacttgtgataaggaagatgaagggtcttcagagaagaacctcttaaaaggcccacgggtgcaccagggctgaggtctgatgggaaggacttgactccaggtgcagagatgcacaggctcaagagagtaaaccaggactgctgcccgcacagcttccctcccgggcactcacctcgccatccctgccgtcccaaggctctctctcaacgatggtagggaaagccccgcctcctacaggtgccgtggagccacgcccaaaagagagctcccttagggaaaaatgaccaaaacacacacacacatttacaatggactgctggtgcagaagaataaacaacttta

SEQ ID NO: 2180 - protein, 51 aa, Homo sapiens
MHLWRSRDCNSITKTIFLMSTSILTLVFLTRKASWHLCLMFVQIITDTSFL

SEQ ID NO: 2181 - DNA, 1831 bp, Homo sapiens
gcctcccggtgctgtcctggtcggcctgcgatgggggtcctggctgagcccaagcaaggggagggagctcagggctgacccctctgccagagatcggctctgtgcttggaatatggaacccaaagaccttaacactgcccttctctctgccttcaccactccaggagcccggtgggcacctaccacatctctagtctagccagcacgcgagtcccgagggtgggcctgaattcctgagcttgctctcgcgtgcctttcaggcgatgagaatgatttatttgtttgtgatgcatgtttgctgaaagattaataaatcatttctgtgcctttagcaaacttcctgtgttgctcttaaaaagggatcatccaccttcccggaccacaaggttaaggtaaccccgctaggtaaccctgataggcctgctgcggggcagaccgacagagagagagagagtgagggcgagggtgaggtaagcaacgccccgggaaccccggggtccctggctcacatctcctcgccagctcaggcgccttctgggaaaatgaatccttgcatttttctgttctctaatatggcttttgaggtcttaaatttgaggagccggaatcatgccttcctcctaatctgcagggcctctttggagctgcccccgccagcagtgaagggtgcttgtcggccagggcgcctctccccgggcgcctggctggaggtggctggagctgggacgggcagggccctggctggggtggtggttggcagctcagctctcctcccttggctgcccttgctgaacccacccctgacctttgtgggcagctgcagtgtcaggcgggagctcggggctcttgctccaagactcttgagctcccaggaagacctgccacaccggcatcagtggctgctgctgtggccacgtgaggtggggctgtgaggggaggcggctgctgtggatgatgccaggaccctgggggcagagcctctgagaaggtgggctccctggctgcacagtgtcaggcagaagcccctggctgcctgctgaaagccccaaggtcaggggctgcccagctccccgcgctgcggtctgtggtggccccgtgcatgcaccgggtggctggcccgctgagcttccccggcaccaggtgccctggacctcgaggtcctgagcctgacccagggctggtctgaccgactctctgcttctggctcctgggcacttcttctcagctcagggcgtgctctgtcaaaacccaagtcctttcttggctctgtgtcaggcggggtgttcagcaggggtcacctggctcttctgtctttgcagggccccctgctgcgctggctcaaggtgaacttcagtgaagccttcattgcctggatccacatcaaggccctgagagtgtttgtggagtccgtgctcaggtatggactaccagtgaacttccaggcagtgctcctgcagccgcataagaagtcatccaccaagcgtttaagagaggttctaaactctgtcttccgacatctggatgaagtagccgctacaagtatactggatgcatctgtggagatcccgggactgcaactcaataaccaagactattttccttatgtctacttccatattgaccttagtcttcttgactagaaaggccagctggcacctctgtctcatgttcgtgcagattattacagacacctctttcctttagccagagaatggttcaaatgtcttacagaactaagatctttttcagagaaattgctcacaaaagttagtgacagttgtatttatttttttaagttacaataaaatgctctcaagtcctttgaatgttc

SEQ ID NO: 2182 - protein, 51 aa, Homo sapiens; identical to SEQ ID NO: 2180

SEQ ID NO: 2183 - DNA, 764 bp, Homo sapiens
ttcaggcgatgagaatgatttatttgtttgtgatgcatgtttgctgaaagattaataaatcatttctgtgcctttagcaaacttcctgtgttgctcttaaaaagggatcatccactcctaccctgaccttcgtacctatgattatacggatggaaaagctcagaactcaggtgaaacatttcaacatcacatcactcaccattttaacactggaagccacttgaacgtgtccttttgaggagggtgggacacaacagtacagaaataagtgctaatttcaaagctatcattttctatttttctaagataaagtaaatgaattccaggttaaatgttcactttaaggtaataatcaggaaagcaaccttactactgaaatgtatcttggctgtcaagagtatcaaatgccatgcagcacttaaacttgtgataaggaagatgaagggtcttcagagaagaacctcttaaaaggcccacgggtgcaccagggctgaggtctgatgggaaggacttgactccaggtgcagagatgcacaggctcaagagagtaaaccaggactgctgcccgcacagcttccctcccgggcactcacctcgccatccctgccgtcccaaggctctctctcaacgatggtagggaaagccccgcctcctacaggtgccgtggagccacgcccaaaagagagctcccttagggaaaaatgaccaaaacacacacacacatttacaatggactgctggtgcagaagaataaacaactttaa

SEQ ID NO: 2184 - protein, 50 aa, Homo sapiens
MNSRLNVHFKVIIRKATLLLKCILAVKSIKCHAALKLVIRKMKGLQRRTS

SEQ ID NO: 2185 - DNA, 1075 bp, Homo sapiens
caagatatttcagaaaggcgagtctcctgtggattatgacggtgggcggacaagatccgacatcgtgtcccgggcccatcgttgagagagagccttgggacggcagggatggcgagcttcccgtggaggatgacattgacctcagtgatgtggagcttgatgacttagggaaagatgagttgtgagagccacaacagaggcttcagaccattttcttttcttgggagccagtggatttttccagcagtgaagggacattctctacactcagatgactctaccagtggccttttaaccaagaagtagtacttgattggtcatttgaaaacactgcaacagtgaacttttgcatctcaagaaaacattgaaaaattctatgaattgttgtagccggtgaattgagtcgtattctgtcacataatattttgaagaaaacttggctgtcgaaacatttttctctctgactgctgcttgaatgttcttggaggctgtttcttatgtatgggttttttttaatgtgatcccttcatttgaatattaatggctttttccattaaagaataaaatattttggacaatgccgataaatgtatgaagttagtatccacatcataaattcagagtgatgtttagcagtaaatcaatattttgaagtgatacacagatgtctttcctccccacaaacttttttaaacaaaaaacaagacctcttttctttagatggtgccacctatgcccaccacaacagagattttacatggaaaccgggctcagtgagaactgatttcctgcccaatatttgtctttgggctgtctctagtgactaattattaaggaatctagctggttatacagttcaaggctttctatgttgttaatgaacctcaaaatagccgttaagacatgaaatacagcagcaggttaccaatgcgaacaggtagttcgcatttatgtaaaacattcagaaaatgaagttttgaatttgttggaacattcaaaggacttgagagcattttattgtaacttaaaaaaataaatacaactgtcactaacttttgtgagcaatttctctgaa

SEQ ID NO: 2186 - protein, 49 aa, Homo sapiens
MTVGGQDPTSCPGPIVEREPWDGRDGELPVEDDIDLSDVELDDLGKDEL

SEQ ID NO: 2187 - DNA, 1760 bp, Homo sapiens
ggcagaagtgatagttcaagtaagaaggatgtgattgagctgacagacgacagctttgataagaatgttctggacagtgaagatgtttggatggttgagttctatgctccttggtgtggacactgcaaaaacctagagccagagtgggctgccgcagcttcagaagtaaaagagcagacgaaaggaaaagtgaaactggcagctgtggatgctacagtcaatcaggttctggcctcccgatacgggattagaggatttcctacaatcaagatatttcagaaaggcgagtctcctgtggattatgacggtgggcggacaagatccgacatcgtgtcccgggcccttgatttgttttctgataacgccccacctcctgagctgcttgagattatcaacgaggacattgccaagaggacgtgtgaggagcaccagctctgtgttgtggctgtgctgccccatatccttgatactggagctgcaggcagaaattcttatctggaagttcttctgaagttggcagacaaatacaaaaagaaaatgtgggggtggctgtggacagaagctggagcccagtctgaacttgagaccgcgttggggattggagggtttgggtaccccgccatggccgccatcaatgcacgcaagatgaaatttgctctgctaaaaggctccttcagtgagcaaggcatcaacgagtttctcagggagctctcttttgggcgtggctccacggcacctgtaggaggcggggctttccctaccatcgttgagagagagccttgggacggcagggatggcgagcttcccgtggaggatgacattgacctcagtgatgtggagcttgatgacttagggaaagatgagttgtgagagccacaacagaggcttcagaccattttcttttcttgggagccagtggatttttccagcagtgaagggacattctctacactcagatgactctaccagtggccttttaaccaagaagtagtacttgattggtcatttgaaaacactgcaacagtgaacttttgcatctcaagaaaacattgaaaaattctatgaattgttgtagccggtgaattgagtcgtattctgtcacataatattttgaagaaaacttggctgtcgaaacatttttctctctgactgctgcttgaatgttcttggaggctgtttcttatgtatgggttttttttaatgtgatcccttcatttgaatattaatggctttttccattaaagaataaaatattttggacaatgccgataaatgtatgaagttagtatccacatcataaattcagagtgatgtttagcagtaaatcaatattttgaagtgatacacagatgtctttcctccccacaaacttttttaaacaaaaaacaagacctcttttctttagatggtgccacctatgcccaccacaacagagattttacatggaaaccgggctcagtgagaactgatttcctgcccaatatttgtctttgggctgtctctagtgactaattattaaggaatctagctggttatacagttcaaggctttctatgttgttaatgaacctcaaaatagccgttaagacatgaaatacagcagcaggttaccaatgcgaacaggtagttcgcatttatgtaaaacattcagaaaatgaagttttgaatttgttggaacattcaaaggacttgagagcattttattgtaacttaaaaaaataaatacaactgtcactaacttttgtgagcaatttctctgaa

SEQ ID NO: 2188 - protein, 259 aa, Homo sapiens
MVEFYAPWCGHCKNLEPEWAAAASEVKEQTKGKVKLAAVDATVNQVLASRYGIRGFPTIKIFQKGESPVDYDGGRTRSDIVSRALDLFSDNAPPPELLEIINEDIAKRTCEEHQLCVVAVLPHILDTGAAGRNSYLEVLLKLADKYKKKMWGWLWTEAGAQSELETALGIGGFGYPAMAAINARKMKFALLKGSFSEQGINEFLRELSFGRGSTAPVGGGAFPTIVEREPWDGRDGELPVEDDIDLSDVELDDLGKDEL

SEQ ID NO: 2189 - DNA, 2361 bp, Homo sapiens
agcgccttccggcccgcccccgcgcggccgcccctcggaccaccggactggcctggggcgggacgtgggcgcgggggcgcggcgtgcggcacgctgcagggctgaagcggcggcggcggtggggactgcacgtagcccggcgctcggcatggctctcctggtgctcggtctggtgagctgtaccttctttctggcagtgaatggtctgtattcctctagtgatgatgtgatcgaattaactccatcgaatttcaaccgagaagttattcagagtgatagtttgtggcttgtagaattctatgctccatggtgtggtcactgtcaaagattaacaccagaatggaagaaagcagcaactgcattaaaagatgttgtcaaagttggtgcagttgatgcagataagcatcattccctaggaggtcagtatggtgttcagggatttcctaccattaagatttttggatccaacaaaaacagaccagaagattaccaaggtggcagaactggtgaagccattgtagatgctgcgctgagtgctctgcgccagctcgtgaaggatcgcctcgggggacggagcggaggatacagttctggaaaacaaggcagaagtgatagttcaagtaagaaggatgtgattgagctgacagacgacagctttgataagaatgttctggacagtgaagatgtttggatggttgagttctatgctccttggtgtggacactgcaaaaacctagagccagagtgggctgccgcagcttcagaagtaaaagagcagacgaaaggaaaagtgaaactggcagctgtggatgctacagtcaatcaggttctggcctcccgatacgggattagaggatttcctacaatcaagatatttcagaaaggcgagtctcctgtggattatgacggtgggcggacaagatccgacatcgtgtcccgggcccttgatttgttttctgataacgccccacctcctgagctgcttgagattatcaacgaggacattgccaagaggacgtgtgaggagcaccagctctgtgttgtggctgtgctgccccatatccttgatactggagctgcaggcagaaattcttatctggaagttcttctgaagttggcagacaaatacaaaaagaaaatgtgggggtggctgtggacagaagctggagcccagtctgaacttgagaccgcgttggggattggagggtttgggtaccccgccatggccgccatcaatgcacgcaagatgaaatttgctctgctaaaaggctccttcagtgagcaaggcatcaacgagtttctcagggagctctcttttgggcgtggctccacggcacctgtaggaggcggggctttccctaccatcgttgagagagagccttgggacggcagggatggcgagcttcccgtggaggatgacattgacctcagtgatgtggagcttgatgacttagggaaagatgagttgtgagagccacaacagaggcttcagaccattttcttttcttgggagccagtggatttttccagcagtgaagggacattctctacactcagatgactctaccagtggccttttaaccaagaagtagtacttgattggtcatttgaaaacactgcaacagtgaacttttgcatctcaagaaaacattgaaaaattctatgaattgttgtagccggtgaattgagtcgtattctgtcacataatattttgaagaaaacttggctgtcgaaacatttttctctctgactgctgcttgaatgttcttggaggctgtttcttatgtatgggttttttttaatgtgatcccttcatttgaatattaatggctttttccattaaagaataaaatattttggacaatgccgataaatgtatgaagttagtatccacatcataaattcagagtgatgtttagcagtaaatcaatattttgaagtgatacacagatgtctttcctccccacaaacttttttaaacaaaaaacaagacctcttttctttagatggtgccacctatgcccaccacaacagagattttacatggaaaccgggctcagtgagaactgatttcctgcccaatatttgtctttgggctgtctctagtgactaattattaaggaatctagctggttatacagttcaaggctttctatgttgttaatgaacctcaaaatagccgttaagacatgaaatacagcagcaggttaccaatgcgaacaggtagttcgcatttatgtaaaacattcagaaaatgaagttttgaatttgttggaacattcaaaggacttgagagcattttattgtaacttaaaaaaataaatacaactgtcactaacttttgtgagcaatttctctgaa

SEQ ID NO: 2190 - protein, 440 aa, Homo sapiens; identical to SEQ ID NO: 110

SEQ ID NO: 2191 - DNA, 2707 bp, Homo sapiens
aaccgagggtgcccgctgcaaggttaggtctcctggcctcgtgcttcaaacaggaattaatagaatcccaccaggtggtgtttgtgaggcgtagatggcgaggatatctgcagctgcagtttgctcattctcacggctgcactgcattgcactgtgtgagcagaacacaatttatccttccactgctgatgggcatttgggcggtttgcagtttgggatctggccagttctgctgttgtgagcattcttaagcctgcctttcggtgaattcacacgcccgtggggacgctcactctcagagcacagcttccagaggagagaagatacccccagcatccatgagaagagacctccgggagaagcttgtgtgggtgtgccgaccactggccccagttgaggtcccagccaacatcagctccgacttccagccatgctcaccaacttctcctgcccactccctatcaaggaaaagtcccataatgtatccatcaaccaccatggctaatgcacccggtctggtgagctgtaccttctttctggcagtgaatggtctgtattcctctagtgatgatgtgatcgaattaactccatcgaatttcaaccgagaagttattcagagtgatagtttgtggcttgtagaattctatgctccatggtgtggtcactgtcaaagattaacaccagaatggaagaaagcagcaactgcattaaaagatgttgtcaaagttggtgcagttgatgcagataagcatcattccctaggaggtcagtatggtgttcagggatttcctaccattaagatttttggatccaacaaaaacagaccagaagattaccaaggtggcagaactggtgaagccattgtagatgctgcgctgagtgctctgcgccagctcgtgaaggatcgcctcgggggacggagcggaggatacagttctggaaaacaaggcagaagtgatagttcaagtaagaaggatgtgattgagctgacagacgacagctttgataagaatgttctggacagtgaagatgtttggatggttgagttctatgctccttggtgtggacactgcaaaaacctagagccagagtgggctgccgcagcttcagaagtaaaagagcagacgaaaggaaaagtgaaactggcagctgtggatgctacagtcaatcaggttctggcctcccgatacgggattagaggatttcctacaatcaagatatttcagaaaggcgagtctcctgtggattatgacggtgggcggacaagatccgacatcgtgtcccgggcccttgatttgttttctgataacgccccacctcctgagctgcttgagattatcaacgaggacattgccaagaggacgtgtgaggagcaccagctctgtgttgtggctgtgctgccccatatccttgatactggagctgcaggcagaaattcttatctggaagttcttctgaagttggcagacaaatacaaaaagaaaatgtgggggtggctgtggacagaagctggagcccagtctgaacttgagaccgcgttggggattggagggtttgggtaccccgccatggccgccatcaatgcacgcaagatgaaatttgctctgctaaaaggctccttcagtgagcaaggcatcaacgagtttctcagggagctctcttttgggcgtggctccacggcacctgtaggaggcggggctttccctaccatcgttgagagagagccttgggacggcagggatggcgagcttcccgtggaggatgacattgacctcagtgatgtggagcttgatgacttagggaaagatgagttgtgagagccacaacagaggcttcagaccattttcttttcttgggagccagtggatttttccagcagtgaagggacattctctacactcagatgactctaccagtggccttttaaccaagaagtagtacttgattggtcatttgaaaacactgcaacagtgaacttttgcatctcaagaaaacattgaaaaattctatgaattgttgtagccggtgaattgagtcgtattctgtcacataatattttgaagaaaacttggctgtcgaaacatttttctctctgactgctgcttgaatgttcttggaggctgtttcttatgtatgggttttttttaatgtgatcccttcatttgaatattaatggctttttccattaaagaataaaatattttggacaatgccgataaatgtatgaagttagtatccacatcataaattcagagtgatgtttagcagtaaatcaatattttgaagtgatacacagatgtctttcctccccacaaacttttttaaacaaaaaacaagacctcttttctttagatggtgccacctatgcccaccacaacagagattttacatggaaaccgggctcagtgagaactgatttcctgcccaatatttgtctttgggctgtctctagtgactaattattaaggaatctagctggttatacagttcaaggctttctatgttgttaatgaacctcaaaatagccgttaagacatgaaatacagcagcaggttaccaatgcgaacaggtagttcgcatttatgtaaaacattcagaaaatgaagttttgaatttgttggaacattcaaaggacttgagagcattttattgtaacttaaaaaaataaatacaactgtcactaacttttgtgagcaatttctctgaa

SEQ ID NO: 2192 - protein, 492 aa, Homo sapiens
MRRDLREKLVWVCRPLAPVEVPANISSDFQPCSPTSPAHSLSRKSPIMYPSTTMANAPGLVSCTFFLAVNGLYSSSDDVIELTPSNFNREVIQSDSLWLVEFYAPWCGHCQRLTPEWKKAATALKDVVKVGAVDADKHHSLGGQYGVQGFPTIKIFGSNKNRPEDYQGGRTGEAIVDAALSALRQLVKDRLGGRSGGYSSGKQGRSDSSSKKDVIELTDDSFDKNVLDSEDVWMVEFYAPWCGHCKNLEPEWAAAASEVKEQTKGKVKLAAVDATVNQVLASRYGIRGFPTIKIFQKGESPVDYDGGRTRSDIVSRALDLFSDNAPPPELLEIINEDIAKRTCEEHQLCVVAVLPHILDTGAAGRNSYLEVLLKLADKYKKKMWGWLWTEAGAQSELETALGIGGFGYPAMAAINARKMKFALLKGSFSEQGINEFLRELSFGRGSTAPVGGGAFPTIVEREPWDGRDGELPVEDDIDLSDVELDDLGKDEL

SEQ ID NO: 2193 - DNA, 233 bp, Homo sapiens
gcggcgtgcggcacgctgcagggctgaagcggcggcggcggtggggactgcacgtagcccggcgctcggcatggctctcctggtgctcggtctggtgagctgtaccttctttctggcagtgaatggtctgtattcctctagtgatgatgtgatcgaattaactccatcgaatttcaaccgagaagttattcagatttattgtaacttaaaaaaataaatacaactgtcactaa

SEQ ID NO: 2194 - protein, 48 aa, Homo sapiens
MALLVLGLVSCTFFLAVNGLYSSSDDVIELTPSNFNREVIQIYCNLKK

SEQ ID NO: 2195 - DNA, 1050 bp, Homo sapiens
caagatatttcagaaaggcgagtctcctgtggattatgacggtgggcggacaagatccgacatcgtgtcccgggcccatcgttgagagagagccttgggacggcagggatggcgagcttcccgtggaggatgacattgacctcagtgatgtggagcttgatgacttagggaaagatgagttgtgagagccacaacagaggcttcagaccattttcttttcttgggagccagtggatttttccagcagtgaagggacattctctacactcagatgactctaccagtggccttttaaccaagaagtagtacttgattggtcatttgaaaacactgcaacagtgaacttttgcatctcaagaaaacattgaaaaattctatgaattgttgtagccggtgaattgagtcgtattctgtcacataatattttgaagaaaacttggctgtcgaaacatttttctctctgactgctgcttgaatgttcttggaggctgtttcttatgtatgggttttttttaatgtgatcccttcatttgaatattaatggctttttccattaaagaataaaatattttggacaatgccgataaatgtatgaagttagtatccacatcataaattcagagtgatgtttagcagtaaatcaatattttgaagtgatacacagatgtctttcctccccacaaacttttttaaacaaaaaacaagacctcttttctttagatggtgccacctatgcccaccacaacagagattttacatggaaaccgggctcagtgagaactgatttcctgcccaatatttgtctttgggctgtctctagtgactaattattaaggaatctagctggttatacagttcaaggctttctatgttgttaatgaacctcaaaatagccgttaagacatgaaatacagcagcaggttaccaatgcgaacaggtagttcgcatttatgtaaaacattcagaaaatgaagttttgaatttgttggaacattcaaaggacttgagagcattttattgtaacttaaaaaaataaatacaactgtcact

SEQ ID NO: 2196 - protein, 49 aa, Homo sapiens; identical to SEQ ID NO: 2186

SEQ ID NO: 2197 - DNA, 1735 bp, Homo sapiens
ggcagaagtgatagttcaagtaagaaggatgtgattgagctgacagacgacagctttgataagaatgttctggacagtgaagatgtttggatggttgagttctatgctccttggtgtggacactgcaaaaacctagagccagagtgggctgccgcagcttcagaagtaaaagagcagacgaaaggaaaagtgaaactggcagctgtggatgctacagtcaatcaggttctggcctcccgatacgggattagaggatttcctacaatcaagatatttcagaaaggcgagtctcctgtggattatgacggtgggcggacaagatccgacatcgtgtcccgggcccttgatttgttttctgataacgccccacctcctgagctgcttgagattatcaacgaggacattgccaagaggacgtgtgaggagcaccagctctgtgttgtggctgtgctgccccatatccttgatactggagctgcaggcagaaattcttatctggaagttcttctgaagttggcagacaaatacaaaaagaaaatgtgggggtggctgtggacagaagctggagcccagtctgaacttgagaccgcgttggggattggagggtttgggtaccccgccatggccgccatcaatgcacgcaagatgaaatttgctctgctaaaaggctccttcagtgagcaaggcatcaacgagtttctcagggagctctcttttgggcgtggctccacggcacctgtaggaggcggggctttccctaccatcgttgagagagagccttgggacggcagggatggcgagcttcccgtggaggatgacattgacctcagtgatgtggagcttgatgacttagggaaagatgagttgtgagagccacaacagaggcttcagaccattttcttttcttgggagccagtggatttttccagcagtgaagggacattctctacactcagatgactctaccagtggccttttaaccaagaagtagtacttgattggtcatttgaaaacactgcaacagtgaacttttgcatctcaagaaaacattgaaaaattctatgaattgttgtagccggtgaattgagtcgtattctgtcacataatattttgaagaaaacttggctgtcgaaacatttttctctctgactgctgcttgaatgttcttggaggctgtttcttatgtatgggttttttttaatgtgatcccttcatttgaatattaatggctttttccattaaagaataaaatattttggacaatgccgataaatgtatgaagttagtatccacatcataaattcagagtgatgtttagcagtaaatcaatattttgaagtgatacacagatgtctttcctccccacaaacttttttaaacaaaaaacaagacctcttttctttagatggtgccacctatgcccaccacaacagagattttacatggaaaccgggctcagtgagaactgatttcctgcccaatatttgtctttgggctgtctctagtgactaattattaaggaatctagctggttatacagttcaaggctttctatgttgttaatgaacctcaaaatagccgttaagacatgaaatacagcagcaggttaccaatgcgaacaggtagttcgcatttatgtaaaacattcagaaaatgaagttttgaatttgttggaacattcaaaggacttgagagcattttattgtaacttaaaaaaataaatacaactgtcact

SEQ ID NO: 2198 - protein, 259 aa, Homo sapiens; identical to SEQ ID NO: 2188

SEQ ID NO: 2199 - DNA, 2336 bp, Homo sapiens
agcgccttccggcccgcccccgcgcggccgcccctcggaccaccggactggcctggggcgggacgtgggcgcgggggcgcggcgtgcggcacgctgcagggctgaagcggcggcggcggtggggactgcacgtagcccggcgctcggcatggctctcctggtgctcggtctggtgagctgtaccttctttctggcagtgaatggtctgtattcctctagtgatgatgtgatcgaattaactccatcgaatttcaaccgagaagttattcagagtgatagtttgtggcttgtagaattctatgctccatggtgtggtcactgtcaaagattaacaccagaatggaagaaagcagcaactgcattaaaagatgttgtcaaagttggtgcagttgatgcagataagcatcattccctaggaggtcagtatggtgttcagggatttcctaccattaagatttttggatccaacaaaaacagaccagaagattaccaaggtggcagaactggtgaagccattgtagatgctgcgctgagtgctctgcgccagctcgtgaaggatcgcctcgggggacggagcggaggatacagttctggaaaacaaggcagaagtgatagttcaagtaagaaggatgtgattgagctgacagacgacagctttgataagaatgttctggacagtgaagatgtttggatggttgagttctatgctccttggtgtggacactgcaaaaacctagagccagagtgggctgccgcagcttcagaagtaaaagagcagacgaaaggaaaagtgaaactggcagctgtggatgctacagtcaatcaggttctggcctcccgatacgggattagaggatttcctacaatcaagatatttcagaaaggcgagtctcctgtggattatgacggtgggcggacaagatccgacatcgtgtcccgggcccttgatttgttttctgataacgccccacctcctgagctgcttgagattatcaacgaggacattgccaagaggacgtgtgaggagcaccagctctgtgttgtggctgtgctgccccatatccttgatactggagctgcaggcagaaattcttatctggaagttcttctgaagttggcagacaaatacaaaaagaaaatgtgggggtggctgtggacagaagctggagcccagtctgaacttgagaccgcgttggggattggagggtttgggtaccccgccatggccgccatcaatgcacgcaagatgaaatttgctctgctaaaaggctccttcagtgagcaaggcatcaacgagtttctcagggagctctcttttgggcgtggctccacggcacctgtaggaggcggggctttccctaccatcgttgagagagagccttgggacggcagggatggcgagcttcccgtggaggatgacattgacctcagtgatgtggagcttgatgacttagggaaagatgagttgtgagagccacaacagaggcttcagaccattttcttttcttgggagccagtggatttttccagcagtgaagggacattctctacactcagatgactctaccagtggccttttaaccaagaagtagtacttgattggtcatttgaaaacactgcaacagtgaacttttgcatctcaagaaaacattgaaaaattctatgaattgttgtagccggtgaattgagtcgtattctgtcacataatattttgaagaaaacttggctgtcgaaacatttttctctctgactgctgcttgaatgttcttggaggctgtttcttatgtatgggttttttttaatgtgatcccttcatttgaatattaatggctttttccattaaagaataaaatattttggacaatgccgataaatgtatgaagttagtatccacatcataaattcagagtgatgtttagcagtaaatcaatattttgaagtgatacacagatgtctttcctccccacaaacttttttaaacaaaaaacaagacctcttttctttagatggtgccacctatgcccaccacaacagagattttacatggaaaccgggctcagtgagaactgatttcctgcccaatatttgtctttgggctgtctctagtgactaattattaaggaatctagctggttatacagttcaaggctttctatgttgttaatgaacctcaaaatagccgttaagacatgaaatacagcagcaggttaccaatgcgaacaggtagttcgcatttatgtaaaacattcagaaaatgaagttttgaatttgttggaacattcaaaggacttgagagcattttattgtaacttaaaaaaataaatacaactgtcact

SEQ ID NO: 2200 - protein, 440 aa, Homo sapiens; identical to SEQ ID NO: 110

SEQ ID NO: 2201 - DNA, 2682 bp, Homo sapiens
aaccgagggtgcccgctgcaaggttaggtctcctggcctcgtgcttcaaacaggaattaatagaatcccaccaggtggtgtttgtgaggcgtagatggcgaggatatctgcagctgcagtttgctcattctcacggctgcactgcattgcactgtgtgagcagaacacaatttatccttccactgctgatgggcatttgggcggtttgcagtttgggatctggccagttctgctgttgtgagcattcttaagcctgcctttcggtgaattcacacgcccgtggggacgctcactctcagagcacagcttccagaggagagaagatacccccagcatccatgagaagagacctccgggagaagcttgtgtgggtgtgccgaccactggccccagttgaggtcccagccaacatcagctccgacttccagccatgctcaccaacttctcctgcccactccctatcaaggaaaagtcccataatgtatccatcaaccaccatggctaatgcacccggtctggtgagctgtaccttctttctggcagtgaatggtctgtattcctctagtgatgatgtgatcgaattaactccatcgaatttcaaccgagaagttattcagagtgatagtttgtggcttgtagaattctatgctccatggtgtggtcactgtcaaagattaacaccagaatggaagaaagcagcaactgcattaaaagatgttgtcaaagttggtgcagttgatgcagataagcatcattccctaggaggtcagtatggtgttcagggatttcctaccattaagatttttggatccaacaaaaacagaccagaagattaccaaggtggcagaactggtgaagccattgtagatgctgcgctgagtgctctgcgccagctcgtgaaggatcgcctcgggggacggagcggaggatacagttctggaaaacaaggcagaagtgatagttcaagtaagaaggatgtgattgagctgacagacgacagctttgataagaatgttctggacagtgaagatgtttggatggttgagttctatgctccttggtgtggacactgcaaaaacctagagccagagtgggctgccgcagcttcagaagtaaaagagcagacgaaaggaaaagtgaaactggcagctgtggatgctacagtcaatcaggttctggcctcccgatacgggattagaggatttcctacaatcaagatatttcagaaaggcgagtctcctgtggattatgacggtgggcggacaagatccgacatcgtgtcccgggcccttgatttgttttctgataacgccccacctcctgagctgcttgagattatcaacgaggacattgccaagaggacgtgtgaggagcaccagctctgtgttgtggctgtgctgccccatatccttgatactggagctgcaggcagaaattcttatctggaagttcttctgaagttggcagacaaatacaaaaagaaaatgtgggggtggctgtggacagaagctggagcccagtctgaacttgagaccgcgttggggattggagggtttgggtaccccgccatggccgccatcaatgcacgcaagatgaaatttgctctgctaaaaggctccttcagtgagcaaggcatcaacgagtttctcagggagctctcttttgggcgtggctccacggcacctgtaggaggcggggctttccctaccatcgttgagagagagccttgggacggcagggatggcgagcttcccgtggaggatgacattgacctcagtgatgtggagcttgatgacttagggaaagatgagttgtgagagccacaacagaggcttcagaccattttcttttcttgggagccagtggatttttccagcagtgaagggacattctctacactcagatgactctaccagtggccttttaaccaagaagtagtacttgattggtcatttgaaaacactgcaacagtgaacttttgcatctcaagaaaacattgaaaaattctatgaattgttgtagccggtgaattgagtcgtattctgtcacataatattttgaagaaaacttggctgtcgaaacatttttctctctgactgctgcttgaatgttcttggaggctgtttcttatgtatgggttttttttaatgtgatcccttcatttgaatattaatggctttttccattaaagaataaaatattttggacaatgccgataaatgtatgaagttagtatccacatcataaattcagagtgatgtttagcagtaaatcaatattttgaagtgatacacagatgtctttcctccccacaaacttttttaaacaaaaaacaagacctcttttctttagatggtgccacctatgcccaccacaacagagattttacatggaaaccgggctcagtgagaactgatttcctgcccaatatttgtctttgggctgtctctagtgactaattattaaggaatctagctggttatacagttcaaggctttctatgttgttaatgaacctcaaaatagccgttaagacatgaaatacagcagcaggttaccaatgcgaacaggtagttcgcatttatgtaaaacattcagaaaatgaagttttgaatttgttggaacattcaaaggacttgagagcattttattgtaacttaaaaaaataaatacaactgtcact

SEQ ID NO: 2202 - protein, 492 aa, Homo sapiens; identical to SEQ ID NO: 2192

SEQ ID NO: 2203 - DNA, 585 bp, Homo sapiens
caagatatttcagaaaggcgagtctcctgtggattatgacggtgggcggacaagatccgacatcgtgtcccgggcccatcgttgagagagagccttgggacggcagggatggcgagcttcccgtggaggatgacattgacctcagtgatgtggagcttgatgacttagggaaagatgagttgtgagagccacaacagaggcttcagaccattttcttttcttgggagccagtggatttttccagcagtgaagggacattctctacactcagatgactctaccagtggccttttaaccaagaagtagtacttgattggtcatttgaaaacactgcaacagtgaacttttgcatctcaagaaaacattgaaaaattctatgaattgttgtagccggtgaattgagtcgtattctgtcacataatattttgaagaaaacttggctgtcgaaacatttttctctctgactgctgcttgaatgttcttggaggctgtttcttatgtatgggttttttttaatgtgatcccttcatttgaatattaatggctttttccattaaagaataaaatattttggacaatgccgat

SEQ ID NO: 2204 - protein, 49 aa, Homo sapiens; identical to SEQ ID NO: 2186

SEQ ID NO: 2205 - DNA, 1270 bp, Homo sapiens
ggcagaagtgatagttcaagtaagaaggatgtgattgagctgacagacgacagctttgataagaatgttctggacagtgaagatgtttggatggttgagttctatgctccttggtgtggacactgcaaaaacctagagccagagtgggctgccgcagcttcagaagtaaaagagcagacgaaaggaaaagtgaaactggcagctgtggatgctacagtcaatcaggttctggcctcccgatacgggattagaggatttcctacaatcaagatatttcagaaaggcgagtctcctgtggattatgacggtgggcggacaagatccgacatcgtgtcccgggcccttgatttgttttctgataacgccccacctcctgagctgcttgagattatcaacgaggacattgccaagaggacgtgtgaggagcaccagctctgtgttgtggctgtgctgccccatatccttgatactggagctgcaggcagaaattcttatctggaagttcttctgaagttggcagacaaatacaaaaagaaaatgtgggggtggctgtggacagaagctggagcccagtctgaacttgagaccgcgttggggattggagggtttgggtaccccgccatggccgccatcaatgcacgcaagatgaaatttgctctgctaaaaggctccttcagtgagcaaggcatcaacgagtttctcagggagctctcttttgggcgtggctccacggcacctgtaggaggcggggctttccctaccatcgttgagagagagccttgggacggcagggatggcgagcttcccgtggaggatgacattgacctcagtgatgtggagcttgatgacttagggaaagatgagttgtgagagccacaacagaggcttcagaccattttcttttcttgggagccagtggatttttccagcagtgaagggacattctctacactcagatgactctaccagtggccttttaaccaagaagtagtacttgattggtcatttgaaaacactgcaacagtgaacttttgcatctcaagaaaacattgaaaaattctatgaattgttgtagccggtgaattgagtcgtattctgtcacataatattttgaagaaaacttggctgtcgaaacatttttctctctgactgctgcttgaatgttcttggaggctgtttcttatgtatgggttttttttaatgtgatcccttcatttgaatattaatggctttttccattaaagaataaaatattttggacaatgccgat

SEQ ID NO: 2206 - protein, 259 aa, Homo sapiens; identical to SEQ ID NO: 2188

SEQ ID NO: 2207 - DNA, 1871 bp, Homo sapiens
agcgccttccggcccgcccccgcgcggccgcccctcggaccaccggactggcctggggcgggacgtgggcgcgggggcgcggcgtgcggcacgctgcagggctgaagcggcggcggcggtggggactgcacgtagcccggcgctcggcatggctctcctggtgctcggtctggtgagctgtaccttctttctggcagtgaatggtctgtattcctctagtgatgatgtgatcgaattaactccatcgaatttcaaccgagaagttattcagagtgatagtttgtggcttgtagaattctatgctccatggtgtggtcactgtcaaagattaacaccagaatggaagaaagcagcaactgcattaaaagatgttgtcaaagttggtgcagttgatgcagataagcatcattccctaggaggtcagtatggtgttcagggatttcctaccattaagatttttggatccaacaaaaacagaccagaagattaccaaggtggcagaactggtgaagccattgtagatgctgcgctgagtgctctgcgccagctcgtgaaggatcgcctcgggggacggagcggaggatacagttctggaaaacaaggcagaagtgatagttcaagtaagaaggatgtgattgagctgacagacgacagctttgataagaatgttctggacagtgaagatgtttggatggttgagttctatgctccttggtgtggacactgcaaaaacctagagccagagtgggctgccgcagcttcagaagtaaaagagcagacgaaaggaaaagtgaaactggcagctgtggatgctacagtcaatcaggttctggcctcccgatacgggattagaggatttcctacaatcaagatatttcagaaaggcgagtctcctgtggattatgacggtgggcggacaagatccgacatcgtgtcccgggcccttgatttgttttctgataacgccccacctcctgagctgcttgagattatcaacgaggacattgccaagaggacgtgtgaggagcaccagctctgtgttgtggctgtgctgccccatatccttgatactggagctgcaggcagaaattcttatctggaagttcttctgaagttggcagacaaatacaaaaagaaaatgtgggggtggctgtggacagaagctggagcccagtctgaacttgagaccgcgttggggattggagggtttgggtaccccgccatggccgccatcaatgcacgcaagatgaaatttgctctgctaaaaggctccttcagtgagcaaggcatcaacgagtttctcagggagctctcttttgggcgtggctccacggcacctgtaggaggcggggctttccctaccatcgttgagagagagccttgggacggcagggatggcgagcttcccgtggaggatgacattgacctcagtgatgtggagcttgatgacttagggaaagatgagttgtgagagccacaacagaggcttcagaccattttcttttcttgggagccagtggatttttccagcagtgaagggacattctctacactcagatgactctaccagtggccttttaaccaagaagtagtacttgattggtcatttgaaaacactgcaacagtgaacttttgcatctcaagaaaacattgaaaaattctatgaattgttgtagccggtgaattgagtcgtattctgtcacataatattttgaagaaaacttggctgtcgaaacatttttctctctgactgctgcttgaatgttcttggaggctgtttcttatgtatgggttttttttaatgtgatcccttcatttgaatattaatggctttttccattaaagaataaaatattttggacaatgccgat

SEQ ID NO: 2208 - protein, 440 aa, Homo sapiens; identical to SEQ ID NO: 110

SEQ ID NO: 2209 - DNA, 1148 bp, Homo sapiens
ggcagaagtgatagttcaagtaagaaggatgtgattgagctgacagacgacagctttgataagaatgttctggacagtgaagatgtttggatggttgagttctatgctccttggtgtggacactgcaaaaacctagagccagagtgggctgccgcagcttcagaagtaaaagagcagacgaaaggaaaagtgaaactggcagctgtggatgctacagtcaatcaggttctggcctcccgatacgggattagaggatttcctacaatcaagatatttcagaaaggcgagtctcctgtggattatgacggtgggcggacaagatccgacatcgtgtcccgggcccttgatttgttttctgataacgccccacctcctgagctgcttgagattatcaacgaggacattgccaagaggacgtgtgaggagcaccagctctgtgttgtggctgtgctgccccatatccttgatactggagctgcaggcagaaattcttatctggaagttcttctgaagttggcagacaaatacaaaaagaaaatgtgggggtggctgtggacagaagctggagcccagtctgaacttgagaccgcgttggggattggagggtttgggtaccccgccatggccgccatcaatgcacgcaagatgaaatttgctctgctaaaaggctccttcagtgagcaaggcatcaacgagtttctcagggagctctcttttgggcgtggctccacggcacctgtaggaggcggggctttccctaccatcgttgagagagagccttgggacggcagggatggcgagcttcccgtggaggatgacattgacctcagtgatgtggagcttgatgacttagggaaagatgagttgtgagagccacaacagaggcttcagaccattttcttttcttgggagccagtggatttttccagcagtgaagggacattctctacactcagatgactctaccagtggccttttaaccaagaagtagtacttgattggtcatttgaaaacactgcaacagtgaacttttgcatctcaagaaaacattgaaaaattctatgaattgttgtagccggtgaattgagtcgtattctgtcacataatattttgaagaaaacttggctgtcgaaacatttttctctctg

SEQ ID NO: 2210 - protein, 259 aa, Homo sapiens; identical to SEQ ID NO: 2188

SEQ ID NO: 2211 - DNA, 1749 bp, Homo sapiens
agcgccttccggcccgcccccgcgcggccgcccctcggaccaccggactggcctggggcgggacgtgggcgcgggggcgcggcgtgcggcacgctgcagggctgaagcggcggcggcggtggggactgcacgtagcccggcgctcggcatggctctcctggtgctcggtctggtgagctgtaccttctttctggcagtgaatggtctgtattcctctagtgatgatgtgatcgaattaactccatcgaatttcaaccgagaagttattcagagtgatagtttgtggcttgtagaattctatgctccatggtgtggtcactgtcaaagattaacaccagaatggaagaaagcagcaactgcattaaaagatgttgtcaaagttggtgcagttgatgcagataagcatcattccctaggaggtcagtatggtgttcagggatttcctaccattaagatttttggatccaacaaaaacagaccagaagattaccaaggtggcagaactggtgaagccattgtagatgctgcgctgagtgctctgcgccagctcgtgaaggatcgcctcgggggacggagcggaggatacagttctggaaaacaaggcagaagtgatagttcaagtaagaaggatgtgattgagctgacagacgacagctttgataagaatgttctggacagtgaagatgtttggatggttgagttctatgctccttggtgtggacactgcaaaaacctagagccagagtgggctgccgcagcttcagaagtaaaagagcagacgaaaggaaaagtgaaactggcagctgtggatgctacagtcaatcaggttctggcctcccgatacgggattagaggatttcctacaatcaagatatttcagaaaggcgagtctcctgtggattatgacggtgggcggacaagatccgacatcgtgtcccgggcccttgatttgttttctgataacgccccacctcctgagctgcttgagattatcaacgaggacattgccaagaggacgtgtgaggagcaccagctctgtgttgtggctgtgctgccccatatccttgatactggagctgcaggcagaaattcttatctggaagttcttctgaagttggcagacaaatacaaaaagaaaatgtgggggtggctgtggacagaagctggagcccagtctgaacttgagaccgcgttggggattggagggtttgggtaccccgccatggccgccatcaatgcacgcaagatgaaatttgctctgctaaaaggctccttcagtgagcaaggcatcaacgagtttctcagggagctctcttttgggcgtggctccacggcacctgtaggaggcggggctttccctaccatcgttgagagagagccttgggacggcagggatggcgagcttcccgtggaggatgacattgacctcagtgatgtggagcttgatgacttagggaaagatgagttgtgagagccacaacagaggcttcagaccattttcttttcttgggagccagtggatttttccagcagtgaagggacattctctacactcagatgactctaccagtggccttttaaccaagaagtagtacttgattggtcatttgaaaacactgcaacagtgaacttttgcatctcaagaaaacattgaaaaattctatgaattgttgtagccggtgaattgagtcgtattctgtcacataatattttgaagaaaacttggctgtcgaaacatttttctctctg

SEQ ID NO: 2212 - protein, 440 aa, Homo sapiens; identical to SEQ ID NO: 110

SEQ ID NO: 2213 - DNA, 455 bp, Homo sapiens
caagatatttcagaaaggcgagtctcctgtggattatgacggtgggcggacaagatccgacatcgtgtcccgggcccatcgttgagagagagccttgggacggcagggatggcgagcttcccgtggaggatgacattgacctcagtgatgtggagcttgatgacttagggaaagatgagttgtgagagccacaacagaggcttcagaccattttcttttcttgggagccagtggatttttccagcagtgaagggacattctctacactcagatgactctaccagtggccttttaaccaagaagtagtacttgattggtcatttgaaaacactgcaacagtgaacttttgcatctcaagaaaacattgaaaaattctatgaattgttgtagccggtgaattgagtcgtattctgtcacataatattttgaagaaaacttggctgtcgaaacatttt

SEQ ID NO: 2214 - protein, 49 aa, Homo sapiens; identical to SEQ ID NO: 2186

SEQ ID NO: 2215 - DNA, 426 bp, Homo sapiens
atgtcagatgacgccggtccacgagaaggagggtggattatatccttagagacgccatagagtgaggatataatggctctgtaacaagcataaactgtgatggtctgggatgccctcgtcatagacagcccctggagagtcgaaggtccacagaaaacatcctggggtcctgagctgaagtgtgatgggaggagtcctctgtatctcagtctgatcctggtctccctctcggccatggtctcacactagtgctgctgggaaaccatccctcacatccagtcctggcatcgggcagtgactctggtccaactgttgtccaactcaagggtttagctgcttagattttcctaaaacttgaatttcattttcctctagccatggaatacagattaatcctttacaattaaaatccaagttcagatttta

SEQ ID NO: 2216 - protein, 49 aa, Homo sapiens
MVWDALVIDSPWRVEGPQKTSWGPELKCDGRSPLYLSLILVSLSAMVSH

SEQ ID NO: 2217 - DNA, 388 bp, Homo sapiens
tggactcaagggccactaaggtcaactgtgaaagggctgtagctccctatgccaccacctcgatgccagtcccactccaaccagtaagaaccagagcatctaccccacactgggcatggacactgaaagccaaaacaccctactgtgtgtatgaacctcacttgatgttattcctgtcttcatcagcacgactttattttcccaggagtcaccatcaagcccaggcagatggcttgatagttcttataggaacttctggaaagactcatctactctctgatggaaaacatcaacaggtgctggtgatgctggtggcagctgttgacaccaggcaccacttctgatagctgtcggctgtccagatttcaaaaatctcattgttcttgtc

SEQ ID NO: 2218 - protein, 93 aa, Homo sapiens
MPVPLQPVRTRASTPHWAWTLKAKTPYCVYEPHLMLFLSSSARLYFPRSHHQAQADGLIVLIGTSGKTHLLSDGKHQQVLVMLVAAVDTRHHF

SEQ ID NO: 2219 - DNA, 456 bp, Homo sapiens
atgtttatcgatgagaaaacagaaatttgaagaggcaaagcaagttgcccaaggccaagggagaaggtcagcgtgaactgctaccgccatgttgaagttcatcttctcttcactgcgagaagctgcctggacaccagggtggaggagctgtcagggccctcactgtggaaggaaggtccacagaaaacatcctggggtcctgagctgaagtgtgatgggaggagtcctctgtatctcagtctgatcctggtctccctctcggccatggtctcacactagtgctgctgggaaaccatccctcacatccagtcctggcatcgggcagtgactctggtccaactgttgtccaactcaagggtttagctgcttagattttcctaaaacttgaatttcattttcctctagccatggaatacagattaatcctttacaattaaaatccaagttcagatttta

SEQ ID NO: 2220 - protein, 39 aa, Homo sapiens
MLKFIFSSLREAAWTPGWRSCQGPHCGRKVHRKHPGVLS

SEQ ID NO: 2221 - DNA, 2335 bp, Homo sapiens
tacagtttgaaaagctcctgacgtcaggctggaattcctattgtgtttagaaaaggctcgggcaaagccagcccaagttcgctctctgcacacctcgagcacctcgcggacggcgtgggtccgccagctccgggacctgccgccgctgcctgcgcgccccggggcggaggacggtgccagccgcccacgaggagaccccgctcccgcaggaggccgagctgaagcggcggagcgcgccgccagccagccggggtgagtgccccgggcgaggccggcggccgccaaagcccccgcgggctcgcccgggcgcccggatgccagccccgagccccgccgccgggtgcatgcctcccccgcggcgcgcccccgcaggctgctgcccgctgtgaccgcccttccccgcaggcgggcgccggccaggctctccccgagatcagcgcacgggtggcacccgccggacccccagcggcagcggcggcggcggctgcagggggcgcggggcggaggctgcgagggcgcgcgcggggaggatggacgggtccggggagcgcagcctcccggagccgggcagccagagctccgctgccagcgacgacatagagatagtcgtcaacgtggggggcgtgcggcaggtgctgtacggggacctcctcagtcagtaccctgagacccggctggcggagctcatcaactgcttggctgggggctacgacaccatcttctccctgtgcgacgactacgaccccggcaagcgcgagttctactttgacagggacccggacgccttcaagtgtgtcatcgaggtgtactatttcggggaggtccacatgaagaagggcatctgccccatctgcttcaagaacgagatggacttctggaaggtggacctcaagttcctggacgactgttgcaagagccacctgagcgagaagcgcgaggagctggaggagatcgcgcgccgcgtgcagctcatcctggacgacctgggcgtggacgcagccgagggccgctggcgccgctgccagaagtgcgtctggaagttcctggagaagcccgagtcgtcgtgcccggcgcgggtggtggccgtgctctccttcctgctcatcctcgtctcgtccgtggtcatgtgcatgggcaccatccccgagctgcaggtgctggacgccgagggcaaccgcgtggagcacccgacgctggagaacgtggagacggcgtgcattggctggttcaccctggagtacctgctgcgcctcttctcgtcacccaacaagctgcacttcgcgctgtccttcatgaacattgtggacgtgctggccatcctccccttctacgtgagcctcacgctcacgcacctgggtgcccgcatgatggagctgaccaacgtgcagcaggccgtgcaggcgctgcggatcatgcgcatcgcgcgcatcttcaagctggcccgccactcctcgggcctgcagaccctcacctatgccctcaagcgcagcttcaaggaactggggctgctgctcatgtacctggcagtgggtatcttcgtcttctctgccctgggctacaccatggagcagagccatccagagaccctgtttaagagcatcccccagtccttctggtgggccatcatcaccatgaccaccgtcggctacggcgacatctaccccaagaccacgctgggcaagctcaacgcggccatcagcttcttgtgtggtgtcatcgccatcgccctgcccatccaccccatcatcaacaactttgtcaggtactacaacaagcagcgcgtcctggagaccgcggccaagcacgagctggagctgatggaactcaactccagcagcgggggcgagggcaagaccgggggctcccgcagtgacctggacaacctccctccagagcctgcggggaaggaggcgccgagctgcagcagccggctgaagctctcccacagcgacaccttcatccccctcctgaccgaggagaagcaccacaggacccggctccagagttgcaagtgacaggagggcccctcaggcagagatggaccaggcggtggacagatgggtagatgtggcaggcatgtcatcgacagcacagaagggctgtcctgtgtccccccaaccctcccctggacagactctgaaggccctcccggcacctctgccaaggctgggtaagactcctctatgttgcctgctgtccaggagcccgggagggaggggtgtgcaggagccgcagggccgtgtgggacgagtggaggccgcggcctggctggcacgagagcccacgcccgcttctgtatctccctcaataaagcctcctgctctgtgcaccctcc

SEQ ID NO: 2222 - protein, 494 aa, Homo sapiens; identical to SEQ ID NO: 112

SEQ ID NO: 2223 - DNA, 558 bp, Homo sapiens
ctcaagcgcagcttcaaggaactggggctgctgctcatgtacctggcagtgggtatcttcgtcttctctgccctgggctacaccatggagcagagccatccagagaccctgtttaagagcatcccccagtccttctggtgggccatcatcaccatgaccaccgtcggctacggcgacatctaccccaagaccacgctgggcaagctcaacgccaccacaggacccggctccagagttgcaagtgacaggagggcccctcaggcagagatggaccaggcggtggacagatgggtagatgtggcaggcatgtcatcgacagcacagaagggctgtcctgtgtccccccaaccctcccctggacagactctgaaggccctcccggcacctctgccaaggctgggtaagactcctctatgttgcctgctgtccaggagcccgggagggaggggtgtgcaggagccgcagggccgtgtgggacgagtggaggccgcggcctggctggcacgagagcccacgcccgcttctgtatctccctcaataaagcctcctgctctgtgc

SEQ ID NO: 2224 - protein, 173 aa, Homo sapiens
MYLAVGIFVFSALGYTMEQSHPETLFKSIPQSFWWAIITMTTVGYGDIYPKTTLGKLNATTGPGSRVASDRRAPQAEMDQAVDRWVDVAGMSSTAQKGCPVSPQPSPGQTLKALPAPLPRLGKTPLCCLLSRSPGGRGVQEPQGRVGRVEAAAWLAREPTPASVSPSIKPPAL

SEQ ID NO: 2225 - DNA, 2003 bp, Homo sapiens
atcgctttaacttttctaaagccaaatttcccatgtaagctgcagtttctatctttagcccatcatcattttctgcccccccaaaatctgttgaaatgattcactgatgcaaaacattcacccgtaatagactgagaattgagccttaacttcagattaacttgtgagaatcaggaaaattccttcaactgcattgcatcctcttggaccagggctagaatggggatttcaggtttctatgagcctccccattacccctaaagtagaacattttttaaattgtgttgccaccacttctaaaaatttagcaatattagaataggatactagtgaagtaagaaattttgcttgttgttttgcaaaccaaatagtttcctcaaacacaaatcagtgttcccacgaacaagttccagttgagaaacactaaggttatggtgaataaaaccatagggagcttcttccccccaacccctggctattttatattaatggggagaggggatttttaaatgtcataaatttgaagagtggtgggttgcattttcttcatgggtttatgttttcgtttcattttggactcaatttcacatcaccaaattcctcatttatacttggggaaaaaacaaggccatatgtaaaaacccttccaatgcctaagtgtcttttgcctgtcgccttgccacggaggaggcttctaattagctggaaaagagtatttttctaatacgttgcaaggattagccaaatcttcttattgaagaaagaagaaaagtgaagagtggttacctatacctagcatagtacaatcagaacctcgtggagaccaccggggacaggcttgcggacgccggctgttcttcccgccacgatctttctgtggtagcggccagcagaagacatggcctgctccccactccctttccccactccttctttattgcacacaggacaccagtcttcaaggaaagggacttttttccagtctgccaatcatattgggaaagtgctagctgtgctcaccttcatggggctgtttccagctcgtccacaagctcatcgattttctttagtagattaccggtgtaaatacccagtgtgcttatgagtcagttagtagacgtcttcattcattggagtaactggtttaggctttccagtttggaaaaggagcagagagctgtccatctggattgatggaagaaaagagaacctcatccatgcctggagaacatctagaaaaccttcagccagcctccagtgctgtcgagagaccaccttcccccgacccggaggcacttccttggggtctttctctagggtctcttctctacaaagcacaacactaatgttcgtttccttagacctcagttcaagtgcccctatttatttcaataagaacgcacatatcccagctgttttttgtttgtcacctctatttagttgttacctgtttctctcttctttcaccccttgtccttttccacccttttaagagttacgctagcagatcttactccacgtatactttttggtttgtgaaggcatcggttaagggcacaaagacagccatggggacatttatgtaaatacgtctctaattgccacactgcagctgaacagtgtgtagtattttcccagtcagctttgccatactgacgtcaatcatttgagagaaattattcagattttatttttgtatctgtggtaacaaaacattaaccaaaagattttctgtccagaagcctccccgaccccccaagctatttgctcacattaacaaattaaagtgcctgaagcataattcattctttacctgtatactaaaaaccctgttgtattgatttttttataataagcctttttacctctgtgtaaaaaatatatatacaagtgtatgatgtacattttagttcttaacttttttttatggtttctaatatgtatgaccaatgtagccattgctttaaaatgtaccgtgtaaatataaacacatcctatcagat

SEQ ID NO: 2226 - protein, 55 aa, Homo sapiens
MFSFHFGLNFTSPNSSFILGEKTRPYVKTLPMPKCLLPVALPRRRLLISWKRVFF

SEQ ID NO: 2227 - DNA, 2397 bp, Homo sapiens
gtgcgtgtactgcagggacatgttcaaccacgaggagaaccgccggggccactgccaggacgcgcccgactccgtgagaacttgcatccgccggttcaaaggagtctgcaattggaactgctgattttcggtgggttttgtagttgatttttccaagagcgtcgaagactctctttctcttggttcaccttgcctgtcgctagcaagcatctggttcagcggaaatgggatgtgagaatgatgaaacccgacagaagtatctcagcctgcagtcagttattatgtataggaggtgagctagttaacaaacttgtaccacaaaacaatatcgctttaacttttctaaagccaaatttcccatgtaagctgcagtttctatctttagcccatcatcattttctgcccccccaaaatctgttgaaatgattcactgatgcaaaacattcacccgtaatagactgagaattgagccttaacttcagattaacttgtgagaatcaggaaaattccttcaactgcattgcatcctcttggaccagggctagaatggggatttcaggtttctatgagcctccccattacccctaaagtagaacattttttaaattgtgttgccaccacttctaaaaatttagcaatattagaataggatactagtgaagtaagaaattttgcttgttgttttgcaaaccaaatagtttcctcaaacacaaatcagtgttcccacgaacaagttccagttgagaaacactaaggttatggtgaataaaaccatagggagcttcttccccccaacccctggctattttatattaatggggagaggggatttttaaatgtcataaatttgaagagtggtgggttgcattttcttcatgggtttatgttttcgtttcattttggactcaatttcacatcaccaaattcctcatttatacttggggaaaaaacaaggccatatgtaaaaacccttccaatgcctaagtgtctttctcctgcaactccaaacccagactcgccactttgggtgcacaggtggttaggtcagccaactggttctgcctgtcgccttgccacggaggaggcttctaattagctggaaaagagtatttttctaatacgttgcaaggattagccaaatcttcttattgaagaaagaagaaaagtgaagagtggttacctatacctagcatagtacaatcagaacctcgtggagaccaccggggacaggcttgcggacgccggctgttcttcccgccacgatctttctgtggtagcggccagcagaagacatggcctgctccccactccctttccccactccttctttattgcacacaggacaccagtcttcaaggaaagggacttttttccagtctgccaatcatattgggaaagtgctagctgtgctcaccttcatggggctgtttccagctcgtccacaagctcatcgattttctttagtagattaccggtgtaaatacccagtgtgcttatgagtcagttagtagacgtcttcattcattggagtaactggtttaggctttccagtttggaaaaggagcagagagctgtccatctggattgatggaagaaaagagaacctcatccatgcctggagaacatctagaaaaccttcagccagcctccagtgctgtcgagagaccaccttcccccgacccggaggcacttccttggggtctttctctagggtctcttctctacaaagcacaacactaatgttcgtttccttagacctcagttcaagtgcccctatttatttcaataagaacgcacatatcccagctgttttttgtttgtcacctctatttagttgttacctgtttctctcttctttcaccccttgtccttttccacccttttaagagttacgctagcagatcttactccacgtatactttttggtttgtgaaggcatcggttaagggcacaaagacagccatggggacatttatgtaaatacgtctctaattgccacactgcagctgaacagtgtgtagtattttcccagtcagctttgccatactgacgtcaatcatttgagagaaattattcagattttatttttgtatctgtggtaacaaaacattaaccaaaagattttctgtccagaagcctccccgaccccccaagctatttgctcacattaacaaattaaagtgcctgaagcataattcattctttacctgtatactaaaaaccctgttgtattgatttttttataataagcctttttacctctgtgtaaaaaatatatatacaagtgtatgatgtacattttagttcttaacttttttttatggtttctaatatgtatgaccaatgtagccattgctttaaaatgtaccgtgtaaatataaacacatcctatcagat

SEQ ID NO: 2228 - protein, 34 aa, Homo sapiens
MFNHEENRRGHCQDAPDSVRTCIRRFKGVCNWNC

SEQ ID NO: 2229 - DNA, 4020 bp, Homo sapiens
ccaggacttgtgttctgatggaaggaccagccaacacccacacagccttcctttccttggtgtgcagatggctctatgcagtcttatctccagctgggcatctgggttcaggtcagacgatgaccaggaaaggaggggtgacagctatattgtgcgtgtcaaggctgtggttatgaccagagatgactccagcgggggatggttcccacaggaaggaggcgggatcagtcgcgtcggggtctgtaaggtcatgcaccccgaaggcaatggacgaagcggctttctcatccatggtgaacgacagaaagacaaactggtggtattggaatgctatgtaagaaaggacttggtctacaccaaagccaatccaacgtttcatcactggaaggtcgataataggaagtttggacttactttccaaagccctgctgatgcccgagcctttgacaggggagtaaggaaagcaatcgaagaccttatagaaggttcaacaacgtcatcttccaccatccataatgaagctgagcttggcgatgatgacgtttttacaacagctacagacagttcttctaattcctctcagaagagagagcaacctactcggacaatctcctctcccacatcctgtgagcaccggaggatttataccctgggccacctccacgactcataccccacagaccactatcacctcgatcagccgatgccaaggccctaccgccaggtgagcttcccggacgacgacgaggagatcgtgcgcatcaacccccgggagaagatctggatgacggggtacgaggattaccggcacgcacccgtcaggggcaagtacccggacccctcggaggacgcggactcctcctacgtgcgcttcgccaagggcgaggtccccaagcatgactacaactacccctacgtggactcctcagactttggcctaggcgaggaccccaaaggccgcgggggcagcgtgatcaagacgcagccctcccggggcaagtcgcggcggcggaaggaggacggagagcgctcgcggtgcgtgtactgcagggacatgttcaaccacgaggagaaccgccggggccactgccaggacgcgcccgactccgtgagaacttgcatccgccgggtgagctgcatgtggtgcgcggacagcatgctctatcactgtatgtcggaccccgagggagactatacagacccttgctcgtgcgatactagcgacgagaagttttgcctccggtggatggctcttattgccttgtctttcctggccccctgtatgtgctgttacctgccccttcgggcctgctaccactgcggagtgatgtgcaggtgctgtggcgggaagcacaaagcggccgcgtgactcagtttccctcccttctccctccatccgcagccacaggggaactcgtctcttacatactctcatcttctcccccgctcccttccactccaaggagcgaggagggcaagcggcctcccagctccctggtacctcgaggcaccattccagccagggacgctgccgggtagactctccactccccctgccgcccacactgcagcagccacatccatacacacacgctcgcacagtgttctgaggaaggaaccttcgccacagactcctgtactattaacaatctgtaaccaagctaactgtctcatccatgtgttgatttcctgtttcctcctcccccgcctcttccagttcaaaggagtctgcaattggaactgctgattttcggtgggttttgtagttgatttttccaagagcgtcgaagactctctttctcttggttcaccttgcctgtcgctagcaagcatctggttcagcggaaatgggatgtgagaatgatgaaacccgacagaagtatctcagcctgcagtcagttattatgtataggaggtgagctagttaacaaacttgtaccacaaaacaatatcgctttaacttttctaaagccaaatttcccatgtaagctgcagtttctatctttagcccatcatcattttctgcccccccaaaatctgttgaaatgattcactgatgcaaaacattcacccgtaatagactgagaattgagccttaacttcagattaacttgtgagaatcaggaaaattccttcaactgcattgcatcctcttggaccagggctagaatggggatttcaggtttctatgagcctccccattacccctaaagtagaacattttttaaattgtgttgccaccacttctaaaaatttagcaatattagaataggatactagtgaagtaagaaattttgcttgttgttttgcaaaccaaatagtttcctcaaacacaaatcagtgttcccacgaacaagttccagttgagaaacactaaggttatggtgaataaaaccatagggagcttcttccccccaacccctggctattttatattaatggggagaggggatttttaaatgtcataaatttgaagagtggtgggttgcattttcttcatgggtttatgttttcgtttcattttggactcaatttcacatcaccaaattcctcatttatacttggggaaaaaacaaggccatatgtaaaaacccttccaatgcctaagtgtctttctcctgcaactccaaacccagactcgccactttgggtgcacaggtggttaggtcagccaactggttctgcctgtcgccttgccacggaggaggcttctaattagctggaaaagagtatttttctaatacgttgcaaggattagccaaatcttcttattgaagaaagaagaaaagtgaagagtggttacctatacctagcatagtacaatcagaacctcgtggagaccaccggggacaggcttgcggacgccggctgttcttcccgccacgatctttctgtggtagcggccagcagaagacatggcctgctccccactccctttccccactccttctttattgcacacaggacaccagtcttcaaggaaagggacttttttccagtctgccaatcatattgggaaagtgctagctgtgctcaccttcatggggctgtttccagctcgtccacaagctcatcgattttctttagtagattaccggtgtaaatacccagtgtgcttatgagtcagttagtagacgtcttcattcattggagtaactggtttaggctttccagtttggaaaaggagcagagagctgtccatctggattgatggaagaaaagagaacctcatccatgcctggagaacatctagaaaaccttcagccagcctccagtgctgtcgagagaccaccttcccccgacccggaggcacttccttggggtctttctctagggtctcttctctacaaagcacaacactaatgttcgtttccttagacctcagttcaagtgcccctatttatttcaataagaacgcacatatcccagctgttttttgtttgtcacctctatttagttgttacctgtttctctcttctttcaccccttgtccttttccacccttttaagagttacgctagcagatcttactccacgtatactttttggtttgtgaaggcatcggttaagggcacaaagacagccatggggacatttatgtaaatacgtctctaattgccacactgcagctgaacagtgtgtagtattttcccagtcagctttgccatactgacgtcaatcatttgagagaaattattcagattttatttttgtatctgtggtaacaaaacattaaccaaaagattttctgtccagaagcctccccgaccccccaagctatttgctcacattaacaaattaaagtgcctgaagcataattcattctttacctgtatactaaaaaccctgttgtattgatttttttataataagcctttttacctctgtgtaaaaaatatatatacaagtgtatgatgtacattttagttcttaacttttttttatggtttctaatatgtatgaccaatgtagccattgctttaaaatgtaccgtgtaaatataaacacatcctatcagat

SEQ ID NO: 2230 - protein, 433 aa, Homo sapiens [sequence omitted]

SEQ ID NO: 2231 - DNA, 4507 bp, Homo sapiens
tctggccgctgggaagacgtcatcgcttccgccctacttcctcctcctgttggcggcggtgagaatccaatatggagtaaatcggtggagtcgagagatggggctcggacggggcgccctgcaccgcctcccaggcgcacctcccccggccgccgaccgctccccggaaccgtgattggcccggccccccgggggcgaccccggactgagcccccccacccgcggccggcgctctcctcctcctcgcagcagtccctgccgctccgaggcgcgcttgtttttctcctgctctcccccaccgccgtccccttcccaaatctcgccccctctgcccgctcccgagcccccggagcctccgcccgcctctccccacggcgctgcggcgttcactccccgcgcagcctgcctttgcaccccttcccccaaaccctatcccgcgccctgcttccccttctgctgcggcgccctcttcatctctagccgccccccctccccaaatcaggcgatctccggagatgtgaagaaggggggcgagcggacaggaagatgaagggagcaaagctgcccgccgcgggacaggcgtctaggtgaacaagaaaatgaccgaagaaacacacccagacgatgacagctatattgtgcgtgtcaaggctgtggttatgaccagagatgactccagcgggggatggttcccacaggaaggaggcgggatcagtcgcgtcggggtctgtaaggtcatgcaccccgaaggcaatggacgaagcggctttctcatccatggtgaacgacagaaagacaaactggtggtattggaatgctatgtaagaaaggacttggtctacaccaaagccaatccaacgtttcatcactggaaggtcgataataggaagtttggacttactttccaaagccctgctgatgcccgagcctttgacaggggagtaaggaaagcaatcgaagaccttatagaaggttcaacaacgtcatcttccaccatccataatgaagctgagcttggcgatgatgacgtttttacaacagctacagacagttcttctaattcctctcagaagagagagcaacctactcggacaatctcctctcccacatcctgtgagcaccggaggatttataccctgggccacctccacgactcataccccacagaccactatcacctcgatcagccgatgccaaggccctaccgccaggtgagcttcccggacgacgacgaggagatcgtgcgcatcaacccccgggagaagatctggatgacggggtacgaggattaccggcacgcacccgtcaggggcaagtacccggacccctcggaggacgcggactcctcctacgtgcgcttcgccaagggcgaggtccccaagcatgactacaactacccctacgtggactcctcagactttggcctaggcgaggaccccaaaggccgcgggggcagcgtgatcaagacgcagccctcccggggcaagtcgcggcggcggaaggaggacggagagcgctcgcggtgcgtgtactgcagggacatgttcaaccacgaggagaaccgccggggccactgccaggacgcgcccgactccgtgagaacttgcatccgccgggtgagctgcatgtggtgcgcggacagcatgctctatcactgtatgtcggaccccgagggagactatacagacccttgctcgtgcgatactagcgacgagaagttttgcctccggtggatggctcttattgccttgtctttcctggccccctgtatgtgctgttacctgccccttcgggcctgctaccactgcggagtgatgtgcaggtgctgtggcgggaagcacaaagcggccgcgtgactcagtttccctcccttctccctccatccgcagccacaggggaactcgtctcttacatactctcatcttctcccccgctcccttccactccaaggagcgaggagggcaagcggcctcccagctccctggtacctcgaggcaccattccagccagggacgctgccgggtagactctccactccccctgccgcccacactgcagcagccacatccatacacacacgctcgcacagtgttctgaggaaggaaccttcgccacagactcctgtactattaacaatctgtaaccaagctaactgtctcatccatgtgttgatttcctgtttcctcctcccccgcctcttccagttcaaaggagtctgcaattggaactgctgattttcggtgggttttgtagttgatttttccaagagcgtcgaagactctctttctcttggttcaccttgcctgtcgctagcaagcatctggttcagcggaaatgggatgtgagaatgatgaaacccgacagaagtatctcagcctgcagtcagttattatgtataggaggtgagctagttaacaaacttgtaccacaaaacaatatcgctttaacttttctaaagccaaatttcccatgtaagctgcagtttctatctttagcccatcatcattttctgcccccccaaaatctgttgaaatgattcactgatgcaaaacattcacccgtaatagactgagaattgagccttaacttcagattaacttgtgagaatcaggaaaattccttcaactgcattgcatcctcttggaccagggctagaatggggatttcaggtttctatgagcctccccattacccctaaagtagaacattttttaaattgtgttgccaccacttctaaaaatttagcaatattagaataggatactagtgaagtaagaaattttgcttgttgttttgcaaaccaaatagtttcctcaaacacaaatcagtgttcccacgaacaagttccagttgagaaacactaaggttatggtgaataaaaccatagggagcttcttccccccaacccctggctattttatattaatggggagaggggatttttaaatgtcataaatttgaagagtggtgggttgcattttcttcatgggtttatgttttcgtttcattttggactcaatttcacatcaccaaattcctcatttatacttggggaaaaaacaaggccatatgtaaaaacccttccaatgcctaagtgtctttctcctgcaactccaaacccagactcgccactttgggtgcacaggtggttaggtcagccaactggttctgcctgtcgccttgccacggaggaggcttctaattagctggaaaagagtatttttctaatacgttgcaaggattagccaaatcttcttattgaagaaagaagaaaagtgaagagtggttacctatacctagcatagtacaatcagaacctcgtggagaccaccggggacaggcttgcggacgccggctgttcttcccgccacgatctttctgtggtagcggccagcagaagacatggcctgctccccactccctttccccactccttctttattgcacacaggacaccagtcttcaaggaaagggacttttttccagtctgccaatcatattgggaaagtgctagctgtgctcaccttcatggggctgtttccagctcgtccacaagctcatcgattttctttagtagattaccggtgtaaatacccagtgtgcttatgagtcagttagtagacgtcttcattcattggagtaactggtttaggctttccagtttggaaaaggagcagagagctgtccatctggattgatggaagaaaagagaacctcatccatgcctggagaacatctagaaaaccttcagccagcctccagtgctgtcgagagaccaccttcccccgacccggaggcacttccttggggtctttctctagggtctcttctctacaaagcacaacactaatgttcgtttccttagacctcagttcaagtgcccctatttatttcaataagaacgcacatatcccagctgttttttgtttgtcacctctatttagttgttacctgtttctctcttctttcaccccttgtccttttccacccttttaagagttacgctagcagatcttactccacgtatactttttggtttgtgaaggcatcggttaagggcacaaagacagccatggggacatttatgtaaatacgtctctaattgccacactgcagctgaacagtgtgtagtattttcccagtcagctttgccatactgacgtcaatcatttgagagaaattattcagattttatttttgtatctgtggtaacaaaacattaaccaaaagattttctgtccagaagcctccccgaccccccaagctatttgctcacattaacaaattaaagtgcctgaagcataattcattctttacctgtatactaaaaaccctgttgtattgatttttttataataagcctttttacctctgtgtaaaaaatatatatacaagtgtatgatgtacattttagttcttaacttttttttatggtttctaatatgtatgaccaatgtagccattgctttaaaatgtaccgtgtaaatataaacacatcctatcagat

SEQ ID NO: 2232 - protein, 418 aa, Homo sapiens
MTEETHPDDDSYIVRVKAVVMTRDDSSGGWFPQEGGGISRVGVCKVMHPEGNGRSGFLIHGERQKDKLVVLECYVRKDLVYTKANPTFHHWKVDNRKFGLTFQSPADARAFDRGVRKAIEDLIEGSTTSSSTIHNEAELGDDDVFTTATDSSSNSSQKREQPTRTISSPTSCEHRRIYTLGHLHDSYPTDHYHLDQPMPRPYRQVSFPDDDEEIVRINPREKIWMTGYEDYRHAPVRGKYPDPSEDADSSYVRFAKGEVPKHDYNYPYVDSSDFGLGEDPKGRGGSVIKTQPSRGKSRRRKEDGERSRCVYCRDMFNHEENRRGHCQDAPDSVRTCIRRVSCMWCADSMLYHCMSDPEGDYTDPCSCDTSDEKFCLRWMALIALSFLAPCMCCYLPLRACYHCGVMCRCCGGKHKAAA

SEQ ID NO: 2233 - DNA, 513 bp, Homo sapiens
tctctaggtcttttctttttcatttttccttttgtagctctgcatttggcacatggtaaacccacggtagactgggtttcttcattcattcaacaaacacagattatcttttattggcttctgaaatacatctaggcagacgaatgtaagagtcttacaggcatccacagtatgtgaggcacgtttgctaacttaacgtacttttcgccactgagatccatttaaaaaattactggaaaataacattcccgtttttctatttattcattccttcaggcagaagcagagcacagaagtggttgtggctggggcttcaattagcatttcctctgtaacatgtcaagatcccaccagaagggctaaggaaggaaggaggagagagcccatccagtaaacatcagctgagccaaattccattgacacctcttttcagaagtgcatatgcatcgttactagtgccaagtatggcccccactttctctctttttttcttctgaaaagagttccacaaag

SEQ ID NO: 2234 - protein, 59 aa, Homo sapiens
DPFKKLLENNIPVFLFIHSFRQKQSTEVVVAGASISISSVTCQDPTRRAKEGRRREPIQ

SEQ ID NO: 2235 - DNA, 723 bp, Homo sapiens
gcgctcggttgtgccgttatcgtgcaatgcttcatccccggtgccgttcaatcccaggtcgttttccctttcagctgcaatgccgggattttaaatagcagagatgaaaggcccctgcccccgcctccctcctcccctgagttcatgtattatgaatgaaacggcagcctcgctgcttcctgaggtgctccacttcaggtaggagagagactcaatgtcaaggcagctggctactaaaagttgggtgtgtgcgcgcgttggggagggacggagaccaggaaataattgacaggctgggaaacattcttttcgagaaaatgtaaccgctcagggtttgcctctggagtttcagtttacaactgtacaagcctcagtcaatttaagaatggattatgcaaaggggctttcgactgcggcttgctcgccctcacaccctaggccgctgtctctgtggaaagtgctgtttcattcagaggagctggtttctgccctcccagggaggcagcacacatcccctctcccctctcatcccccactttaagatgagccctgagaacccttgagggtctcgagaaaagcgaatgctggtcactgtagccattctctagttccagaacctcttggaagcctcagcgaggtccaaagctgagttggagtgcagtggtgctgtgtctggagtttgttcctgccgttgggtttgtggtcttgctgacttcaagaatg

SEQ ID NO: 2236 - protein, 56 aa, Homo sapiens
MQRGFRLRLARPHTLGRCLCGKCCFIQRSWFLPSQGGSTHPLSPLIPHFKMSPENP

SEQ ID NO: 2237 - DNA, 1269 bp, Homo sapiens
gccgttcaatcccaggtcgttttccctttcagctgcaatgccgggattttaaatagcagagatgaaaggcccctgcccccgcctccctcctcccctgagttcatgtattatgaatgaaacggcagcctcgctgcttcctgaggtgctccacttcaggctggggtgcaatggctcgatctcggctcagtgcaacctctgcttcccgggttcaagtgattctcctgcgtcagcctcccaagcagctgtgaatacaggttggagtgcagtggtgctgtgtctggagtttgttcctgccgttgggtttgtggtcttgctgacttcaagaatgaagccacggaccttcacgtccatcgccttggcttagtgcatgtcaccaaaaattctccaggaatttcatagtttggaccttggtggcatggctggccctggattatccatgcagggaggcctgatcctgtgacagctggctgcagcagggggctgcccatcttctgtgctttgtggtacatatctgtgtcaccaaagtagcggcctcggtacagcaagcctttcatctgctgcttctccgtccagcagttgttccagaggttggcgatataatcatctttcacattcggtttgactgtttggaggctggagcctgtgtactcctcggagaaaatgcctgccacatagtagatgacactcaggtggtcagtgactcgcctgtgatgtggcccacaaacagtcttgggctcagactgtagggtggactggagaccatgagctggctgagagctgacatgaggatgaggatgggtatcagctgcacgaacacccgcaagctgccgtcactccgcttctccctgcagccctgcctttgctgatacacacacaggcacattggaaacgcagtagaaaatggctgccaatttaaaaccagaagttaagaagagcaaactcgaatgtacagcaagagagcttcaggctggactggcttccagcagaagtgggactggaaacctcggattctattgtctcttctctgtgaagtgggaaaacatgtcagtatctgaacttgagcttggtaattactgctcatttctcaaccttttccaagccacgtaactcccctaaggcttagttttcttatctgtgaattgcgagatggtatgttcttcatcacgaggttgctataaagactgaatgagataatgtgtgtggaagcaccaagcatggtccttggcatgcagtagatgctcaataaatatgaactggagtacacatgca

SEQ ID NO: 2238 - protein, 100 aa, Homo sapiens
MKGPCPRLPPPLSSCIMNETAASLLPEVLHFRLGCNGSISAQCNLCFPGSSDSPASASQAAVNTGWSAVVLCLEFVPAVGFVVLLTSRMKPRTFTSIALA

SEQ ID NO: 2239 - DNA, 445 bp, Homo sapiens
tctgtcctcataatcatagatgattgctccacatccagcacctaacaccagtactcagttaaattttttgctgaataaatcaatgaatggagaggtaaagaggaaccagaagttggggttacagaagtcactgatggaagagtttcaagatagtagaagtggtcagccctgttaagtgacaagccaaggactgaagaaagactggcagatttggcaatcagatgaagtgacctgaccaaagagcagcttgtgtgaagtagtgaggacaggcgctggtctgcgactggtttaggaggaaatggaaatgaagaagaagagataggaaagtggagattatatgatgacaagtatcaagataaaaatgaacacatttggcctgctacctgaattttttaaatcggctcaccaaaaaatatcaggcttattgaaatattggaatatctga

SEQ ID NO: 2240 - protein, 51 aa, Homo sapiens
MIAPHPAPNTSTQLNFLLNKSMNGEVKRNQKLGLQKSLMEEFQDSRSGQPC

SEQ ID NO: 2241 - DNA, 1595 bp, Homo sapiens
aggctggagtgcaacggcacaatctcggctcaccgcaacctccgcctcccgggttcaagcgattctgctgcctcagcctcctgagtagctgggattacaggcatgtgccaccacgcccggctaattttgtatttttagtacagatagggtttctccatattggtcaggctggtctcgaactcccaacctcaggtgatccgcatgcctcagcctcccaaagttctgggattacaggcatgagccaccgcacccggccatttgtatgtaattttctatatttattgaaatgcattttaagtaatatgaaagcatttttctccttacaatggaaaaaccaacttgattttacatttatttatataacctgacttaattctatgtaagtcaagtgaaaaaggaaacaactgctctgtggaatcaacctgaagatgtctaatttttcctctgatgccaccagacttaaagcagttcacgatcctctctacaaagaagtatatttaggttctccctctccctctccctctccctctccccacggtctccctctgatgccgagccgaagctggactgtactgctgccatctcggctcactgcagcctccctgcctgattctcctgcctcagcctgcccagtgcctgcgattgcaggtgcgcgccgccacgcctgactggttttcgtatttttttggtggagacggggtttcgctgtgttggccaggctggtctccagctcctaaccgcgagtgatccgccagccttggcctcccgaggtgccaggatggcagacggagtcgcgttcactcagtgctcaatggtgcccaggctggagtgcagtggcatgatctcggctcgctacaacctccacctcccagctgcctgccttggccccccaaagtgccgagattgcagcctctgcctggccaccaccccgtctgggaagtgaggagcgtctctgcctggccgcccatcgtctgggatgtgaggagcctctctgactggctgcccagtctggaaagtgaggagcgtctctgcccggccgccatcccatctaggaagtgaggagcgtctctgccaggccgcccatcgtctgagatgtggggagcgcctctgccctgccgccccgtctgggatgtgaggagcgtctctgcccggctgacccgtctgagaagtgaggagaccctctgcctggcaaccgccccgtctgagaacccaaagactagaattccatttctaaacccagcccagcagccggaagtcatgaagcagtcaacctgcctggacatccagctacgctctgctgcgccattctatccacccatcaagactcccctcccttctactgataaccctcctaaaagccaactgggattgaattactcctctgccaagaaccctctgctgcaccttatccaaggcccaccataaaatgatgccagcccacctcacccaaaacctcttccagaaagtcccagctccaccctggttctctcctccacagatgtcagacctgtatgtggtctgatggctctctcagcctccttcattctctccccatttctgccacattttccccaataaatcttgtgtgtgtctaa

SEQ ID NO: 2242 - protein, 110 aa, Homo sapiens
MWGAPLPCRPVWDVRSVSARLTRLRSEETLCLATAPSENPKTRIPFLNPAQQPEVMKQSTCLDIQLRSAAPFYPPIKTPLPSTDNPPKSQLGLNYSSAKNPLLHLIQGPP

SEQ ID NO: 2243 - DNA, 715 bp, Homo sapiens
agtccctcaccctgacttctggagagggagagggatggagattgaattcaatcaccaatggccaatgatttaatcaaccatgcctgtgtcatggaacacaggaaacctaaacaacataaaaatccttaacaacagggtttggtgagcttctggattggtgaacacattgaggtggtagaaggctagagttcaggagatgacatgggaagacatggaagctttgtgtcccttcccatataccttgctctctgcatctcttccatttggctcctcctgagttcgtgcctctcaacatccagcagaatgtgggaatgtttcatggcatgatatggctcaatccacagacaaaggctgctgagcccagaacagcttattggacgagcccctatgagaagcagaaatgtatagaagcaaactgaacccaaggaaagattggtgatactttgggagggatgacagaggaaggggaaacacactgtccatccctgtcccagcaaggagccagctcccattcggcagtccctctgaacatctaggtagcttcccccttctttctgtccagttgtgagcagccaccaactatgatgcccctcttccagcaggctttgctttcacatcacaaagcatcatcctgagaaacaattacagttctttttagagttctggttccttcataggtacctattgtcctaataaatggaattccttggaacac

SEQ ID NO: 2244 - protein, 41 aa, Homo sapiens
MGRHGSFVSLPIYLALCISSIWLLLSSCLSTSSRMWECFMA

SEQ ID NO: 2245 - DNA, 463 bp, Homo sapiens
gacttctggagagggagagggatggagattgaattcaatcaccaatggccaatgatttaatcaaccatgcctgtgtcatggaacacaggaaacctaaacaacataaaaatccttaacaacagggtttggtgagcttctggattggtgaacacattgaggtggtagaaggctagagttcaggagatgacatgggaagacatggaagctttgtgtcccttcccatataccttgctctctgcatctcttccatttggctcctcctgagttcgtgcctctcaacatccagcagaatgtgggaatattgctgagttgagtaaatatttccttccataaaggtaaataagcatctcaagagcaagtttctacattttgtatttccctgttttatttctgtaaaattgtgcaaccaagaattatgacctactgatattagaataaaatttgcagaagtttgactacatga

SEQ ID NO: 2246 - protein, 39 aa, Homo sapiens
MGRHGSFVSLPIYLALCISSIWLLLSSCLSTSSRMWEYC

SEQ ID NO: 2247 - DNA, 410 bp, Homo sapiens
attcaatcaccaatggccaatgatttaatcaaccatgcctgtgtcatggaacacaggaaacctaaacaacataaaaatccttaacaacagggtttggtgagcttctggattggtgaacacattgaggtggtagaaggctagagttcaggagatgacatgggaagacatggaagctttgtgtcccttcccatataccttgctctctgcatctcttccatttggctcctcctgagttcgtgcctctcaacatccagcagaatgtgggaattctctgagttcctgttttggtgctaatcttcagtgtgtgtttctgaaagtaaccatgatgacaggaagcatatttttctgtatgcctatgactggtgtctgactaccctactggtactagagattaaaagacactttcctgt

SEQ ID NO: 2248 - protein, 45 aa, Homo sapiens
MGRHGSFVSLPIYLALCISSIWLLLSSCLSTSSRMWEFSEFLFWC

SEQ ID NO: 2249 - DNA, 510 bp, Homo sapiens
gaacattggctgggcacggtggctcacacctgtaatcccagcactttgggaggccgaggtggctggatcatttgaggtcaggagtttgagaccagcctggccaacatggtttcatggcatgatatggctcaatccacagacaaaggctgctgagcccagaacagcttattggacgagcccctatgagaagcagaaatgtatagaagcaaactgaacccaaggaaagattggtgatactttgggagggatgacagaggaaggggaaacacactgtccatccctgtcccagcaaggagccagctcccattcggcagtccctctgaacatctaggtagcttcccccttctttctgtccagttgtgagcagccaccaactatgatgcccctcttccagcaggctttgctttcacatcacaaagcatcatcctgagaaacaattacagttctttttagagttctggttccttcataggtacctattgtcctaataaatggaattccttggaacac

SEQ ID NO: 2250 - protein, 31 aa, Homo sapiens
MIWLNPQTKAAEPRTAYWTSPYEKQKCIEAN

SEQ ID NO: 2251 - DNA, 488 bp, Homo sapiens
atctatgccttgataggtcttcagttactcatggtgaaacatgtaagccttgaaaaactttttgtatggagttgtgctgggaagcagttttcccaccagggacaacatcttctagtccttttacatctaagtagtaccatgagactggatcatgccaaagaaatgttttggaagtgagatgtttcactttggaaccaaggaactgaaaaaacagatagagggagcccaagccaagaagagaggtctggtatcaaagatttgctgaattcacaattgaagaggcttatgtcagtcccttagaaagaatttgaggactcctcggaaaattgctgagttgagtaaatatttccttccataaaggtaaataagcatctcaagagcaagtttctacattttgtatttccctgttttatttctgtaaaattgtgcaaccaagaattatgacctactgatattagaataaaatttgcagaagtttgactacatga

SEQ ID NO: 2252 - protein, 48 aa, Homo sapiens
MVKHVSLEKLFVWSCAGKQFSHQGQHLLVLLHLSSTMRLDHAKEMFWK

SEQ ID NO: 2253 - DNA, 684 bp, Homo sapiens
ggccatgtgaggtctcagcaagaaggccatagtctacaaaccagaaaggcagcccttaccagagaccaaccctgccagaccttgatcatggactcctagcctccagaactagacagggtctcactatgttgcccaggctggtctcaaattccttctcaagtgatcctcccacctcaacctcccaaagtgctgggattgcaggcatgagccactgcacccagcagaaattcttaacgaggcaaggccaacagaggccattcattcaacatcacggcaccatagtggcctctttttaagactcctcaggttccagatagatttcatcactcaagataagcaaatgaaccacagaattttgaagttagaggtaattacagcaatgatcttagccagcccccatacattttgggacacacaggttcaggactgcctgccctggagctgattccataagatacccaaacaacttctgaaagagaaaaaagtctttgtctcagtttctgctctccagaggtaacccaaagaggtaaggaacccagtgagaaagacagagagaagtatggacaagaaacagatcctaaacctgttttgttttatttttggtagtagttgtttatttttgaaaacattcaaaccacctgtattggtggctgttattatgaaataaataaactgagaaacaac

SEQ ID NO: 2254 - protein, 56 aa, Homo sapiens
MLPRLVSNSFSSDPPTSTSQSAGIAGMSHCTQQKFLTRQGQQRPFIQHHGTIVASF

SEQ ID NO: 2255 - DNA, 718 bp, Homo sapiens
gctgttgtgatcaccaaagcaacactatccgtttaggtgctggattagaatccaggcgagtccgcagtatagtctttacacttcatcaacttccacacaggacataaattgtactaatatagtaatatactgaaatctcagaccaactgtttgtcatcggattagaatgtgatgacacagaataaagatgtgagacagaatctgtgctgaggtctaaattcacattggaagtctgggaagagaagactgtttataaaattatagcccaggaattgctgccaaagtcggcctttggtgcagctgtaagtcggatggaatccaccttcctgacgtcagacccacccactggaacactgctcctctgactggggcttccctgaatggaaactacatgtcatactgcaaaaggtaaggaacccagtgagaaagacagagagaagtatggacaagaaacagatcctaaacctgttttgttttatttttggtagtagttgtttatttttgaaaacattcaaaccacctgtattggtggctgttattatgaaataaataaactgagaaacaacaagacaatttggcctctacaatttgtttagttttgactaagtatttgccttggaagaagtatgtgtacaatactcatttttaaaagatgcaacagtcacctcgttacttggagttttacttgagacttgaatggactgaaaccacctggtca

SEQ ID NO: 2256 - protein, 35 aa, Homo sapiens
METTCHTAKGKEPSEKDREKYGQETDPKPVLFYFW

SEQ ID NO: 2257 - DNA, 537 bp, Homo sapiens
cccagtgagaaagacagagagaagtatggacaagaaacagatcctaaacctgttttgttttatttttggtagtagttgtttatttttgaaaacattcaaaccacctgtattggtggctgttattatgaaataaataaactgagaaacaacaagacaatttggcctctacaatttgtttagttttgactaagtatttgccttggaagaagtatgtgtacaatactcatttttaaaagatgcaacagtcacctcgttacttggagttttacttgagacttgaatggactgaaaccacctggtcaccactagaagctacatcaaggaaaagaaaggcaacatattgaatctcttgggagaaactcatcctgtatctgctcgattgaaaacatgaaggtgcacattccaagctgcatatgctcaggtccgagtttccaaggaaacaagggactgctcatctatctgcaaaactgaactgacgagtcactttcagcttgttacaaaccttgattctgaatcaaattctagtgtgcagtctaa

SEQ ID NO: 2258 - protein, 35 aa, Homo sapiens
MQQSPRYLEFYLRLEWTETTWSPLEATSRKRKATY

SEQ ID NO: 2259 - DNA, 3418 bp, Homo sapiens
cttgcgcgcgccccaccgaccaaaatggcggctgccgttggtgcggggtgcggtttgtagtgctgttgccctactcatccctttgcaaaatgtgaaagaagaagcggctggtggaggcgggccataggcaatgagtcggcgaaggaaacatgatgacagccctagcccgaagaaaacgccgcacaaaacagtggcggcggaggaatgcggctcggtggtcgagccagggaggaggcggctgagatcggcccgcggttcgtggccctgcggggctagagaggggcctcccgggccagtgcggcagcgagagcagcctccgaccgccgccctgtgcagtaaaagtaaccccgaggaaaggtatgaaacaccaaagagagcgctgaaaatggactcactgtcatcttccttcagttctcctaatgatccagatggacagaatgatatcttttgggatcagaattctccattgacaaagcagttaggtaaaggaagaaaaaaacagatttacaccacagatagtgatgagatttcacatattgttaatcgtattgctcctcaggatgaaaaaccaacaacaaattctatgctggacatgtggattggtgaaactgctattccttgtactcccagtgtagcaaaaggaaaatcaagagcaaaaatcagctgcacaaagttaaaaacacaaagtcaagaagaagaacttatgaaactggctaaacaatttgataaaaatatggaagagctagatgtgattcaagagcaaaacaagaggaattatgattttacccagatgatttcagaaacagagattttaagtaattataaagataatatacagatgtggtcattacataatatagttcccgaaatagataatgctacaaaaaagccaatcaaaggaaacaccaagatatctgtggcaaataatcaaaatagcagtcagaagccatttgaccaaattgctgaagcagcctttaatgctatttttgatggttctactcagaaatgtagcggacagttaagccaagaactgccagaggctttttggagcaccagtaatactacctttgtaaagacaaatgctttgaaagaggagaaaatcattactaatgaaactctggtcattgaaaaactgtcaaataaaaccccacgatcactttcttctcaagtagatacacccataatgacaaaatcatgtgtgacttcctgtactaaggagccagaaacttctaataagtacattgatgcatttactacaagtgattttgaggatgattgggaaaacttactaggtagtgaaccttttgctatgcaaaatatcgacatgcctgaactctttccttctaaaacagcccatgttactgatcaaaaggaaatttgtacctttaatagtaaaactgttaaaaatacgtcaagagcaaatacaagtccagatgccaggttaggagattcaaaagtattacaagatctttcttcaaagacatatgacagagaattaatagatgcagaatatagattttcaccaaattcaaataaatcaaacaaattatccactggaaataaaatgaaatttgagaactcttccaataaaattgttattcaagacgaaattcaaaattgtatagttacatctaatctgacaaaaataaaggaagatattcttactaactctactgaagcttctgaaaggaagtcagctttgaacacaaggtattctaatgaacagaaaaataagtgcattttaaatcagtctattaaagcccctgttaatactgatctttttggctctgcaaatctaggcagtaaaaccagtgttagtaacccaaatcagactagtgcatcaaaagtaggttctttctttgatgattggaatgatccctcatttgccaatgaaattattaaagcatgtcatcaattagataatacctgggaagcagatgatgtagatgatgatttgttgtaccaagcatgtgatgatattgaaagactaactcagcaacaagacattagaaaggacagtaagacatcagaaagtatatgtgagatcaataataattccgaacatggagccaaactaactcagcaacaagacattagaaaggacagtaagacatcagaaagtatatgtgagatcaataataattccgaacatggagccaaaaacatgtttgctatatctaaacaaggaagtaatttggtacaatcaaagcatttgaatccaggcagcatttcagtgcagacatctttgacaaatagctcacaaatagataagccaatgaagatggagaaaggggaaatgtatggaaattctccaagatttttaggtgccacaaatttgactatgtattctaagatctcaaactgtcagataaataatctgcatgtgtcttatactaacactgatgttccaatacaagtgaatagttccaaattggttcttccaggaagttcaagtttgaatgtaacttcagatcatatgaatacagaaattactacttataagaagaaattgagtactaatcagccatgccataagactgtaacagatgaagctcagagcaaccttaacacaacagttggattttcaaagtttacatttacaaggatgaaaaattctcagattctttctcagtttaatcaaaattgtataactggaagtatgtctgataccaaaattacacagggtgtggagaaaaagaaaggtgtcaacccattactggaggaagctgttggacagcaatctttggtgaaactttctgaatctttgaaacaatcttcaaaagaggaagaagagaaaaatagaaagtgttctcctgaagaaattcagagaaaaagacaagaagcactggttcggagaatggctaaagcacgagcctcatctgtaaatgcagctcccacttcatttctttaatgaaatattagttggaagacttcacgaagactgctgataactatctgtgattgataggaaattttttttcttgatttctctgtgagaaatgtaatgctgacttttataaagcctggacttctactttatttaataaatcaatgtttgcaatggtaaatgaaacatttccttggacatgtatttgaaagtcattaaatacaaaagttttggaaattcaggaaagttagcaattatgtacggatattatacagaggaaagtagttatatttttaaatgctattattgcagaggatcatcaaaaaagaggtaatctacgttatttcctattctaatgtcttttcctaataaaaaacttcaactttctaagttagtagagactgtttttgtagttttactttcattaactgttgcttaaggtttttatacacttccagattttaattaatactttcatatttctaggaacatggttgatatgaaataaaggactttttatttgtaaggaaa

SEQ ID NO: 2260 - protein, 926 aa, Homo sapiens; identical to SEQ ID NO: 118

SEQ ID NO: 2261 - DNA, 2759 bp, Homo sapiens
ccaaaatggcggctgccgttggtgcggggtgcggtttgtagtgctgttgccctactcatccctttgcaaaatgtgaaagaagaagcggctggtggaggcgggccataggcaatgagtcggcgaaggaaacatgatgacagccctagcccgaagaaaacgccgcacaaaacagtggcggcggaggaatgcggctcggtggtcgagccagggaggaggcggctgagatcggcccgcggttcgtggccctgcggggctagagaggggcctcccgggccagtgcggcagcgagagcagcctccgaccgccgccctgtgcagtaaaagtaaccccgaggaaaggtatgaaacaccaaagagagcgctgaaaatggactcactgtcatcttccttcagttctcctaatgatccagatggacagaatgatatcttttgggatcagaattctccattgacaaagcagttaggtaaaggaagaaaaaaacagatttacaccacagatagtgatgagatttcacatattgttaatcgtattgctcctcaggatgaaaaaccaacaacaaattctatgctggacatgtggattggtgaaactgctattccttgtactcccagtgtagcaaaaggaaaatcaagagcaaaaatcagctgcacaaagttaaaaacacaaagtcaagaagaagaacttatgaaactggctaaacaatttgataaaaatatggaagagctagatgtgattcaagagcaaaacaagaggaattatgattttacccagatgatttcagaaacagagattttaagtaattataaagataatatacagatgtggtcattacataatatagttcccgaaatagataatgctacaaaaaagccaatcaaaggaaacaccaagatatctgtggcaaataatcaaaatagcagtcagaagccatttgaccaaattgctgaagcagcctttaatgctatttttgatggttctactcagaaatgtagcggacagttaagccaagaactgccagaggctttttggagcaccagtaatactacctttgtaaagacaaatgctttgaaagaggagaaaatcattactaatgaaactctggtcattgaaaaactgtcaaataaaaccccacgatcactttcttctcaagtagatacacccataatgacaaaatcatgtgtgacttcctgtactaaggagccagaaacttctaataagtacattgatgcatttactacaagtgattttgaggatgattgggaaaacttactaggtagtgaaccttttgctatgcaaaatatcgacatgcctgaactctttccttctaaaacagcccatgttactgatcaaaaggaaatttgtacctttaatagtaaaactgttaaaaatacgtcaagagcaaatacaagtccagatgccaggttaggagattcaaaagtattacaagatctttcttcaaagacatatgacagagaattaatagatgcagaatatagattttcaccaaattcaaataaatcaaacaaattatccactggaaataaaatgaaatttgagaactcttccaataaaattgttattcaagacgaaattcaaaattgtatagttacatctaatctgacaaaaataaaggaagatattcttactaactctactgaagcttctgaaaggaagtcagctttgaacacaaggtattctaatgaacagaaaaataagtgcattttaaatcagtctattaaagcccctgttaatactgatctttttggctctgcaaatctaggcagtaaaaccagtgttagtaacccaaatcagactagtgcatcaaaagtaggttctttctttgatgattggaatgatccctcatttgccaatgaaattattaaagcatgtcatcaattagataatacctgggaagcagatgatgtagatgatgatttgttgtaccaagcatgtgatgatattgaaagactaactcagcaacaagacattagaaaggacagtaagacatcagaaagtatatgtgagatcaataataattccgaacatggagccaaactaactcagcaacaagacattagaaaggacagtaagacatcagaaagtatatgtgagatcaataataattccgaacatggagccaaaaacatgtttgctatatctaaacaaggaagtaatttggtacaatcaaagcatttgaatccaggcagcatttcagtgcagacatctttgacaaatagctcacaaatagataagccaatgaagatggagaaaggggaaatgtatggaaattctccaagatttttaggtgccacaaatttgactatgtattctaagatctcaaactgtcagataaataatctgcatgtgtcttatactaacactgatgttccaatacaagtgaatagttccaaattggttcttccaggaagttcaagtttgaatgtaacttcagatcatatgaatacagaaattactacttataagaagaaattgagtactaatcagccatgccataagactgtaacagatgaagctcagagcaaccttaacacaacagttggattttcaaagtttacatttacaaggatgaaaaattctcagattctttctcagtttaatcaaaattgtataactggaagtatgtctgataccaaaattacacagggtgtggagaaaaagaaaggtgtcaacccattactggaggaagctgttggacagcaatctttggtgaaactttctgaatctttgaaacaatcttc

SEQ ID NO: 2262 - protein, 881 aa, Homo sapiens
MSRRRKHDDSPSPKKTPHKTVAAEECGSVVEPGRRRLRSARGSWPCGAREGPPGPVRQREQPPTAALCSKSNPEERYETPKRALKMDSLSSSFSSPNDPDGQNDIFWDQNSPLTKQLGKGRKKQIYTTDSDEISHIVNRIAPQDEKPTTNSMLDMWIGETAIPCTPSVAKGKSRAKISCTKLKTQSQEEELMKLAKQFDKNMEELDVIQEQNKRNYDFTQMISETEILSNYKDNIQMWSLHNIVPEIDNATKKPIKGNTKISVANNQNSSQKPFDQIAEAAFNAIFDGSTQKCSGQLSQELPEAFWSTSNTTFVKTNALKEEKIITNETLVIEKLSNKTPRSLSSQVDTPIMTKSCVTSCTKEPETSNKYIDAFTTSDFEDDWENLLGSEPFAMQNIDMPELFPSKTAHVTDQKEICTFNSKTVKNTSRANTSPDARLGDSKVLQDLSSKTYDRELIDAEYRFSPNSNKSNKLSTGNKMKFENSSNKIVIQDEIQNCIVTSNLTKIKEDILTNSTEASERKSALNTRYSNEQKNKCILNQSIKAPVNTDLFGSANLGSKTSVSNPNQTSASKVGSFFDDWNDPSFANEIIKACHQLDNTWEADDVDDDLLYQACDDIERLTQQQDIRKDSKTSESICEINNNSEHGAKLTQQQDIRKDSKTSESICEINNNSEHGAKNMFAISKQGSNLVQSKHLNPGSISVQTSLTNSSQIDKPMKMEKGEMYGNSPRFLGATNLTMYSKISNCQINNLHVSYTNTDVPIQVNSSKLVLPGSSSLNVTSDHMNTEITTYKKKLSTNQPCHKTVTDEAQSNLNTTVGFSKFTFTRMKNSQILSQFNQNCITGSMSDTKITQGVEKKKGVNPLLEEAVGQQSLVKLSESLKQ

SEQ ID NO: 2263 - DNA, 3263 bp, Homo sapiens
caaaatggcggctgccgttggtgcggggtgcggtttgtagtgctgttgccctactcatccctttgcaaaatgtgaaagaagaagcggctggtggaggcgggccataggcaatgagtcggcgaaggaaacatgatgacagccctagcccgaagaaaacgccgcacaaaacagtggcggcggaggaatgcggctcggtggtcgagccagggaggaggcggctgagatcggcccgcggttcgtggccctgcggggctagagaggggcctcccgggccagtgcggcagcgagagcagcctccgaccgccgccctgtgcagtaaaagtaaccccgaggaaaggtatgaaacaccaaagagagcgctgaaaatggactcactgtcatcttccttcagttctcctaatgatccagatggacagaatgatatcttttgggatcagaattctccattgacaaagcagttaggtaaaggaagaaaaaaacagatttacaccacagatagtgatgagatttcacatattgttaatcgtattgctcctcaggatgaaaaaccaacaacaaattctatgctggacatgtggattggtgaaactgctattccttgtactcccagtgtagcaaaaggaaaatcaagagcaaaaatcagctgcacaaagttaaaaacacaaagtcaagaagaagaacttatgaaactggctaaacaatttgataaaaatatggaagagctagatgtgattcaagagcaaaacaagaggaattatgattttacccagatgatttcagaaacagagattttaagtaattataaagataatatacagatgtggtcattacataatatagttcccgaaatagataatgctacaaaaaagccaatcaaaggaaacaccaagatatctgtggcaaataatcaaaatagcagtcagaagccatttgaccaaattgctgaagcagcctttaatgctatttttgatggttctactcagaaatgtagcggacagttaagccaagaactgccagaggctttttggagcaccagtaatactacctttgtaaagacaaatgctttgaaagaggagaaaatcattactaatgaaactctggtcattgaaaaactgtcaaataaaaccccacgatcactttcttctcaagtagatacacccataatgacaaaatcatgtgtgacttcctgtactaaggagccagaaacttctaataagtacattgatgcatttactacaagtgattttgaggatgattgggaaaacttactaggtagtgaaccttttgctatgcaaaatatcgacatgcctgaactctttccttctaaaacagcccatgttactgatcaaaaggaaatttgtacctttaatagtaaaactgttaaaaatacgtcaagagcaaatacaagtccagatgccaggttaggagattcaaaagtattacaagatctttcttcaaagacatatgacagagaattaatagatgcagaatatagattttcaccaaattcaaataaatcaaacaaattatccactggaaataaaatgaaatttgagaactcttccaataaaattgttattcaagacgaaattcaaaattgtatagttacatctaatctgacaaaaataaaggaagatattcttactaactctactgaagcttctgaaaggaagtcagctttgaacacaaggtattctaatgaacagaaaaataagtgcattttaaatcagtctattaaagcccctgttaatactgatctttttggctctgcaaatctaggcagtaaaaccagtgttagtaacccaaatcagactagtgcatcaaaagtaggttctttctttgatgattggaatgatccctcatttgccaatgaaattattaaagcatgtcatcaattagataatacctgggaagcagatgatgtagatgatgatttgttgtaccaagcatgtgatgatattgaaagactaactcagcaacaagacattagaaaggacagtaagacatcagaaagtatatgtgagatcaataataattccgaacatggagccaaactaactcagcaacaagacattagaaaggacagtaagacatcagaaagtatatgtgagatcaataataattccgaacatggagccaaaaacatgtttgctatatctaaacaaggaagtaatttggtacaatcaaagcatttgaatccaggcagcatttcagtgcagacatctttgacaaatagctcacaaatagataagccaatgaagatggagaaaggggaaatgtatggaaattctccaagatttttaggtgccacaaatttgactatgtattctaagatctcaaactgtcagataaataatctgcatgtgtcttatactaacactgatgttccaatacaagtgaatagttccaaattggttcttccaggaagttcaagtttgaatgtaacttcagatcatatgaatacagaaattactacttataagaagaaattgagtactaatcagccatgccataagactgtaacagatgaagctcagagcaaccttaacacaacagttggattttcaaagtttacatttacaaggatgaaaaattctcagattctttctcagtttaatcaaaattgtataactggaagtatgtctgataccaaaattacacagggtgtggagaaaaagaaaggtgtcaacccattactggaggaagctgttggacagcaatctttggtgaaactttctgaatctttgaaacaatcttcaaaagaggaagaagagaaaaatagaaagtgttctcctgaagaaattcagagaaaaagacaagaagcactggttcggagaatggctaaagcacgagcctcatctgtaaatgcagctcccacttcatttctttaatgaaatattagttggaagacttcacgaagactgctgataactatctgtgattgataggaaattttttttcttgatttctctgtgagaaatgtaatgctgacttttataaagcctggacttctactttatttaataaatcaatgtttgcaatggtaaatgaaacatttccttggacatgtatttgaaagtcattaaatacaaaagttttggaaattcaggaaagttagcaattatgtacggatattatacagaggaaagtagttatatttttaaatgctattattgcagaggatcatcaaaaaagaggtaatctacgttatttcctattctaatgtcttttcctaataaaaaacttcaactttctaagttagt

SEQ ID NO: 2264 - protein, 926 aa, Homo sapiens; identical to SEQ ID NO: 118

SEQ ID NO: 2265 - DNA, 511 bp, Homo sapiens
ggaagacgggggatgctacactggtactttatacctctttttttccctatctgccaaaggatgaaaaaccaacaacaaattctatgctggacatgtggattggtgaaactgctattccttgtactcccagtgtagcaaaaggaaaatcaagagcaaaaatcagctgcacaaagaagttcaagtttgaatgtaacttcagatcatatgaatacagaaattactacttataagaagaaattgagtactaatcagccatgccataagactgtaacagatgaagctcagagcaaccttaacacaacagttggattttcaaagtttacatttacaaggatgaaaaattctcagattctttctcagtttaatcaaaattgtataactggaagtatgtctgataccaaaattacacagggtgtggagaaaaagaaaggtgtcaacccattactggaggaagctgttggacagcaatctttggtgaaactttctgaatctttgaaacaatcttcaaaag

SEQ ID NO: 2266 - protein, 48 aa, Homo sapiens
MLDMWIGETAIPCTPSVAKGKSRAKISCTKKFKFECNFRSYEYRNYYL

SEQ ID NO: 2267 - DNA, 1000 bp, Homo sapiens
caaactaactcagcaacaagacattagaaaggacagtaagacatcagaaagtatatgtgagatcaataataattccgaacatggagccaaaaacatgtttgctatatctaaacaaggaagtaatttggtacaatcaaagcatttgaatccaggcagcatttcagtgcagacatctttgacaaatagctcacaaatagataagccaatgaagatggagaaaggggaaatgtatggaaattctccaagatttttaggtgccacaaatttgactatgtattctaagatctcaaactgtcagataaataatctgcatgtgtcttatactaacactgatgttccaatacaagtgaatagttccaaattggttcttccaggaagttcaagtttgaatgtaacttcagatcatatgaatacagaaattactacttataagaagaaattgagtactaatcagccatgccataagactgtaacagatgaagctcagagcaaccttaacacaacagttggattttcaaagtttacatttacaaggatgaaaaattctcagattctttctcagtttaatcaaaattgtataactggaagtatgtctgataccaaaattacacagggtgtggagaaaaagaaaggtgtcaacccattactggaggaagctgttggacagcaatctttggtgaaactttctgaatctttgaaacaatcttcaaaagaggaagaagagaaaaatagaaagtgttctcctgaagaaattcagagaaaaagacaagaagcactggttcggagaatggctaaagcacgagcctcatctgtaaatgcagctcccacttcatttctttaatgaaatattagttggaagacttcacgaagactgctgataactatctgtgattgataggaaattttttttcttgatttctctgtgagaaatgtaatgctgacttttataaagcctggacttctactttatttaataaatcaatgtttgcaatggtaaatg

SEQ ID NO: 2268 - protein, 248 aa, Homo sapiens [sequence omitted]

SEQ ID NO: 2269 - DNA, 725 bp, Homo sapiens
ggaaatctcgttgagtttgggaggccttacttctgcatatttgaatctggtgaccaaattaaacattgttctaactgtagtggtctgatcattctaccaaggccatgactgtgaagagcactgtgggtgatggctggtggctcaccggagccggcttgtgcacggcgcccgaagccaaagaaatctgaagacccgaccttactattggcaaagacagacaaacactctacaaatagtgcttgaaaaatgccactgtttggttcagatggtgaagaggaactcaggaaggcctggcagtctctaggaggctagggcagtggttctcaaatgatagggtgtacagaaattccctggaggacttgtgacaacaaagattgctaggcctactcccagggtttctaattcagcaggtctggggatggagctcaagtatctgcatttctaacaagtccccggtggtgctgatgctgcttgcatggaccagttttgagaaccatacttggagaaacacttggttaggaaaactatgtctgttacagattgatcaaagggctcttaagttccttttgtacaataaatcactgcgatatcaaatgaggtaaatgaacatgctctttgaactcttaacttctagaccaatataaaacattctaaatatgaaatggaaacatttacaattgttattgattctcatcaatgcaatgttcaataaagataagaatcac

SEQ ID NO: 2270 - protein, 37 aa, Homo sapiens
MAGGSPEPACARRPKPKKSEDPTLLLAKTDKHSTNSA

SEQ ID NO: 2271 - DNA, 8192 bp, Homo sapiens
ggttgctggcggagcccgggaggcggagaaggctgtcgttgccttggccgtcgcatccccgagggagtcgtgtcggcgccaccccggcccccgagcccgcagattgcccaccgaagctcgtgtgtgcacccccgatcccgccagccactcgcccctggcctcgcgggccgtgtctccggcatcatgtgtggtatatttgcttacttaaactaccatgttcctcgaacgagacgagaaatcctggagaccctaatcaaaggccttcagagactggagtacagaggatatgattctgctggtgtgggatttgatggaggcaatgataaagattgggaagccaatgcctgcaaaatccagcttattaagaagaaaggaaaagttaaggcactggatgaagaagttcacaagcaacaagatatggatttggatatagaatttgatgtacaccttggaatagctcatacccgttgggcaacacatggagaacccagtcctgtcaatagccacccccagcgctctgataaaaataatgaatttatcgttattcacaatggaatcatcaccaactacaaagacttgaaaaagtttttggaaagcaaaggctatgacttcgaatctgaaacagacacagagacaattgccaagctcgttaagtatatgtatgacaatcgggaaagtcaagataccagctttactaccttggtggagagagttatccaacaattggaaggtgcttttgcacttgtgtttaaaagtgttcattttcccgggcaagcagttggcacaaggcgaggtagccctctgttgattggtgtacggagtgaacataaactttctactgatcacattcctatactctacagaacaggcaaagacaagaaaggaagctgcaatctctctcgtgtggacagcacaacctgccttttcccggtggaagaaaaagcagtggagtattactttgcttctgatgcaagtgctgtcatagaacacaccaatcgcgtcatctttctggaagatgatgatgttgcagcagtagtggatggacgtctttctatccatcgaattaaacgaactgcaggagatcaccccggacgagctgtgcaaacactccagatggaactccagcagatcatgaagggcaacttcagttcatttatgcagaaggaaatatttgagcagccagagtctgtcgtgaacacaatgagaggaagagtcaactttgatgactatactgtgaatttgggtggtttgaaggatcacataaaggagatccagagatgccggcgtttgattcttattgcttgtggaacaagttaccatgctggtgtagcaacacgtcaagttcttgaggagctgactgagttgcctgtgatggtggaactagcaagtgacttcctggacagaaacacaccagtctttcgagatgatgtttgctttttccttagtcaatcaggtgagacagcagatactttgatgggtcttcgttactgtaaggagagaggagctttaactgtggggatcacaaacacagttggcagttccatatcacgggagacagattgtggagttcatattaatgctggtcctgagattggtgtggccagtacaaaggcttataccagccagtttgtatcccttgtgatgtttgcccttatgatgtgtgatgatcggatctccatgcaagaaagacgcaaagagatcatgcttggattgaaacggctgcctgatttgattaaggaagtactgagcatggatgacgaaattcagaaactagcaacagaactttatcatcagaagtcagttctgataatgggacgaggctatcattatgctacttgtcttgaaggggcactgaaaatcaaagaaattacttatatgcactctgaaggcatccttgctggtgaattgaaacatggccctctggctttggtggataaattgatgcctgtgatcatgatcatcatgagagatcacacttatgccaagtgtcagaatgctcttcagcaagtggttgctcggcaggggcggcctgtggtaatttgtgataaggaggatactgagaccattaagaacacaaaaagaacgatcaaggtgccccactcagtggactgcttgcagggcattctcagcgtgatccctttacagttgctggctttccaccttgctgtgctgagaggctatgatgttgatttcccacggaatcttgccaaatctgtgactgtagagtgaggaatatctatacaaaatgtacgaaactgtatgattaagcaacacaagacaccttttgtatttaaaaccttgatttaaaatatcaccccttgaagcctttttttagtaaatccttatttatatatcagttataattattccactcaatatgtgatttttgtgaagttacctcttacattttcccagtaatttgtggaggactttgaataatggaatctatattggaatctgtatcagaaagattctagctattattttctttaaagaatgctgggtgttgcatttctggaccctccacttcaatctgagaagacaatatgtttctaaaaattggtacttgtttcaccatacttcattcagaccagtgaaagagtagtgcatttaattggagtatctaaagccagtggcagtgtatgctcatacttggacagttagggaagggtttgccaagttttaagagaagatgtgatttattttgaaatttgtttctgttttgtttttaaatcaaactgtaaaacttaaaactgaaaaattttattggtaggatttatatctaagtttggttagccttagtttctcagacttgttgtctattatctgtaggtggaagaaatttaggaagcgaaatattacagtagtgcattggtgggtctcaatccttaacatatttgcacaattttatagcacaaactttaaattcaagctgctttggacaactgacaatatgattttaaatttgaagatgggatgtgtacatgttgggtatcctactactttgtgttttcatctcctaaaagtggtttttatttccttgtatctgtagtcttttattttttaaatgactgctgaatgacatattttatcttgttctttaaaatcacaacacagagctgctattaaattaatattgatatattcagtattctcttcaactttgtcacgaggaagaatttcctgtagttaattttaactttccttcattacattgttgcataaaactagtcccttagtgccagtttggaagttacttgcaattgtttggaagatttgcaggtcgctgacctcatcatttcactctaagtatatgtggtaggctaagctcagaaaaaggtatgtatgctttacactgataggcaccaaatttagtattgtatcctaagtatttttcctcttctgtattttctgtgctctacccctgaaatatatttaggaataaagaagatataaataaagtgatattggggtatgttcagcttgtaagtgtcagaaatggaagttgacaatttggattaaaatatttaaagtagaatgttattatttgatacccccaaaattgtgagtaataatttcttaatggagcttttctggccagatcttcagggctataggagagtgtgtttgtttttggtgaagtccttctttttcaaaggtttttacttttaaattgtgaagataagctatttagcacaattatttaagtaagctgttttttcctttcttttctttcttttcttgttttaacttctgggtgaggttaagattttctaatagttattgttgttgccagagaagcatagaattctgcttgtgtcttagggttagagaaagatttgttatattttgaggtaatttggaaggactttcatacatggtgactagaaacctgatctttttaagaataaaatagggtcactatttacattatatataatatatggctattatagctatattaatctactttaattgtttctaagattattttgtgtaagtcagctagcgtgtgtatagtgtcatttcttatgttttgtatattaacgttttacaaacacaatttgtgtgggtttgtagcatttcttatagtttaaagtatgattcagcattctaagttaaaactaatatgtgaagtcagtcattagtctgcataatctctgtctccctctgtgtgtgtctttctataaagcacatgtgtacacacacacacacaaatatactgaaagctagggtaagttctaaactgaatatcaaaaaccaaaatcaagaacaaagaagtgatattttccaaacaaacatggattctctgccgggtgcagtggctcagcctgtaataccagcctccactttgggagtctgaggtgggagtattgcttgagctcaagagttggagaacagcctgggcaacatggtgagacctggtctttacaaaaatttttttggccggacgcagtggctcacacctgtaatcccagcactttgggaggccgaggcaggttgatcatgaggtcaagagatcgagaccatcctggccaacatggtgaaaccccgtctttactaaaaatacaaaaattagctgggagtggtggcgtgcgcctgtagtcccaactacttgggaggctgaggcaggagaatcgcttgaacccaggaggcggaggttgcagtgaggcgagatcacgccactacactccagcctggcgacagagcaagactctctcaaaaaaaaaaaaaaaaaattttttttttaaatgggctgggcatggtggcttgtgcctgtagtctcagcaacttgggaggcttaagtagtaggatcgcttgagcctgggaggttgaggctgcagtgagctgtgattgtgccactgtgcttcagcttgagtgacagagtgagaccctcctgactcaaaacaaaaaacatggtttctcctctctctcctgtcttcttactctctatcccatttgatgtagtgatttttaaatgcttttgtaagttaattcttaacacaaaagagacattgtaatgaggcacaccactaaagtgagcatgcccaattaaaaccagtgtaatataggataagaaaatctgatttttcaaaaaagatactctacataaagaatccttcatataaaaagttctttcttgtagtacatttaaagttttaattcactcatgtataactgagagttcctttgagccctttttaggcagggaggcatgtctgtcatctagcgtgtggcccagtaagtgattattacattggaatcagtttttcagtcttttaaaataaattctgtgccataagaataaaagataaagagaaaaattaatgttaactatttttagcttattataactatgtcaacaagtgtttattaatacctattatgggaaagtcactgtggttggcattgaaaattacatcatctttaaagcagtatttgtccccagatggactcatcactagcaaagactaggttcattggaaggcatagggtgagagaatgggaagatgaagtggaggcgggttgttaaagtgctgtcagtgagtgattttgtctacttgaataatggtccatgtttgggggcatattgtgtttcataagaagtgaaaggtatttgcaaagtaagctacaaatgacccataaatctgttaacaacagtccttaatatgcaaagatgaaaaacaagcattactgctacccaaagggaactggtgcttggtgatgtgcagatggggctgttggttaagagagctattacaggttttctctcttaggtttcataggaggtagttactgagatgagattgttttatctttttgaatacagatctcttgtcttgagttagttctgaggatgggagtaataaaggagttttttgtttttttgtttgtttgtttgttttggctccttagtaatactcctctgacatttatttctattattcttcaaagaaaggaaaccaactgaaatgtttgctttaacaaacattttaataagttctctgggtttttttttccccttttaaaaaaattagcatataccatagcaataaaagaactaatgttaactattgtatgctacaacttaagtgatttttctaaagaagcacaatgtcattgaaagtattattgaaaaggatcatagtcacattgaatttgtgaaggccaaagaaattgaagggagtgatattttcattttatgatattcacatatttagtaaattttgtgtacaagaataccaggcagagtgttttacccatggaaacaggtttcagattactttatttttactgttagagtctcaagtttagaaatgctaacacttaaatcagtttttttctcactatacttgaagattgttaatattttgatatcttcctagcttgatgaatttaaacatatcttcagatctgtgacagtgacagccaataggactgataatattagcttcaaaccaataatatccagggttaaaataaaaatcatagtgaaagtacgattgtaaaattatgctatattaacttttaagtctgtaataacttgacatcaaaatgttatgtaattaccataaataatggctagcgagaacatctttggaaattctcaaattacctttcttactacactgtttgcagaatgaatgtagaaatgatcctgttagctttctgaatgttctgtggttgaatgtgtttttgcttaaataaagcttttggtatttgtttaaattacacttcttgagaagtggaaattttaggatcatctttgctttgtttcagttttgtgatttttgaaatgaatgtttagtttactgagccagttggtcatttcttcctcatgtcgttaagtccagtgagtaagcctgaactgtgaataaattaccaaaaacttgcttagaatttcattttgaagcaatttgctaatatttgaagtgtatacacatttgtagttatgttagaaattgtattgtactaagaatgtaatcaatgtctactttagttgtaaacatttctgatgtcaaaactttattcattactgttgattttaagaataagaaatcactgcctaaatattaccaaaagccactgtctctacccgaacttcccagtttgggaaagaatcgttagataaaacaaaggctctgccctttctgataccaaactccacagatactttctcacatcttttaaaacattttgcaataacatattgtttataggaagtttacggggtatgcaatgattaaaacttttaagtgaattgatagttgcaaaagaaaggataatatttaaggtcagtgagtagcaagacaatctaaagtttctgtaatatctggctctctgttaattatagagcaaagtttcccttacagaatccttttatgaacagcaagctagagtctatccctagtggttatagcacctgctgcgtttttcaggagacagttaggccagggtgatttgaatggatagatgtgctgttttgcctgcttgtagaattcagcccagtctttggtctctctctctctctccctcctccacctctccctctctcttcttctgcaccagagcctaaggctgcgccaccaagatgcgtcattttttccagaggcttcttttttttttttttgagatggagttttgctctgttgcccaggctggcatgcagtgctgcaatcttggctgactgcaacttccacctcccgtgttcacacgagtcttttgcctcagcctctggattagctgggattacaggcacgtgccaccatgcctagctaatttttgtgtttttagtagagacggggtttcaccatgttggccaggctagtctcaaactcctgaccttaagtgatctgcccgccttggcctcccaaagtgctgggattacaggcatgagtcaccgtgtcctgcccagacatatcaaatttgacaggtattgtataccctttggatctttaggaattaatttttgcctctgtcactcagctttgtatattttgaaatggagataagtatagggaggtcttggaaggaaaattgccagaattcccaaaccatgtaacactcattgagaattccagatccattatatctaaagggcaagtgaaggaaacagtattgtgaactgggtataactccttggttcttaactagtacattcttaatctgtgagacccaaaggttgataaaca

SEQ ID NO: 2272 - protein, 681 aa, Homo sapiens
MCGIFAYLNYHVPRTRREILETLIKGLQRLEYRGYDSAGVGFDGGNDKDWEANACKIQLIKKKGKVKALDEEVHKQQDMDLDIEFDVHLGIAHTRWATHGEPSPVNSHPQRSDKNNEFIVIHNGIITNYKDLKKFLESKGYDFESETDTETIAKLVKYMYDNRESQDTSFTTLVERVIQQLEGAFALVFKSVHFPGQAVGTRRGSPLLIGVRSEHKLSTDHIPILYRTGKDKKGSCNLSRVDSTTCLFPVEEKAVEYYFASDASAVIEHTNRVIFLEDDDVAAVVDGRLSIHRIKRTAGDHPGRAVQTLQMELQQIMKGNFSSFMQKEIFEQPESVVNTMRGRVNFDDYTVNLGGLKDHIKEIQRCRRLILIACGTSYHAGVATRQVLEELTELPVMVELASDFLDRNTPVFRDDVCFFLSQSGETADTLMGLRYCKERGALTVGITNTVGSSISRETDCGVHINAGPEIGVASTKAYTSQFVSLVMFALMMCDDRISMQERRKEIMLGLKRLPDLIKEVLSMDDEIQKLATELYHQKSVLIMGRGYHYATCLEGALKIKEITYMHSEGILAGELKHGPLALVDKLMPVIMIIMRDHTYAKCQNALQQVVARQGRPVVICDKEDTETIKNTKRTIKVPHSVDCLQGILSVIPLQLLAFHLAVLRGYDVDFPRNLAKSVTVE

SEQ ID NO: 2273 - DNA, 6759 bp, Homo sapiens
ggttgctggcggagcccgggaggcggagaaggctgtcgttgccttggccgtcgcatccccgagggagtcgtgtcggcgccaccccggcccccgagcccgcagattgcccaccgaagctcgtgtgtgcacccccgatcccgccagccactcgcccctggcctcgcgggccgtgtctccggcatcatgtgtggtatatttgcttacttaaactaccatgttcctcgaacgagacgagaaatcctggagaccctaatcaaaggccttcagagactggagtacagaggatatgattctgctggtgtgggatttgatggaggcaatgataaagattgggaagccaatgcctgcaaaatccagcttattaagaagaaaggaaaagttaaggcactggatgaagaagttcacaagcaacaagatatggatttggatatagaatttgatgtacaccttggaatagctcatacccgttgggcaacacatggagaacccagtcctgtcaatagccacccccagcgctctgataaaaataatgaatttatcgttattcacaatggaatcatcaccaactacaaagacttgaaaaagtttttggaaagcaaaggctatgacttcgaatctgaaacagacacagagacaattgccaagctcgttaagtatatgtatgacaatcgggaaagtcaagataccagctttactaccttggtggagagagttatccaacaattggaaggtgcttttgcacttgtgtttaaaagtgttcattttcccgggcaagcagttggcacaaggcgaggtagccctctgttgattggtgtacggagtgaacataaactttctactgatcacattcctatactctacagaacaggcaaagacaagaaaggaagctgcaatctctctcgtgtggacagcacaacctgccttttcccggtggaagaaaaagcagtggagtattactttgcttctgatgcaagtgctgtcatagaacacaccaatcgcgtcatctttctggaagatgatgatgttgcagcagtagtggatggacgtctttctatccatcgaattaaacgaactgcaggagatcaccccggacgagctgtgcaaacactccagatggaactccagcagatcatgaagggcaacttcagttcatttatgcagaaggaaatatttgagcagccagagtctgtcgtgaacacaatgagaggaagagtcaactttgatgactatactgtgaatttgggtggtttgaaggatcacataaaggagatccagagatgccggcgtttgattcttattgcttgtggaacaagttaccatgctggtgtagcaacacgtcaagttcttgaggagctgactgagttgcctgtgatggtggaactagcaagtgacttcctggacagaaacacaccagtctttcgagatgatgtttgctttttccttagtcaatcaggtgagacagcagatactttgatgggtcttcgttactgtaaggagagaggagctttaactgtggggatcacaaacacagttggcagttccatatcacgggagacagattgtggagttcatattaatgctggtcctgagattggtgtggccagtacaaaggcttataccagccagtttgtatcccttgtgatgtttgcccttatgatgtgtgatgatcggatctccatgcaagaaagacgcaaagagatcatgcttggattgaaacggctgcctgatttgattaaggaagtactgagcatggatgacgaaattcagaaactagcaacagaactttatcatcagaagtcagttctgataatgggacgaggctatcattatgctacttgtcttgaaggggcactgaaaatcaaagaaattacttatatgcactctgaaggcatccttgctggtgaattgaaacatggccctctggctttggtggataaattgatgcctgtgatcatgatcatcatgagagatcacacttatgccaagtgtcagaatgctcttcagcaagtggttgctcggcaggggcggcctgtggtaatttgtgataaggaggatactgagaccattaagaacacaaaaagaacgatcaaggtgccccactcagtggactgcttgcagggcattctcagcgtgatccctttacagttgctggctttccaccttgctgtgctgagaggctatgatgttgatttcccacggaatcttgccaaatctgtgactgtagagtgaggaatatctatacaaaatgtacgaaactgtatgattaagcaacacaagacaccttttgtatttaaaaccttgatttaaaatatcaccccttgaagcctttttttagtaaatccttatttatatatcagttataattattccactcaatatgtgatttttgtgaagttacctcttacattttcccagtaatttgtggaggactttgaataatggaatctatattggaatctgtatcagaaagattctagctattattttctttaaagaatgctgggtgttgcatttctggaccctccacttcaatctgagaagacaatatgtttctaaaaattggtacttgtttcaccatacttcattcagaccagtgaaagagtagtgcatttaattggagtatctaaagccagtggcagtgtatgctcatacttggacagttagggaagggtttgccaagttttaagagaagatgtgatttattttgaaatttgtttctgttttgtttttaaatcaaactgtaaaacttaaaactgaaaaattttattggtaggatttatatctaagtttggttagccttagtttctcagacttgttgtctattatctgtaggtggaagaaatttaggaagcgaaatattacagtagtgcattggtgggtctcaatccttaacatatttgcacaattttatagcacaaactttaaattcaagctgctttggacaactgacaatatgattttaaatttgaagatgggatgtgtacatgttgggtatcctactactttgtgttttcatctcctaaaagtggtttttatttccttgtatctgtagtcttttattttttaaatgactgctgaatgacatattttatcttgttctttaaaatcacaacacagagctgctattaaattaatattgatatattcagtattctcttcaactttgtcacgaggaagaatttcctgtagttaattttaactttccttcattacattgttgcataaaactagtcccttagtgccagtttggaagttacttgcaattgtttggaagatttgcaggtcgctgacctcatcatttcactctaagtatatgtggtaggctaagctcagaaaaaggtatgtatgctttacactgataggcaccaaatttagtattgtatcctaagtatttttcctcttctgtattttctgtgctctacccctgaaatatatttaggaataaagaagatataaataaagtgatattggggtatgttcagcttgtaagtgtcagaaatggaagttgacaatttggattaaaatatttaaagtagaatgttattatttgatacccccaaaattgtgagtaataatttcttaatggagcttttctggccagatcttcagggctataggagagtgtgtttgtttttggtgaagtccttctttttcaaaggtttttacttttaaattgtgaagataagctatttagcacaattatttaagtaagctgttttttcctttcttttctttcttttcttgttttaacttctgggtgaggttaagattttctaatagttattgttgttgccagagaagcatagaattctgcttgtgtcttagggttagagaaagatttgttatattttgaggtaatttggaaggactttcatacatggtgactagaaacctgatctttttaagaataaaatagggtcactatttacattatatataatatatggctattatagctatattaatctactttaattgtttctaagattattttgtgtaagtcagctagcgtgtgtatagtgtcatttcttatgttttgtatattaacgttttacaaacacaatttgtgtgggtttgtagcatttcttatagtttaaagtatgattcagcattctaagttaaaactaatatgtgaagtcagtcattagtctgcataatctctgtctccctctgtgtgtgtctttctataaagcacatgtgtacacacacacacacaaatatactgaaagctagggtaagttctaaactgaatatcaaaaaccaaaatcaagaacaaagaagtgatattttccaaacaaacatggattctctgccgggtgcagtggctcagcctgtaataccagcctccactttgggagtctgaggtgggagtattgcttgagctcaagagttggagaacagcctgggcaacatggtgagacctggtctttacaaaaatttttttggccggacgcagtggctcacacctgtaatcccagcactttgggaggccgaggcaggttgatcatgaggtcaagagatcgagaccatcctggccaacatggtgaaaccccgtctttactaaaaatacaaaaattagctgggagtggtggcgtgcgcctgtagtcccaactacttgggaggctgaggcaggagaatcgcttgaacccaggaggcggaggttgcagtgaggcgagatcacgccactacactccagcctggcgacagagcaagactctctcaaaaaaaaaaaaaaaaaattttttttttaaatgggctgggcatggtggcttgtgcctgtagtctcagcaacttgggaggcttaagtagtaggatcgcttgagcctgggaggttgaggctgcagtgagctgtgattgtgccactgtgcttcagcttgagtgacagagtgagaccctcctgactcaaaacaaaaaacatggtttctcctctctctcctgtcttcttactctctatcccatttgatgtagtgatttttaaatgcttttgtaagttaattcttaacacaaaagagacattgtaatgaggcacaccactaaagtgagcatgcccaattaaaaccagtgtaatataggataagaaaatctgatttttcaaaaaagatactctacataaagaatccttcatataaaaagttctttcttgtagtacatttaaagttttaattcactcatgtataactgagagttcctttgagccctttttaggcagggaggcatgtctgtcatctagcgtgtggcccagtaagtgattattacattggaatcagtttttcagtcttttaaaataaattctgtgccataagaataaaagataaagagaaaaattaatgttaactatttttagcttattataactatgtcaacaagtgtttattaatacctattatgggaaagtcactgtggttggcattgaaaattacatcatctttaaagcagtatttgtccccagatggactcatcactagcaaagactaggttcattggaaggcatagggtgagagaatgggaagatgaagtggaggcgggttgttaaagtgctgtcagtgagtgattttgtctacttgaataatggtccatgtttgggggcatattgtgtttcataagaagtgaaaggtatttgcaaagtaagctacaaatgacccataaatctgttaacaacagtccttaatatgcaaagatgaaaaacaagcattactgctacccaaagggaactggtgcttggtgatgtgcagatggggctgttggttaagagagctattacaggttttctctcttaggtttcataggaggtagttactgagatgagattgttttatctttttgaatacagatctcttgtcttgagttagttctgaggatgggagtaataaaggagttttttgtttttttgtttgtttgtttgttttggctccttagtaatactcctctgacatttatttctattattcttcaaagaaaggaaaccaactgaaatgtttgctttaacaaacattttaataagttctctgggtttttttttccccttttaaaaaaattagcatataccatagcaataaaagaactaatgttaactattgtatgctacaacttaagtgatttttctaaagaagcacaatgtcattgaaagtattattgaaaaggatcatagtcacattgaatttgtgaaggccaaagaaattgaagggagtgatattttcattttatgatattcacatatttagtaaattttgtgtacaagaataccaggcagagtgttttacccatggaaacaggtttcagattactttatttttactgttagagtctcaagtttagaaatgctaacacttaaatcagtttttttctcactatacttgaagattgttaatattttgatatcttcctagcttgatgaatttaaacatatcttcagatctgtgacagtgacagccaataggactgataatattagcttcaaaccaataatatccagggttaaaataaaaatcatagtgaaagtacgattgtaaaattatgctatattaacttttaagtctgtaataacttgacatcaaaatgttatgtaattaccataaataatggctagcgagaacatctttggaaattctcaaattacctttcttactacactgtttgcagaatgaatgtagaaatgatcctgttagctttctgaatgttctgtggttgaatgtgtttttgcttaaataaagcttttggtatttgtttaaattacacttcttgagaagtggaaattttagg

SEQ ID NO: 2274 - protein, 681 aa, Homo sapiens; identical to SEQ ID NO: 2272

SEQ ID NO: 2275 - DNA, 3150 bp, Homo sapiens
ggttgctggcggagcccgggaggcggagaaggctgtcgttgccttggccgtcgcatccccgagggagtcgtgtcggcgccaccccggcccccgagcccgcagattgcccaccgaagctcgtgtgtgcacccccgatcccgccagccactcgcccctggcctcgcgggccgtgtctccggcatcatgtgtggtatatttgcttacttaaactaccatgttcctcgaacgagacgagaaatcctggagaccctaatcaaaggccttcagagactggagtacagaggatatgattctgctggtgtgggatttgatggaggcaatgataaagattgggaagccaatgcctgcaaaatccagcttattaagaagaaaggaaaagttaaggcactggatgaagaagttcacaagcaacaagatatggatttggatatagaatttgatgtacaccttggaatagctcatacccgttgggcaacacatggagaacccagtcctgtcaatagccacccccagcgctctgataaaaataatgaatttatcgttattcacaatggaatcatcaccaactacaaagacttgaaaaagtttttggaaagcaaaggctatgacttcgaatctgaaacagacacagagacaattgccaagctcgttaagtatatgtatgacaatcgggaaagtcaagataccagctttactaccttggtggagagagttatccaacaattggaaggtgcttttgcacttgtgtttaaaagtgttcattttcccgggcaagcagttggcacaaggcgaggtagccctctgttgattggtgtacggagtgaacataaactttctactgatcacattcctatactctacagaacaggcaaagacaagaaaggaagctgcaatctctctcgtgtggacagcacaacctgccttttcccggtggaagaaaaagcagtggagtattactttgcttctgatgcaagtgctgtcatagaacacaccaatcgcgtcatctttctggaagatgatgatgttgcagcagtagtggatggacgtctttctatccatcgaattaaacgaactgcaggagatcaccccggacgagctgtgcaaacactccagatggaactccagcagatcatgaagggcaacttcagttcatttatgcagaaggaaatatttgagcagccagagtctgtcgtgaacacaatgagaggaagagtcaactttgatgactatactgtgaatttgggtggtttgaaggatcacataaaggagatccagagatgccggcgtttgattcttattgcttgtggaacaagttaccatgctggtgtagcaacacgtcaagttcttgaggagctgactgagttgcctgtgatggtggaactagcaagtgacttcctggacagaaacacaccagtctttcgagatgatgtttgctttttccttagtcaatcaggtgagacagcagatactttgatgggtcttcgttactgtaaggagagaggagctttaactgtggggatcacaaacacagttggcagttccatatcacgggagacagattgtggagttcatattaatgctggtcctgagattggtgtggccagtacaaaggcttataccagccagtttgtatcccttgtgatgtttgcccttatgatgtgtgatgatcggatctccatgcaagaaagacgcaaagagatcatgcttggattgaaacggctgcctgatttgattaaggaagtactgagcatggatgacgaaattcagaaactagcaacagaactttatcatcagaagtcagttctgataatgggacgaggctatcattatgctacttgtcttgaaggggcactgaaaatcaaagaaattacttatatgcactctgaaggcatccttgctggtgaattgaaacatggccctctggctttggtggataaattgatgcctgtgatcatgatcatcatgagagatcacacttatgccaagtgtcagaatgctcttcagcaagtggttgctcggcaggggcggcctgtggtaatttgtgataaggaggatactgagaccattaagaacacaaaaagaacgatcaaggtgccccactcagtggactgcttgcagggcattctcagcgtgatccctttacagttgctggctttccaccttgctgtgctgagaggctatgatgttgatttcccacggaatcttgccaaatctgtgactgtagagtgaggaatatctatacaaaatgtacgaaactgtatgattaagcaacacaagacaccttttgtatttaaaaccttgatttaaaatatcaccccttgaagcctttttttagtaaatccttatttatatatcagttataattattccactcaatatgtgatttttgtgaagttacctcttacattttcccagtaatttgtggaggactttgaataatggaatctatattggaatctgtatcagaaagattctagctattattttctttaaagaatgctgggtgttgcatttctggaccctccacttcaatctgagaagacaatatgtttctaaaaattggtacttgtttcaccatacttcattcagaccagtgaaagagtagtgcatttaattggagtatctaaagccagtggcagtgtatgctcatacttggacagttagggaagggtttgccaagttttaagagaagatgtgatttattttgaaatttgtttctgttttgtttttaaatcaaactgtaaaacttaaaactgaaaaattttattggtaggatttatatctaagtttggttagccttagtttctcagacttgttgtctattatctgtaggtggaagaaatttaggaagcgaaatattacagtagtgcattggtgggtctcaatccttaacatatttgcacaattttatagcacaaactttaaattcaagctgctttggacaactgacaatatgattttaaatttgaagatgggatgtgtacatgttgggtatcctactactttgtgttttcatctcctaaaagtggtttttatttccttgtatctgtagtcttttattttttaaatgactgctgaatgacatattttatcttgttctttaaaatcacaacacagagctgctattaaattaatattgatatattcagt

SEQ ID NO: 2276 - protein, 681 aa, Homo sapiens; identical to SEQ ID NO: 2272

SEQ ID NO: 2277 - DNA, 573 bp, Homo sapiens
gtgttttgttacttctttgcttatcccgttcagttcacattgtattactgctttgatttctagttttgtttttccaaatgattgctctttttctgtgaattttcaagggttgttatgtggttgtcatttgctaatgtgatgaacaagtaattcaagcaattatcttttaagatagttatatatttggtcagtttttactattttacgtaattatttaaggggtgagtatttttcatatcatttattcctaaatgtcactgatagcatggttattggaaataagcaaaattaatctcattggtacagattttagggcctatatatgttgcttaaattactttagaaatttttttcttgaaacgaaatgctctgtatataggacataaaccatgaatttgttaattggtttttaaaaaaattaaatttcacttgacaaaaatggcagtcatggaaaataagtagccagctttataagcttctttgccagtgctgggattacaggcgtgagccgccgtgcctggcccatcagccttctgttaatatatgttggtaacttctttgttttattctttt

SEQ ID NO: 2278 - protein, 44 aa, Homo sapiens
MSLIAWLLEISKINLIGTDFRAYICCLNYFRNFFLETKCSVYRT

SEQ ID NO: 2279 - DNA, 1752 bp, Homo sapiens
acgggaaaggttccccggcctctcttggtcagggtgacgcagtagcctgcaaacctcggcgcgtaggccaccgcacttatccgcagcaggaccgcccgcagccggtagggtgggctcttcccagtgcccgcccagctaccggccagcctgcggctgcgcagatctttcgtggttctgtcagggagacccttaggcactccggactaagatggcggcgacggccaggcggggctggggagctgcggctgttgccgccgggctgcgcaggcggttctgtcatatgttgaagaatccatacaccattaagaaacagcctctgcatcagtttgtacaaagaccacttttcccactacctgcagccttttatcacccagtgagatacatgtttattcaaacacaagataccccaaatccaaacagcttaaagtttataccaggaaaaccagttcttgagacaaggaccatggattttcccaccccagctgcagcatttcgctcccctctggctaggcagttatttaggattgaaggagtaaaaagtgtcttctttggaccagatttcatcactgtcacaaaggaaaatgaagaattagactggaatttactgaaaccagatatttatgcaacaatcatggacttctttgcatctggcttacccctggttactgaggaaacaccttcaggagaagcaggatctgaagaagatgatgaagttgtggcaatgattaaggaattgttagatactagaatacggccaactgtgcaggaagatggaggggatgtaatctacaaaggctttgaagatggcattgtacagctgaaactccagggttcttgtaccagctgccctagttcaatcattactctgaaaaatggaattcagaacatgctgcagttttatattccggaggtagaaggcgtagaacaggttatggatgatgaatcagatgaaaaagaagcaaactcaccttaaaataatctggattttctttgggcataacagtcagacttgttgataatatatatcaagtttttattattaatatgctgaggaacttgaagattaataaaatatgctcttcagagaatgatatataaatattgcatgtttgctttacctcatatgagttatttataacctcttgaatcatcttctgtacacgtggattttatccaaggatatttttatttttgtccctcatttcccatggctctttctttgcatatgtgtgaaggagtttaaaatacatttccccccatctaatttatttacttttttccatacaggaagaaacagaatgctttttagaatattctaaaatagctttttgtgaaatatctaaaactatttttactgaagtttttagcttaagaaacagctaaacaagtctgttttaaaaatggtatctggctactagcccccaattaagtagcaaagaactgcttaagaccaaaaaaaagaaatcaaaaatgtccgggtatggtggctaacgcctataatcccagcactttgggaggccgaggtgggcagatcacgaggtcaggagtttgagaccagcctgaacaacatggtgaaaccccgtctccactaaaaatacaaaaattagccgggcgcggaggcacgcgcctgtaatcccagctacttaggaggctgaggcaggagaactgcttgaacccgggaggcggaggtggcagtgagctgagatcacgccactgcactccagcctgggggacggagcgagactccatctc

SEQ ID NO: 2280 - protein, 254 aa, Homo sapiens; identical to SEQ ID NO: 122

SEQ ID NO: 2281 - DNA, 764 bp, Homo sapiens
aagatggcggcgacggccaggcggggctggggagctgcggctgttgccgccgggctgcgcaggcggttctgtcatatgttgaagaatccatacaccattaagaaacagcctctgcatcagtttgtacaaagaccacttttcccactacctgcagccttttatcacccaggcagttatttaggattgaaggagtaaaaagtgtcttctttggaccagatttcatcactgtcacaaaggaaaatgaagaattagactggaatttactgaaaccagatatttatgcaacaatcatggacttctttgcatctggcttacccctggttactgaggaaacaccttcaggagaagcaggatctgaagaagatgatgaagttgtggcaatgattaaggaattgttagatactagaatacggccaactgtgcaggaagatggaggggatgtaatctacaaaggctttgaagatggcattgtacagctgaaactccagggttcttgtaccagctgccctagttcaatcattactctgaaaaatggaattcagaacatgctgcagttttatattccggaggtagaaggcgtagaacaggttatggatgatgaatcagatgaaaaagaagcaaactcaccttaaaataatctggattttctttgggcataacagtcagacttgttgataatatatatcaagtttttattattaatatgctgaggaacttgaagattaataaaatatgctcttcagagaatgatatataaatattgc

SEQ ID NO: 2282 - protein, 113 aa, Homo sapiens; identical to SEQ ID NO: 124

SEQ ID NO: 2283 - DNA, 1040 bp, Homo sapiens
gcgcagatctttcgtggttctgtcagggagacccttaggcactccggactaagatggcggcgacggccaggcggggctggggagctgcggctgttgccgccgggctgcgcaggcggtaggtgacgagcctggagctccgaataggtgtgccgctgggcttagccagcggagcggtcgccgccttgcagaccctctctcgaggcgggttctgtcatatgttgaagaatccatacaccattaagaaacagcctctgcatcagtttgtacaaagaccacttttcccactacctgcagccttttatcacccagtgagatacatgtttattcaaacacaagataccccaaatccaaacagcttaaagtttataccaggaaaaccagttcttgagacaaggaccatggattttcccaccccagctgcagcatttcgctcccctctggctaggcagttatttaggattgaaggagtaaaaagtgtcttctttggaccagatttcatcactgtcacaaaggaaaatgaagaattagactggaatttactgaaaccagatatttatgcaacaatcatggacttctttgcatctggcttacccctggttactgaggaaacaccttcaggagaagcaggatctgaagaagatgatgaagttgtggcaatgattaaggaattgttagatactagaatacggccaactgtgcaggaagatggaggggatgtaatctacaaaggctttgaagatggcattgtacagctgaaactccagggttcttgtaccagctgccctagttcaatcattactctgaaaaatggaattcagaacatgctgcagttttatattccggaggtagaaggcgtagaacaggttatggatgatgaatcagatgaaaaagaagcaaactcaccttaaaataatctggattttctttgggcataacagtcagacttgttgataatatatatcaagtttttattattaatatgctgaggaacttgaagattaataaaatatgctcttcagagaatgatatataaatattgc

SEQ ID NO: 2284 - protein, 230 aa, Homo sapiens; identical to SEQ ID NO: 128

SEQ ID NO: 2285 - DNA, 602 bp, Homo sapiens
ccttaggcactccggactaagatggcggcgacggccaggcggggctggggagctgcggctgttgccgccgggctgcgcaggcggttctgtcatatgttgaagaatccatacaccattaagaaacagcctctgcatcagtttgtacaaagaccacttttcccactacctgcagccttttatcacccaggcagttatttaggattgaaggagtaaaaagtgtcttctttggaccagatttcatcactgtcacaaaggaaaatgaagaattagactggaatttactgaaaccagatatttatgcaacaatcatggacttctttgcatctggcttacccctggttactgaggaaacaccttcaggagaagcaggatctgaagaagatgatgaagttgtggcaatgattaaggaattgttagatactagaatacggttatggatgatgaatcagatgaaaaagaagcaaactcaccttaaaataatctggattttctttgggcataacagtcagacttgttgataatatatatcaagtttttattattaatatgctgaggaacttgaagattaataaaatatgctcttcagagaatgatatataaat

SEQ ID NO: 2286 - protein, 69 aa, Homo sapiens
MDFFASGLPLVTEETPSGEAGSEEDDEVVAMIKELLDTRIRLWMMNQMKKKQTHLKIIWIFFGHNSQTC

SEQ ID NO: 2287 - DNA, 2467 bp, Homo sapiens
acgggaaaggttccccggcctctcttggtcagggtgacgcagtagcctgcaaacctcggcgcgtaggccaccgcacttatccgcagcaggaccgcccgcagccggtagggtgggctcttcccagtgcccgcccagctaccggccagcctgcggctgcgcagatctttcgtggttctgtcagggagacccttaggcactccggactaagatggcggcgacggccaggcggggctggggagctgcggctgttgccgccgggctgcgcaggcggttctgtcatatgttgaagaatccatacaccattaagaaacagcctctgcatcagtttgtacaaagaccacttttcccactacctgcagccttttatcacccagtgagatacatgtttattcaaacacaagataccccaaatccaaacagcttaaagtttataccaggaaaaccagttcttgagacaaggaccatggattttcccaccccagctgcagcatttcgctcccctctggctaggcagttatttaggattgaaggagtaaaaagtgtcttctttggaccagatttcatcactgtcacaaaggaaaatgaagaattagactggaatttactgaaaccagatatttatgcaacaatcatggacttctttgcatctggcttacccctggttactgaggaaacaccttcaggagaagcaggatctgaagaagatgatgaagttgtggcaatgattaaggaattgttagatactagaatacggccaactgtgcaggaagatggaggggatgtaatctacaaaggctttgaagatggcattgtacagctgaaactccagggttcttgtaccagctgccctagttcaatcattactctgaaaaatggaattcagaacatgctgcagttttatattccggaggtagaaggcgtagaacaggtatgccaatattatatgacagtctagattattttttttaaaaaaaaaaaccttactttgttccattatcatctatatgccttaaaaaattatgttagttgatactttggtggattgactgaggaacatttttattcaattgtccagggtagggtgatgaattggccttcagattagaaacttgaattggcatctaattgtagtaggtgtggtgaggagaaaaaaacattcttaggtttatgtaactttttccttctccaatggagttagtctgttatcttagtaatacattaactcatggaaagataatagctgttgtaacattttcctgaggcttaaaatgatcttttatctcagtaagactaaaataattagttcctaatatggtggggtttttttgttttgttttgtttttcactttccttggggattcattttaataaaaataaatgtttttaaaataacaatttggtatagcttcacagaatatatttaagtaaataagatggttttgaaaaaaagaaaaagtcatttacattagtcttatggctagagaataccagttaaattgtttttttttttttgagacggagtcttgctctatcaccaagctggagtgctctatcaccaggcactaggctcactgcaacctccacctccccagttcatgccattctcctgccttagtctcccgggtacctgggactacaggcgcccaccaccacgaccggctaattttttgtatttttagtagagacggggtttcactgtgttagccaggatggtcttgatcttctgccctcatgatctgcctgcctcagcctcccaaagtgctgggattacaggcgtgagccaccgcgcctggccccagttaattatttatagtcttttctgcccagctgagactctgctatgggtagcctctttgagacaaggagaagtgatcaatgctttaattaatttccaaatatttaatttgcttttattttattttattttttttttgagacagagtctcgctgtgttgcccacgctggagtgcagtggcgcgatctcggctcactgcaagctctgcttcccaggttcacgccatcctcctgcctcagcctcccgagtagctgggactacaggcgcccgcctggctaattttttgtattttcagtagagatggggttgcttttatgtttttaggataccgggttatgattcaaaccttgttctttggggctgttgatagatttattcttactggcttgtcatgcctcattatagagtgtatcaggtaaagaagtaatattaaaatcaggaaaacagcaaaatctaatcattttcttaattcttaaattgtctttgttttttggttttaggttatggatgatgaatcagatgaaaaagaagcaaactcaccttaaaataatctggattttctttgggcataacagtcagacttgttgataatatatatcaagtttttattattaatatgctgaggaacttgaagattaataaaatatgctcttcagagaatgatatataaat

SEQ ID NO: 2288 - protein, 248 aa, Homo sapiens
MAATARRGWGAAAVAAGLRRRFCHMLKNPYTIKKQPLHQFVQRPLFPLPAAFYHPVRYMFIQTQDTPNPNSLKFIPGKPVLETRTMDFPTPAAAFRSPLARQLFRIEGVKSVFFGPDFITVTKENEELDWNLLKPDIYATIMDFFASGLPLVTEETPSGEAGSEEDDEVVAMIKELLDTRIRPTVQEDGGDVIYKGFEDGIVQLKLQGSCTSCPSSIITLKNGIQNMLQFYIPEVEGVEQVCQYYMTV

SEQ ID NO: 2289 - DNA, 1096 bp, Homo sapiens
acgggaaaggttccccggcctctcttggtcagggtgacgcagtagcctgcaaacctcggcgcgtaggccaccgcacttatccgcagcaggaccgcccgcagccggtagggtgggctcttcccagtgcccgcccagctaccggccagcctgcggctgcgcagatctttcgtggttctgtcagggagacccttaggcactccggactaagatggcggcgacggccaggcggggctggggagctgcggctgttgccgccgggctgcgcaggcggttctgtcatatgttgaagaatccatacaccattaagaaacagcctctgcatcagtttgtacaaagaccacttttcccactacctgcagccttttatcacccagtgagatacatgtttattcaaacacaagataccccaaatccaaacagcttaaagtttataccaggaaaaccagttcttgagacaaggaccatggattttcccaccccagctgcagcatttcgctcccctctggctaggcagttatttaggattgaaggagtaaaaagtgtcttctttggaccagatttcatcactgtcacaaaggaaaatgaagaattagactggaatttactgaaaccagatatttatgcaacaatcatggacttctttgcatctggcttacccctggttactgaggaaacaccttcaggagaagcaggatctgaagaagatgatgaagttgtggcaatgattaaggaattgttagatactagaatacggccaactgtgcaggaagatggaggggatgtaatctacaaaggctttgaagatggcattgtacagctgaaactccagggttcttgtaccagctgccctagttcaatcattactctgaaaaatggaattcagaacatgctgcagttttatattccggaggtagaaggcgtagaacaggttatggatgatgaatcagatgaaaaagaagcaaactcaccttaaaataatctggattttctttgggcataacagtcagacttgttgataatatatatcaagtttttattattaatatgctgaggaacttgaagattaataaaatatgctcttcagagaatgatatat

SEQ ID NO: 2290 - protein, 254 aa, Homo sapiens; identical to SEQ ID NO: 122

SEQ ID NO: 2291 - DNA, 659 bp, Homo sapiens
ggagctgcggctgttgccgccgggctgcgcaggcggttctgtcatatgttgaagaatccatacaccattaagaaacagcctctgcatcagtttgtacaaagaccacttttcccactacctgcagccttttatcacccaggcagttatttaggattgaaggagtaaaaagtgtcttctttggaccagatttcatcactgtcacaaaggaaaatgaagaattagactggaatttactgaaaccagatatttatgcaacaatcatggacttctttgcatctggcttacccctggttactgaggaaacaccttcaggagaagcaggtaatcaattatcccagtctttcctcatgaatttataatattatacatgggtctttttctaagatgttttttgtccctgtggtctttttgccccccttcctgttttaataacatatggagttttaattataatatctctgtaacaattagtatagtatatgataatatctggaagaaaaagttcctcaattaaaaaaaactttctggtagtctgctcactttattcttccttgtaaatttaatgaccatcttgtaaagtctctaaaaaaccatgtcaagagtttggttgaagttgcattaaatttacagattaaatttgggagaattaacatttcttc

SEQ ID NO: 2292 - protein, 39 aa, Homo sapiens
MLKNPYTIKKQPLHQFVQRPLFPLPAAFYHPGSYLGLKE

SEQ ID NO: 2293 - DNA, 3176 bp, Homo sapiens
gcatgaaaaaactttgacttgtggattacattaattattagtaacagttagattctgccgacttgtattacagtagggtcttatttccttaaagagaaaaaaaaatacagtcatgccccacttaatgatgagggagacattcagagaaatgcatccttaggtgattttgtcattgtgtgaacatcacagagtgtacttaacacaaacctagatggcacggcctactacctacctaggctatatggtccagcctgttgctcctgggctacaaacctgtacagcatgttactgtactgaatactgtaggcagttgtaacacaatggtaagtatttctgtatccaaacattttagacatagaaaaggtacagtaaaaatatggtataatcttatgggaccatcatggtatatgtggtccatcattgatggaatcgtttttatgcagcacatgactgtatataatcaacaaacaactctactttcttgttttcgtttgttgtgtttttgctttacacatttgatagggaacatagaagttgtgacctttcatttcaactagagtgtatgtgtttagaggctcatgttgtatctgagttttctctggcaactaagatctctttctaaacgttctagaaagatactggtatcttactggcccattatttagtaagttttagaatacatgtacatcagtgttttcaactgcttggtggacatttcactgatgcataatcaaagtagcagattataatcatcagagtgatctgacaaggaaattctgtatttgcttccataaagaaaaataatcaaaacatatatcagatataatatatatgcagtatatcacataggaaattttattgtaggaaattagagaaggatgctactcaattcattctctagcaggaagaatacagcttaaaaatcacttgggtccctttaataaagaaaagtgtgattctgtgttgtgtgtttggaactgaaattggagaacacgtgccagtcgactgtgaaatggttgctggataaaaccacagatgtggttttatccgagaaatgtgggactgaaattattttgatgagaggtacataagagagctgcagaaaagactgtagcttctgaggaggcaggagtaccttgttaatatccaaaccacccctgagttctaatgttccaactccacctaaacgaggaattggaaactttaaatggaattatctaatttaaattcttagttttttctttgtctttctcagctgatacttgtagttttgttttgttttttaaccaccaagaacacttgcaagtttgttactgaaaacatcactaaaggaaaagaagagtttcaaaatgcttgaaaagtagtatgtggttgggaattgtttttgttcaagtccctggaagtcctcttggcttagctcccttgttcctgttcccacttcatttccttacttaacattcccctattttgagcatgtcaataagtgcatgatgaatggcacagttgaatgatcatgttaactttaattgcttcctttgttgctgtaaacagtttcttgttaagtttcagccaagtctgtgacaatctcaccaaataagaatgaaatgggcggggtgtggtggctcacacttggaatcccagcactctgggaggctgtgttgggccgatcgcttgagctcatgagttcaagaccaacctgggcaacatggcaaaaccttgtctctacaaaaaatacaaaaattagccaggcatggtggtgcacacctgtagtcccagctacttgggaggcttaggtgggaggatggcttgagcacgggaggcagaggttgcactaagccaagatcgtgtcactgcactccagcccaggcaatagagccagaccctgtctcaaaaaaacaaaacaaacaaaacatgaatgaatgaaatggctcaccttccctattatgaactagaagaaaggatgaaggaaggttggcaggaccccagccttactctgtagtgacaacccagaggtacttttcccggaatgcagggtcaagtttatgtgtgaagggactctagaatagctggtaaaaatggctacatggtaaccattcttgacttagtccagtattcccataatttgtaattccataaatttattctcagctgtcccccagccatttctaatagaaggatgtgtaccccagttttgacaatgttcttgaaatcaagttagtgttacctgcattgcattataatggaactatatgtacatgttaaagggatccgtttgattcctttcggcaaggaattgcaaaaatagtttttaccaataccagttaaaataggataggttagactttgggggcagggtgagacagtgcagccttttcactctgaaatggcaaatcagctgtactctttgagtctaccagagattcctatttgagtgtgaatggggtgtgtgtgtgtgtgtgtgtgctcattcatcttcatgctttcttccatggtgttaattcaagctctcctaataaaggtatccaaagagtactgagaagtgaccataggtatttggcatgagtaaatgtagttccttttgccaaaaaaactctcaaaagttacaactggagttcttcgcgataaaaggttggggaaatcagccatggctttagccttgttcccaagtacacatcttcttatccacaaggatgaaactctgtagggctcaccctgagggctcatgtgtggcattgagagggtagcagtgaccagaacaccacaaggcccacaagatgttttgaatgagggaacatttaatgtcatttgttaggagatagaaaccaaataataaaggacaaggaccacgctcattccgtggagaagaggtgaactccctctgctgactatttggaatggactgaatgaggaggtctctccagccagaaggagtattgaggtcatcaggcctcagaaaacaatgtacacataatctcgggctgtgaacaagagaaaggagggggggaaacatgaaagtcaatcttaacaatttttgcaatacctcttatttgcagaccattggatttatgttattgcactctcggtgtgatttatcgtatgtatctgataggttttatgaattgttttgagttgtaaactcctataccctttattaaaatggacctaattaagtgatt

SEQ ID NO: 2294 - protein, 78 aa, Homo sapiens [sequence omitted]

SEQ ID NO: 2295 - DNA, 5225 bp, Homo sapiens
atgccatcactgacctgggatgctgttaatctggactcagattctctcaccggggaagattccctgcttgattgctctctgctctctaaccctactactgaccttctggaagagtttgcccccacagcaatctctgctccagtccataaagctgcagaagatagtaatctcatctcaggttttgatgtccctgagggctcggacaaggtggctgaagatgagtttgaccctattcctgtattgataaccaaaaacccacaagatctccagagggagtccaatccctgtcctgtaataactgtagagcactttaaagaatcactgggtgttaaaggccttccgctgtatccagacccctccagagtacctggcacaaagactcagaacaacttagaatctgactacttggccagagatggcccttcaagcaacagctcattccacagcagcgaagaggaagggactgaccttgaaggagacatgctggactgcagtgggtctcggcctctccttatggagtctgaagaagaagatgagagctgcagaccccccccggggaagctgggaggagccgttccattcgctccaccagaagtctctcctgagcaagcaaagacagtgcaaggtggaagaaagaaccagtttcaagccttcacacagccagccactgatgggctcagtgagccagatgtttttgccatagctcccttcaggagctcaagggttccaaatgatgacatggacattttctccaaagccccatttgtctccaagagcagtatggctccttcccagccagaggagtcagacgtgtttttgagagctcctttcactaagaagaaaagcatggaggagttaacagttatccaatgcacctcccaggagctgcctgcacagaccggtctcctcagtcagacaggtgatgtccccctgcccgcgggccgtgagagagctgtgtacacctctgtccaagctcagtattccacagctggttttgtgcaacagtctaacctcctgtcccattctgtacaagcagcagaccatctggacagcatctctcccaggggatcctgcctggaatctgggggtcattctaatgacagaaacaaaggacctcagctccagaaagaagctgtctcaggccccatggctggcaaaccattccgcccccagtccttatccaagtattcccgtcactatagcccagaagacgagccaagtccagaagcccagcccattgctgcctacaaaattgtttcacaaaccaacaagcagtcgatagctgggtctgtttctatcacatccctttcctccaggactacggagctgccagctgctgatccatttgctctagcacccttcccttcaaaatcaggcaagaaaccctaggagcaaaacctgagcctcaagcctcttgtctctatcccaccctcaatacccgccatggcactcccagcttagccttctgaagaagaaatattatcagttcttatatttcaattccctgcgctgaggcagaattgcttgacccagggaggcagactttgcagtgagccaagattgtgtcattgcactccagcctgggcgagaagagcaaaactccgcctcaaaaaaaaaaaaaaaattgtcactggagacatgatgggtggagactctacataccttctttgaatacagaaacggatgcaaacacatgcaaattacttttttttttttttttggtgatgcatgaaaaaactttgacttgtggattacattaattattagtaacagttagattctgccgacttgtattacagtagggtcttatttccttaaagagaaaaaaaaatacagtcatgccccacttaatgatgagggagacattcagagaaatgcatccttaggtgattttgtcattgtgtgaacatcacagagtgtacttaacacaaacctagatggcacggcctactacctacctaggctatatggtccagcctgttgctcctgggctacaaacctgtacagcatgttactgtactgaatactgtaggcagttgtaacacaatggtaagtatttctgtatccaaacattttagacatagaaaaggtacagtaaaaatatggtataatcttatgggaccatcatggtatatgtggtccatcattgatggaatcgtttttatgcagcacatgactgtatataatcaacaaacaactctactttcttgttttcgtttgttgtgtttttgctttacacatttgatagggaacatagaagttgtgacctttcatttcagtggaaagcattgagccagaatatatttattcctaaaccatcgagccacacatgcattgatgaaccctgaaagaatccacagtaattgactaacaggcagtactgaatgaaagatgtcatatgtggtgaaaaatatttaatatatcagtttcttgggctcacatacagccctttagttccaagtgcttggttagattagaaaatgggatgaacacaatttgatgctgaagcagctgctgagcagcacccagggagtctaggtcatacgccctatattgttttcggcccacttattgttgagttgaaaagtctcatatttgtagactagagtgtatgtgtttagaggctcatgttgtatctgagttttctctggcaactaagatctctttctaaacgttctagaaagatactggtatcttactggcccattatttagtaagttttagaatacatgtacatcagtgttttcaactgcttggtggacatttcactgatgcataatcaaagtagcagattataatcatcagagtgatctgacaaggaaattctgtatttgcttccataaagaaaaataatcaaaacatatatcagatataatatatatgcagtatatcacataggaaattttattgtaggaaattagagaaggatgctactcaattcattctctagcaggaagaatacagcttaaaaatcacttgggtccctttaataaagaaaagtgtgattctgtgttgtgtgtttggaactgaaattggagaacacgtgccagtcgactgtgaaatggttgctggataaaaccacagatgtggttttatccgagaaatgtgggactgaaattattttgatgagaggtacataagagagctgcagaaaagactgtagcttctgaggaggcaggagtaccttgttaatatccaaaccacccctgagttctaatgttccaactccacctaaacgaggaattggaaactttaaatggaattatctaatttaaattcttagttttttctttgtctttctcagctgatacttgtagttttgttttgttttttaaccaccaagaacacttgcaagtttgttactgaaaacatcactaaaggaaaagaagagtttcaaaatgcttgaaaagtagtatgtggttgggaattgtttttgttcaagtccctggaagtcctcttggcttagctcccttgttcctgttcccacttcatttccttacttaacattcccctattttgagcatgtcaataagtgcatgatgaatggcacagttgaatgatcatgttaactttaattgcttcctttgttgctgtaaacagtttcttgttaagtttcagccaagtctgtgacaatctcaccaaataagaatgaaatgggcggggtgtggtggctcacacttggaatcccagcactctgggaggctgtgttgggccgatcgcttgagctcatgagttcaagaccaacctgggcaacatggcaaaaccttgtctctacaaaaaatacaaaaattagccaggcatggtggtgcacacctgtagtcccagctacttgggaggcttaggtgggaggatggcttgagcacgggaggcagaggttgcactaagccaagatcgtgtcactgcactccagcccaggcaatagagccagaccctgtctcaaaaaaacaaaacaaacaaaacatgaatgaatgaaatggctcaccttccctattatgaactagaagaaaggatgaaggaaggttggcaggaccccagccttactctgtagtgacaacccagaggtacttttcccggaatgcagggtcaagtttatgtgtgaagggactctagaatagctggtaaaaatggctacatggtaaccattcttgacttagtccagtattcccataatttgtaattccataaatttattctcagctgtcccccagccatttctaatagaaggatgtgtaccccagttttgacaatgttcttgaaatcaagttagtgttacctgcattgcattataatggaactatatgtacatgttaaagggatccgtttgattcctttcggcaaggaattgcaaaaatagtttttaccaataccagttaaaataggataggttagactttgggggcagggtgagacagtgcagccttttcactctgaaatggcaaatcagctgtactctttgagtctaccagagattcctatttgagtgtgaatggggtgtgtgtgtgtgtgtgtgtgctcattcatcttcatgctttcttccatggtgttaattcaagctctcctaataaaggtatccaaagagtactgagaagtgaccataggtatttggcatgagtaaatgtagttccttttgccaaaaaaactctcaaaagttacaactggagttcttcgcgataaaaggttggggaaatcagccatggctttagccttgttcccaagtacacatcttcttatccacaaggatgaaactctgtagggctcaccctgagggctcatgtgtggcattgagagggtagcagtgaccagaacaccacaaggcccacaagatgttttgaatgagggaacatttaatgtcatttgttaggagatagaaaccaaataataaaggacaaggaccacgctcattccgtggagaagaggtgaactccctctgctgactatttggaatggactgaatgaggaggtctctccagccagaaggagtattgaggtcatcaggcctcagaaaacaatgtacacataatctcgggctgtgaacaagagaaaggagggggggaaacatgaaagtcaatcttaacaatttttgcaatacctcttatttgcagaccattggatttatgttattgcactctcggtgtgatttatcgtatgtatctgataggttttatgaattgttttgagttgtaaactcctataccctttattaaaatggacctaattaagtgatt

SEQ ID NO: 2296 - protein, 462 aa, Homo sapiens
MPSLTWDAVNLDSDSLTGEDSLLDCSLLSNPTTDLLEEFAPTAISAPVHKAAEDSNLISGFDVPEGSDKVAEDEFDPIPVLITKNPQDLQRESNPCPVITVEHFKESLGVKGLPLYPDPSRVPGTKTQNNLESDYLARDGPSSNSSFHSSEEEGTDLEGDMLDCSGSRPLLMESEEEDESCRPPPGKLGGAVPFAPPEVSPEQAKTVQGGRKNQFQAFTQPATDGLSEPDVFAIAPFRSSRVPNDDMDIFSKAPFVSKSSMAPSQPEESDVFLRAPFTKKKSMEELTVIQCTSQELPAQTGLLSQTGDVPLPAGRERAVYTSVQAQYSTAGFVQQSNLLSHSVQAADHLDSISPRGSCLESGGHSNDRNKGPQLQKEAVSGPMAGKPFRPQSLSKYSRHYSPEDEPSPEAQPIAAYKIVSQTNKQSIAGSVSITSLSSRTTELPAADPFALAPFPSKSGKKP

SEQ ID NO: 2297 - DNA, 6202 bp, Homo sapiens
cggtccctcgccgcgccgccccgaggggcacttccggcggcggttcacttcctggttgggtggatggagccgggcgggagcgcgcgcgggggaggggcggcgggtcagtctccgcccggcgctcccgggatcagctggcgggcgggcgggagccgagcgcggccccggctctcgctgcagcgccgcctcttctctgcgtcgcaggccggcccggcggccgtgacaatgtcgcggggctggtagcagggcgccggccgccgagccgtctcaagtttaaacttacacgaatcgctttctggaggaggaggggacccgctgcgcgattgacacgcatattcctataggcatcctccctcagcccccacccccacggccggattcgggtggctcctctccgaggtgaaatctgagaagaaatccttggatctcttttcttaaaaaaaaaaaaaaaaaaaaaaaatctagaaaccatcggtattttgctttgctgctccctattcgcaagatgaagaagtttttcgactcccggcgagagcagggcggctctggcctgggctccggctccagcggaggagggggcagcacctcgggcctgggcagtggctacatcggaagagtcttcggcatcgggcgacagcaggtcacagtggacgaggtgttggcggaaggtggatttgctattgtatttctggtgaggacaagcaatgggatgaaatgtgccttgaaacgcatgtttgtcaacaatgagcatgatctccaggtgtgcaagagagaaatccagataatgagggatctttcagggcacaagaatattgtgggttacattgattctagtatcaacaacgtgagtagcggtgatgtatgggaagtgctcattctgatggacttttgtagaggtggccaggtggtaaacctgatgaaccagcgcctgcaaacaggctttacagagaatgaagtgctccagatattttgtgatacctgtgaagctgttgcccgcctgcatcagtgcaaaactcctattatccaccgggacctgaaggttgaaaacatcctcttgcatgaccgaggccactatgtcctgtgtgactttggaagcgccaccaacaaattccagaatccacaaactgagggagtcaatgcagtagaagatgagattaagaaatacacaacgctgtcctatcgagcaccagaaatggtcaacctgtacagtggcaaaatcatcactacgaaggcagacatttgggctcttggatgtttgttgtataaattatgctacttcactttgccatttggggaaagtcaggtggcaatttgtgatggaaacttcacaattcctgataattctcgatattctcaagacatgcactgcctaattaggtatatgttggaaccagaccctgacaaaaggccggatatttaccaggtgtcctacttctcatttaagctactcaagaaagagtgcccaattccaaatgtacagaactctcccattcctgcaaagcttcctgaaccagtgaaagccagtgaggcagctgcaaaaaagacccagccaaaggccagactgacagatcccattcccaccacagagacttcaattgcaccccgccagaggcctaaagctgggcagactcagccgaacccaggaatccttcccatccagccagcgctgacaccccggaagagggccactgttcagcccccacctcaggctgcaggatccagcaatcagcctggccttttagccagtgttccccaaccaaaaccccaagccccacccagccagcctctgccgcaaactcaggccaagcagccacaggctcctcccactccacagcagacgccttctactcaggcccagggtctgcccgctcaggcccaggccacaccccagcaccagcagcaactcttcctcaagcagcaacagcagcagcaacagccaccgccagcacagcagcagccggcaggcacgttttaccagcagcagcaggcccagactcagcagtttcaggcagtacatccagcaacccagaaaccagcaattgctcagttccctgtggtgtcccaaggaggctctcaacagcagctaatgcagaatttctaccagcagcagcagcagcagcaacaacaacagcaacagcaacagctggccacagccctgcatcaacaacagctgatgactcagcaggctgccttgcagcaaaagcccactatggcagcaggacagcagccccagccacagccagctgcagccccacagccagcccctgcccaggagccagcgattcaagccccagtaagacaacagccaaaggttcagacaaccccacctcctgccgtccaggggcagaaagttggatctctcactccaccctcatcccccaaaacccaacgtgctgggcacaggcgtattctcagtgacgtaacccacagtgcagtctttggggtccctgccagcaaatcaacccagctgctccaggcagctgcagctgaggccaaattgcttgacccagggaggcagactttgcagtgagccaagattgtgtcattgcactccagcctgggcgagaagagcaaaactccgcctcaaaaaaaaaaaaaaaattgtcactggagacatgatgggtggagactctacataccttctttgaatacagaaacggatgcaaacacatgcaaattacttttttttttttttttggtgatgcatgaaaaaactttgacttgtggattacattaattattagtaacagttagattctgccgacttgtattacagtagggtcttatttccttaaagagaaaaaaaaatacagtcatgccccacttaatgatgagggagacattcagagaaatgcatccttaggtgattttgtcattgtgtgaacatcacagagtgtacttaacacaaacctagatggcacggcctactacctacctaggctatatggtccagcctgttgctcctgggctacaaacctgtacagcatgttactgtactgaatactgtaggcagttgtaacacaatggtaagtatttctgtatccaaacattttagacatagaaaaggtacagtaaaaatatggtataatcttatgggaccatcatggtatatgtggtccatcattgatggaatcgtttttatgcagcacatgactgtatataatcaacaaacaactctactttcttgttttcgtttgttgtgtttttgctttacacatttgatagggaacatagaagttgtgacctttcatttcagtggaaagcattgagccagaatatatttattcctaaaccatcgagccacacatgcattgatgaaccctgaaagaatccacagtaattgactaacaggcagtactgaatgaaagatgtcatatgtggtgaaaaatatttaatatatcagtttcttgggctcacatacagccctttagttccaagtgcttggttagattagaaaatgggatgaacacaatttgatgctgaagcagctgctgagcagcacccagggagtctaggtcatacgccctatattgttttcggcccacttattgttgagttgaaaagtctcatatttgtagactagagtgtatgtgtttagaggctcatgttgtatctgagttttctctggcaactaagatctctttctaaacgttctagaaagatactggtatcttactggcccattatttagtaagttttagaatacatgtacatcagtgttttcaactgcttggtggacatttcactgatgcataatcaaagtagcagattataatcatcagagtgatctgacaaggaaattctgtatttgcttccataaagaaaaataatcaaaacatatatcagatataatatatatgcagtatatcacataggaaattttattgtaggaaattagagaaggatgctactcaattcattctctagcaggaagaatacagcttaaaaatcacttgggtccctttaataaagaaaagtgtgattctgtgttgtgtgtttggaactgaaattggagaacacgtgccagtcgactgtgaaatggttgctggataaaaccacagatgtggttttatccgagaaatgtgggactgaaattattttgatgagaggtacataagagagctgcagaaaagactgtagcttctgaggaggcaggagtaccttgttaatatccaaaccacccctgagttctaatgttccaactccacctaaacgaggaattggaaactttaaatggaattatctaatttaaattcttagttttttctttgtctttctcagctgatacttgtagttttgttttgttttttaaccaccaagaacacttgcaagtttgttactgaaaacatcactaaaggaaaagaagagtttcaaaatgcttgaaaagtagtatgtggttgggaattgtttttgttcaagtccctggaagtcctcttggcttagctcccttgttcctgttcccacttcatttccttacttaacattcccctattttgagcatgtcaataagtgcatgatgaatggcacagttgaatgatcatgttaactttaattgcttcctttgttgctgtaaacagtttcttgttaagtttcagccaagtctgtgacaatctcaccaaataagaatgaaatgggcggggtgtggtggctcacacttggaatcccagcactctgggaggctgtgttgggccgatcgcttgagctcatgagttcaagaccaacctgggcaacatggcaaaaccttgtctctacaaaaaatacaaaaattagccaggcatggtggtgcacacctgtagtcccagctacttgggaggcttaggtgggaggatggcttgagcacgggaggcagaggttgcactaagccaagatcgtgtcactgcactccagcccaggcaatagagccagaccctgtctcaaaaaaacaaaacaaacaaaacatgaatgaatgaaatggctcaccttccctattatgaactagaagaaaggatgaaggaaggttggcaggaccccagccttactctgtagtgacaacccagaggtacttttcccggaatgcagggtcaagtttatgtgtgaagggactctagaatagctggtaaaaatggctacatggtaaccattcttgacttagtccagtattcccataatttgtaattccataaatttattctcagctgtcccccagccatttctaatagaaggatgtgtaccccagttttgacaatgttcttgaaatcaagttagtgttacctgcattgcattataatggaactatatgtacatgttaaagggatccgtttgattcctttcggcaaggaattgcaaaaatagtttttaccaataccagttaaaataggataggttagactttgggggcagggtgagacagtgcagccttttcactctgaaatggcaaatcagctgtactctttgagtctaccagagattcctatttgagtgtgaatggggtgtgtgtgtgtgtgtgtgtgctcattcatcttcatgctttcttccatggtgttaattcaagctctcctaataaaggtatccaaagagtactgagaagtgaccataggtatttggcatgagtaaatgtagttccttttgccaaaaaaactctcaaaagttacaactggagttcttcgcgataaaaggttggggaaatcagccatggctttagccttgttcccaagtacacatcttcttatccacaaggatgaaactctgtagggctcaccctgagggctcatgtgtggcattgagagggtagcagtgaccagaacaccacaaggcccacaagatgttttgaatgagggaacatttaatgtcatttgttaggagatagaaaccaaataataaaggacaaggaccacgctcattccgtggagaagaggtgaactccctctgctgactatttggaatggactgaatgaggaggtctctccagccagaaggagtattgaggtcatcaggcctcagaaaacaatgtacacataatctcgggctgtgaacaagagaaaggagggggggaaacatgaaagtcaatcttaacaatttttgcaatacctcttatttgcagaccattggatttatgttattgcactctcggtgtgatttatcgtatgtatctgataggttttatgaattgttttgagttgtaaactcctataccctttattaaaatggacctaattaagtgatt

SEQ ID NO: 2298 - protein, 674 aa, Homo sapiens
MKKFFDSRREQGGSGLGSGSSGGGGSTSGLGSGYIGRVFGIGRQQVTVDEVLAEGGFAIVFLVRTSNGMKCALKRMFVNNEHDLQVCKREIQIMRDLSGHKNIVGYIDSSINNVSSGDVWEVLILMDFCRGGQVVNLMNQRLQTGFTENEVLQIFCDTCEAVARLHQCKTPIIHRDLKVENILLHDRGHYVLCDFGSATNKFQNPQTEGVNAVEDEIKKYTTLSYRAPEMVNLYSGKIITTKADIWALGCLLYKLCYFTLPFGESQVAICDGNFTIPDNSRYSQDMHCLIRYMLEPDPDKRPDIYQVSYFSFKLLKKECPIPNVQNSPIPAKLPEPVKASEAAAKKTQPKARLTDPIPTTETSIAPRQRPKAGQTQPNPGILPIQPALTPRKRATVQPPPQAAGSSNQPGLLASVPQPKPQAPPSQPLPQTQAKQPQAPPTPQQTPSTQAQGLPAQAQATPQHQQQLFLKQQQQQQQPPPAQQQPAGTFYQQQQAQTQQFQAVHPATQKPAIAQFPVVSQGGSQQQLMQNFYQQQQQQQQQQQQQQLATALHQQQLMTQQAALQQKPTMAAGQQPQPQPAAAPQPAPAQEPAIQAPVRQQPKVQTTPPPAVQGQKVGSLTPPSSPKTQRAGHRRILSDVTHSAVFGVPASKSTQLLQAAAAEAKLLDPGRQTLQ

SEQ ID NO: 2299 - DNA, 3174 bp, Homo sapiens
tgcaggatccagcaatcagcctggccttttagccagtgttccccaaccaaaaccccaagccccacccagccagcctctgccgcaaactcaggccaagcagccacaggctcctcccactccacagcagacgccttctactcaggcccagggtctgcccgctcaggcccaggccacaccccagcaccagcagcaactcttcctcaagcagcaacagcagcagcaacagccaccgccagcacagcagcagccggcaggcacgttttaccagcagcattccgcccccagtccttatccaagtattcccgtcactatagcccagaagacgagccaagtccagaagcccagcccattgctgcctacaaaattgtttcacaaaccaacaagcagtcgatagctgggtctgtttctatcacatccctttcctccaggactacggagctgccagctgctgatccatttgctctagcacccttcccttcaaaatcaggcaagaaaccctaggagcaaaacctgagcctcaagcctcttgtctctatcccaccctcaatacccgccatggcactcccagcttagccttctgaagaagaaatattatcagttcttatatttcaattccctgcgtcagagcagaatttcttgagtcaacaaactcagttgcagtgatatttagttgaagcccctttaagttatgttcatttttgtttgtttgtttgtttgtttatattgatttctggacttggaggcattttcatctccttcacagaggtcatccacttccaccaagaactctgctttccccccgccccacccacagaaactgtttaaatcctgaaatacttcttcaccccaatcccaaaggggccctattgttgctagttttaattcctgtagctcctgttctaagtcatgcccatcgaagaatcaagattagtccctccactaaatcaagatttagtactcttgaaaaggggagatgtctggaaagaagagcaagataaaaaccctgcacatcaacaggaagtataatcctgcagttactaataattcctgtagaagcagcagctctaggagtctccagatctgattctcagtctgtgtgcaagccaggctggctctcgtgcatgactgtctatgggtgtggaatgtacgtcagagcctgtgtagagatacaggcagatgggctaactcctcatgtctagtcatgctggcagggctttccccacatccatgcttttgaaattagtgtgagtgtacaggtttgtgtgtgcatgtatacgtgtgtgtgcacaggaagcatttccacttgagggaaatcctgccccatcatgcctacctccacaatgaaatcactcgttttttggtgtttgctcgcctaactgacttgaaccccattttatttatttagtttttttctcatggcaaagtagaatacgttggaaggtgtagggaaatcctgctggaactggtgtttcagagtaaatcttttttctctccggaatttcttgttttgctattaacaaattatatttacctgattatgaaaaattaattttccttatacattttccccttacaacactagaaaagagcaccttgttacagttccggcctctcagtatgtgggctaaatgccagcattagggaattcattaatcatgagactaggctacaaactaggcttgcttgttttggggtggttttgttgttgttgttgttgttgttgttgttgtttccaaatctctactgccttttgaggaaatgtaaatctgagacatggaaataagtgtttgggagaatggaaaagagctgaatcaggtaggcatgaaaacttttacattctctatcctctttagatgttgaaataggccagacaggttaactgatgttttttaaaattgtcttttatttctggaaagatctgacttattcctagcttttttcataccctttattattagtgccttaaaataaagctggccaggtgcagtgccacacacctgtaataccagcattttggaaggctgaggcaggaggatcagttgagcccaggaagttcaagaccaactctggcaacacagcgagaccctgtcccttcaaaaaataaataaaaaaataggctgggcatggtggctcacacctgtaatcccagcactttgggaggccaaggtgggcagatcacaaggtcaggagtttgagaccagcctggccaacatggtgaaaccccatctctactaaaaatacaaaaaattagctggacgtggtggtgcacacctgtagtcccagctactcaggaggctgaggcaggagaatcgcttgaacccgggaggcagaggttgcagtgagcagagattgcgccactgcactctggcctgggcgacagagcgagtctaaaaaataaaattaaataaaataatgaaaaaaattagctgggtatggtgacatatgcctgtagctactcaggaggctgagctggaaggatcacttgagcccaggagtttgaggctgcagtgagttgtgagtccagcctgggtgacagagtgagacactgtctccaaaaatataataataaaaataaagcctgtatctcaatgggaagatttctgctaaggcagttcaactcactggaaagaactgctgcattaggtttcaactttaatgctttctgttacttctagtaaaggttaagtgatttttccattagctgtagaagtttggagagctatttaccaagccagatcaatgatttaaaaattattggaaattcatctaagaatcaagtctgaatgcccaattctattgcggttgattaggtgtgatattctttaaagttcaggaatattggcagtaaaaaatgagcagctacttttcaatactttgtccttttttggtggtctctgcctatttcaaatgtcctgatcaaaagataaataattggcactgtgccaaggtttggttttccaactaaggtttcaactgtgccagaaacctatgtccttcactttggtggatgctaaatgttattctaagaatatgctttttcccaattctcctttctgatttttatgtattagtggatgcaaaattgtctttctagttgaatgaataatttcggctaatgcacgtggaactttgcaccccagattcttcccatggtcattatcaagtgaagccctc

SEQ ID NO: 2300 - protein, 41 aa, Homo sapiens
MPALGNSLIMRLGYKLGLLVLGWFCCCCCCCCCCFQISTAF

SEQ ID NO: 2301 - DNA, 647 bp, Homo sapiens
cttcacagaatttcctaaagaaacttctgactccctttcccttaccctttcctcttcttaatgctctgttacgaaagaaaaagctgatgttgctgttgagagtctcataccaggactggagcccccagttccccagcgcctcccatctcagacggaatctgtgacctcgaatcgcacagattctctcaccggggaagattccctgcttgattgctctctgctctctaaccctactactgaccttctggaagagtttgcccccacagcaatctctgctccagtccataaagctgcagaagatagtaatctcatctcaggttttgatgtccctgagggctcggacaaggtggctgaagatgagtttgaccctattcctgtattgataaccaaaaacccacaaggtgggcactctagaaacagcagtgggagctctgagtccagtcttcccaacctagccaggtctttactgctggtggatcagctcatagacctgtagccgtgacccagtagcagatgcagttctgtaaccttcataccgtaaaatacattttcattacggagttatgaaaaaaatgatttttttaaaaaaatctgcaaataaggggccctccagcccttttctcctaccccttgccttctcctgtaga

SEQ ID NO: 2302 - protein, 144 aa, Homo sapiens
CSVTKEKADVAVESLIPGLEPPVPQRLPSQTESVTSNRTDSLTGEDSLLDCSLLSNPTTDLLEEFAPTAISAPVHKAAEDSNLISGFDVPEGSDKVAEDEFDPIPVLITKNPQGGHSRNSSGSSESSLPNLARSLLLVDQLIDL

SEQ ID NO: 2303 - DNA, 4627 bp, Homo sapiens
cggtccctcgccgcgccgccccgaggggcacttccggcggcggttcacttcctggttgggtggatggagccgggcgggagcgcgcgcgggggaggggcggcgggtcagtctccgcccggcgctcccgggatcagctggcgggcgggcgggagccgagcgcggccccggctctcgctgcagcgccgcctcttctctgcgtcgcaggccggcccggcggccgtgacaatgtcgcggggctggtagcagggcgccggccgccgagccgtctcaagtttaaacttacacgaatcgctttctggaggaggaggggacccgctgcgcgattgacacgcatattcctataggcatcctccctcagcccccacccccacggccggattcgggtggctcctctccgaggtgaaatctgagaagaaatccttggatctcttttcttaaaaaaaaaaaaaaaaaaaaaaaatctagaaaccatcggtattttgctttgctgctccctattcgcaagatgaagaagtttttcgactcccggcgagagcagggcggctctggcctgggctccggctccagcggaggagggggcagcacctcgggcctgggcagtggctacatcggaagagtcttcggcatcgggcgacagcaggtcacagtggacgaggtgttggcggaaggtggatttgctattgtatttctggtgaggacaagcaatgggatgaaatgtgccttgaaacgcatgtttgtcaacaatgagcatgatctccaggtgtgcaagagagaaatccagataatgagggatctttcagggcacaagaatattgtgggttacattgattctagtatcaacaacgtgagtagcggtgatgtatgggaagtgctcattctgatggacttttgtagaggtggccaggtggtaaacctgatgaaccagcgcctgcaaacaggctttacagagaatgaagtgctccagatattttgtgatacctgtgaagctgttgcccgcctgcatcagtgcaaaactcctattatccaccgggacctgaaggttgaaaacatcctcttgcatgaccgaggccactatgtcctgtgtgactttggaagcgccaccaacaaattccagaatccacaaactgagggagtcaatgcagtagaagatgagattaagaaatacacaacgctgtcctatcgagcaccagaaatggtcaacctgtacagtggcaaaatcatcactacgaaggcagacatttgggctcttggatgtttgttgtataaattatgctacttcactttgccatttggggaaagtcaggtggcaatttgtgatggaaacttcacaattcctgataattctcgatattctcaagacatgcactgcctaattaggtatatgttggaaccagaccctgacaaaaggccggatatttaccaggtgtcctacttctcatttaagctactcaagaaagagtgcccaattccaaatgtacagaactctcccattcctgcaaagcttcctgaaccagtgaaagccagtgaggcagctgcaaaaaagacccagccaaaggccagactgacagatcccattcccaccacagagacttcaattgcaccccgccagaggcctaaagctgggcagactcagccgaacccaggaatccttcccatccagccagcgctgacaccccggaagagggccactgttcagcccccacctcaggctgcaggatccagcaatcagcctggccttttagccagtgttccccaaccaaaaccccaagccccacccagccagcctctgccgcaaactcaggccaagcagccacaggctcctcccactccacagcagacgccttctactcaggcccagggtctgcccgctcaggcccaggccacaccccagcaccagcagcaactcttcctcaagcagcaacagcagcagcaacagccaccgccagcacagcagcagccggcaggcacgttttaccagcagcagcaggcccagactcagcagtttcaggcagtacatccagcaacccagaaaccagcaattgctcagttccctgtggtgtcccaaggaggctctcaacagcagctaatgcagaatttctaccagcagcagcagcagcagcaacaacaacagcaacagcaacagctggccacagccctgcatcaacaacagctgatgactcagcaggctgccttgcagcaaaagcccactatggcagcaggacagcagccccagccacagccagctgcagccccacagccagcccctgcccaggagccagcgattcaagccccagtaagacaacagccaaaggttcagacaaccccacctcctgccgtccaggggcagaaagttggatctctcactccaccctcatcccccaaaacccaacgtgctgggcacaggcgtattctcagtgacgtaacccacagtgcagtctttggggtccctgccagcaaatcaacccagctgctccaggcagctgcagctgaggccagtctcaataagtccaagtctgcaaccaccactccatcaggctctcctcggacctctcaacaaaacgtttataatccttcagaagggtctacgtggaatccctttgatgacgataatttctccaaactcacagctgaagaactgctaaacaaggactttgccaagcttggggaaggcaaacatcccgagaagcttggaggctcagctgagagtttgatcccaggctttcaatcaacccaaggtgatgcttttgctacgacctcattttctgctggaactgctgaaaaaaggaagggtgggcagactgtggactctggcctcccgcttctaagcgtgtctgatcctttcattcctcttcaagtacctgatgcaccagaaaaactaattgagggactcaaatctcctgacacttctcttctgctccctgacctcttgcctatgacagatccttttggtagcacttctgatgctgtaattggtaaagtcatcatctctgtttcttcagtcatgcatgatatgtgtgcctgtttcaagaatgacaagtacctagttaaccaatccctggggaatagccctgccaccccagaagccaaggctatttaatctcacttgtatcactccaaatgaagtgttttccttgcttttcgggggtacaacgtctattttttgcctttcttgatatctggagatttctagagtggatctcttatgaatgaggaggaatgtggaaagtttcacatttagttagaagaactttaaaaaattggtttctaactagactacctttactgaacttaatgaaatttagcagattcttcttttttttttttttgtttgagacagagtttcactcttgttgcctaggctggagtgcaatggcaagatctcagctcactgcaacctccatctcccgggttcaagcaattctcctgcctcagcctcccgagtagctgagattacaggcatgcaccaccatgcctggctaatttttatatttttagtagagatagggtttctccatgttggtcaggctggtctcgaactcctgacctcaggtgatccacctgccttggcctcccaaagtgctgggattacaggggtgagccaccatgcccagcccagattcttctttagaaggcccatgtacatccagctgcagtgggacgagcctgggaagcataggaagaccccatccctacaaaaaaaatgttgttagttagccaggtgtgggggtgcacacctgtgctaccagctctttgggaggctgagacggaagatcactttgagccagggggtttgaggctgcagtgagccctgatcatgccactgccctccagcttaagtgacagagacccatcttaaacaaaattaaaaaatttaaaaaggtccatgtatataccaagtatcagtaactgagaaaacattttgcccactggttaagccccataaatagaatccagggcaggggcttggtctgcttcctctctcacattttcctatgttccaacagcaaggcaggcaagatttgcaaaatgtccaaggcccctgtactccaggagggtccaatcatgaggcacctaataatgcctttgggcagaaagtcctagaactcagaagtgccatgaccttgcataggggtaggcctgcagctgaggggtgtcacgtggtgcaaaaggcctcccagctacatcctgggatggggtttgagatggattaatggcctttgcatggcacagaggatgtttgcccccaggtttatcccttaataaaagtgaaattaccagaaaaaattaaggtgcctttcagcccatctcttctgacatggaagaggtttgctgagcggcttatgttctgaatttgtttatgagaactgatcattagtgagactggccacagtatttaaccttgcacatgcatgctcagtgaagcctagacattcagagcagcagaaataaagtaacttatttttctttccaccttgcctgagactggcattttagagacctgttaaaagaaagtcttcacatggctgggtgcagtggctcacacttgtaaccacaggactttgggaggccaaggtgggatagatcgcttgagctcaggagcaagacaccatctcaaaaaatgagaatt

SEQ ID NO: 2304 - protein, 863 aa, Homo sapiens; identical to SEQ ID NO: 132

SEQ ID NO: 2305 - DNA, 420 bp, Homo sapiens
acaactggtgagcactgaggagcctagggccgcggtactgtgctggagtcggtgatctcaggctacagtttatataagacatcaccactgggggaagctggttgaagggttcacaggactgtatgtgcaggaacttcttgtggttctgtattacttcaaaataaaacgttttttaaaaacccactttatagaaacaaaatgaggcttttttttttctagaaagacagctgacaaacaaaatgagattttaattaacgaacaaactgaatactgaaatgcaaagtaaagaatgattatgtatggctgggcacggtggctcacgcctgtaatcccagcactttgggaggctgagttgggtggatcgcctgaggccaggagtttgagatgagactgggtaacatacagggacgccattttttc

SEQ ID NO: 2306 - protein, 32 aa, Homo sapiens
MIMYGWARWLTPVIPALWEAELGGSPEARSLR

SEQ ID NO: 2307 - DNA, 408 bp, Homo sapiens
cgctggctcctgggcaggggctggctgtggggctgcagctggctgtggctggggctgctgtcctgctgccatagtgggcttttgctgcaaggcagcctgctgagtcatcagctgttgttgatgcagggctgtggccagctgttgctgttgctgttgttgttgctgtgctgtgctggcggtggctgttgctgctgctgttgctgcttgaggaagagttgctgctggtgctggggtgtggcctgggcctgagcgggcagaccctgggcctgagtagaaggcgtctgctgtggagtgggaggagcctgtggctgcttggcctgagtttgcggcagaggctggctgggtggggcttggggttttggttggggaacactggctaaaaggccaggctgattgctggatcctgca

SEQ ID NO: 2308 - protein, 42 aa, Homo sapiens
MQGCGQLLLLLLLLLCCAGGGCCCCCCCLRKSCCWCWGVAWA

SEQ ID NO: 2309 - DNA, 1201 bp, Homo sapiens
agtgggcatccttgtcttgttccagttcttaggggaaaggctttcatcttttccccattcagtatgatgttagctgtgggtttgtcctatatggcctttagtatgttgaggtatgttccttctatgcctagtttgttgggaattcttaccatgaaggacacacccagatccctttattccagaacacataacttaaagtcacactttcctgagatcagagcagaggatggcagagaaccaaagtcacgagtgtgtgaaacaacggagaggagcggcgctgtgcagcctggagctcaagacacttgcatgagcgcctaggggagacaaccatctcagtaatgatcctaattggatccaactggggaactccagaaagtttcagtaacaaatttgcaatggttctgggccttttaatatggattcacaaaagataatgaggttatcctgtcatttctaccctatggatgaggaaagtgacattcagacaggccatgggatctacccactccctcgtaaagaactggaggaccaacattagcaacaggacctcccatttggcattttgttttcagatgtgcctagaagaaggagattacagcttcttggactgttgaagcctgggttcttcttgagttgtgaagatatcacctaaatcctatccacattttgtgcaccaggtttgtggacgcctaccaccattcattcattgcagtggctcagagaagatgaaaacaggactctttggggccaatgaagatccccaacagagctcagatgaccagagtggactggcttctaccctaaatacatacaacaatacttcccactctgaccttgctcactttatacaacaccacacaactagagagtggcagagctgctgtgggaacccaaatgccatctgactccaaagccttactctcaaccaccaccctgctgcctcctattctttcctgaaatcttcagtatagtcattattatgaagtaaaaaaaaaaagaaaatgaaaggatggaaggaaggtagagggagcccctctatctccattctttgtttccatgaagaacctctactccattttcaggggagtgctattggtgtaacacactttctggccctctccctcccattcttgtcactcattctccccaaggaagaagcgatatgtggatgataagattggaagaagccactcttatgttc

SEQ ID NO: 2310 - protein, 84 aa, Homo sapiens
MMLAVGLSYMAFSMLRYVPSMPSLLGILTMKDTPRSLYSRTHNLKSHFPEIRAEDGREPKSRVCETTERSGAVQPGAQDTCMSA

SEQ ID NO: 2311 - DNA, 420 bp, Homo sapiens
ttcccccattctttctttttgtgaaaggcaaaactcctcaaagtcctaaactgttaagagagttaggtgccccaagaggagacgggagagcggtgatgccttcagggcagcagcagaagcaatggaaggatggatgaggaaccccacaaaggggagagaactctggagtctgtgaagagcggggagctgagacccaactcgttatgttacgggttgtgtgttgctggatccggcagagacagccttgatgtgtcacccaagctggagtgcagtggtgccatagctcactgtagcctccaactcctgggctcaagagatcctcccgcctcagcctcctgggcagctgggactataagcatgcttcaccacatccgacatttttaattttttaagtttaaaataaaaatgtgatgttttgta

SEQ ID NO: 2312 - protein, 84 aa, Homo sapiens
MDEEPHKGERTLESVKSGELRPNSLCYGLCVAGSGRDSLDVSPKLECSGAIAHCSLQLLGSRDPPASASWAAGTISMLHHIRHF

SEQ ID NO: 2313 - DNA, 1343 bp, Homo sapiens
gcgcggccgtcccggcccggggccccaggtgcgcttcccctagagagggattttccggtctcgtgggcagaggaacaaccaggaacttgggctcagtctccaccccacagtggggcggatccgtcccggataagacccgctgtctggccctgagtagggtgtgacctccgcagccgcagaggaggagcgcagcccggcctcgaagaacttctgcttgggtggctgaactctgatcttgacctagagtcatggccatggcaaccaaaggaggtactgtcaaagctgcttcaggattcaatgccatggaagatgcccagaccctgaggaaggccatgaaagggctcggcaccgatgaagacgccattattagcgtccttgcctaccgcaacaccgcccagcgccaggagatcaggacagcctacaagagcaccatcggcagggacttgatagacgacctgaagtcagaactgagtggcaacttcgagcaggtgattgtggggatgatgacgcccacggtgctgtatgacgtgcaagagctgcgaagggccatgaagggagccggcactgatgagggctgcctaattgagatcctggcctcccggacccctgaggagatccggcgcataagccaaacctaccagcagcaatatggacggagccttgaagatgacattcgctctgacacatcgttcatgttccagcgagtgctggtgtctctgtcagctggtgggagggatgaaggaaattatctggacgatgctctcgtgagacaggatgcccaggacctgtatgaggctggagagaagaaatgggggacagatgaggtgaaatttctaactgttctctgttcccggaaccgaaatcacctgttgcatgtgtttgatgaatacaaaaggatatcacagaaggatattgaacagagtattaaatctgaaacatctggtagctttgaagatgctctgctggctatagtaaagtgcatgaggaacaaatctgcatattttgctgaaaagctctataaatcgatgaagggcttgggcaccgatgataacaccctcatcagagtgatggtttctcgagcagaaattgacatgttggatatccgggcacacttcaagagactctatggaaagtctctgtactcgttcatcaagggtgacacatctggagactacaggaaagtactgcttgttctctgtggaggagatgattaaaataaaaatcccagaaggacaggaggattctcaacactttgaatttttttaacttcatttttctacactgctattatcattatctcagaatgcttatttccaattaaaacgcctacagctgcctcctag

SEQ ID NO: 2314 - protein, 321 aa, Homo sapiens; identical to SEQ ID NO: 134

SEQ ID NO: 2315 - DNA, 1415 bp, Homo sapiens
gcgcggccgtcccggcccggggccccaggtgcgcttcccctagagagggattttccggtctcgtgggcagaggaacaaccaggaacttgggctcagtctccaccccacagtggggcggatccgtcccggataagacccgctgtctggccctgagtagggtgtgacctccgcagccgcagaggaggagcgcagcccggcctcgaagaacttctgcttgggtggctgaactctgatcttgacctagagtcatggccatggcaaccaaaggaggtactgtcaaagctgcttcaggattcaatgccatggaagatgcccagaccctgaggaaggccatgaaagggctcggcaccgatgaagacgccattattagcgtccttgcctaccgcaacaccgcccagcgccaggagatcaggacagcctacaagagcaccatcggcagggacttgatagacgacctgaagtcagaactgagtggcaacttcgagcagggagccggcactgatgagggctgcctaattgagatcctggcctcccggacccctgaggagatccggcgcataagccaaacctaccagcagcaatatggacggagccttgaagatgacattcgctctgacacatcgttcatgttccagcgagtgctggtgtctctgtcagctggtgggagggatgaaggaaattatctggacgatgctctcgtgagacaggatgcccaggacctgtatgaggctggagagaagaaatgggggacagatgaggtgaaatttctaactgttctctgttcccggaaccgaaatcacctgttgcatgtgtttgatgaatacaaaaggatatcacagaaggatattgaacagagtattaaatctgaaacatctggtagctttgaagatgctctgctggctatagtaaagtgcatgaggaacaaatctgcatattttgctgaaaagctctataaatcgatgaagggcttgggcaccgatgataacaccctcatcagagtgatggtttctcgagcagaaattgacatgttggatatccgggcacacttcaagagactctatggaaagtctctgtactcgttcatcaagggtgacacatctggagactacaggaaagtactgcttgttctctgtggaggagatgattaaaataaaaatcccagaaggacaggaggattctcaacactttgaatttttttaacttcatttttctacactgctattatcattatctcagaatgcttatttccaattaaaacgcctacagctgcctcctagaatatagactgtctgtattattattcacctataattagtcattatgatgctttaaagctgtacttgcatttcaaagcttataagatataaatggagattttaaagtagaaataaatatgtattccatgtttttaaaag

SEQ ID NO: 2316 - protein, 299 aa, Homo sapiens
MAMATKGGTVKAASGFNAMEDAQTLRKAMKGLGTDEDAIISVLAYRNTAQRQEIRTAYKSTIGRDLIDDLKSELSGNFEQGAGTDEGCLIEILASRTPEEIRRISQTYQQQYGRSLEDDIRSDTSFMFQRVLVSLSAGGRDEGNYLDDALVRQDAQDLYEAGEKKWGTDEVKFLTVLCSRNRNHLLHVFDEYKRISQKDIEQSIKSETSGSFEDALLAIVKCMRNKSAYFAEKLYKSMKGLGTDDNTLIRVMVSRAEIDMLDIRAHFKRLYGKSLYSFIKGDTSGDYRKVLLVLCGGDD

SEQ ID NO: 2317 - DNA, 1481 bp, Homo sapiens
gcgcggccgtcccggcccggggccccaggtgcgcttcccctagagagggattttccggtctcgtgggcagaggaacaaccaggaacttgggctcagtctccaccccacagtggggcggatccgtcccggataagacccgctgtctggccctgagtagggtgtgacctccgcagccgcagaggaggagcgcagcccggcctcgaagaacttctgcttgggtggctgaactctgatcttgacctagagtcatggccatggcaaccaaaggaggtactgtcaaagctgcttcaggattcaatgccatggaagatgcccagaccctgaggaaggccatgaaagggctcggcaccgatgaagacgccattattagcgtccttgcctaccgcaacaccgcccagcgccaggagatcaggacagcctacaagagcaccatcggcagggacttgatagacgacctgaagtcagaactgagtggcaacttcgagcaggtgattgtggggatgatgacgcccacggtgctgtatgacgtgcaagagctgcgaagggccatgaagggagccggcactgatgagggctgcctaattgagatcctggcctcccggacccctgaggagatccggcgcataagccaaacctaccagcagcaatatggacggagccttgaagatgacattcgctctgacacatcgttcatgttccagcgagtgctggtgtctctgtcagctggtgggagggatgaaggaaattatctggacgatgctctcgtgagacaggatgcccaggacctgtatgaggctggagagaagaaatgggggacagatgaggtgaaatttctaactgttctctgttcccggaaccgaaatcacctgttgcatgtgtttgatgaatacaaaaggatatcacagaaggatattgaacagagtattaaatctgaaacatctggtagctttgaagatgctctgctggctatagtaaagtgcatgaggaacaaatctgcatattttgctgaaaagctctataaatcgatgaagggcttgggcaccgatgataacaccctcatcagagtgatggtttctcgagcagaaattgacatgttggatatccgggcacacttcaagagactctatggaaagtctctgtactcgttcatcaagggtgacacatctggagactacaggaaagtactgcttgttctctgtggaggagatgattaaaataaaaatcccagaaggacaggaggattctcaacactttgaatttttttaacttcatttttctacactgctattatcattatctcagaatgcttatttccaattaaaacgcctacagctgcctcctagaatatagactgtctgtattattattcacctataattagtcattatgatgctttaaagctgtacttgcatttcaaagcttataagatataaatggagattttaaagtagaaataaatatgtattccatgtttttaaaag

SEQ ID NO: 2318 - protein, 321 aa, Homo sapiens; identical to SEQ ID NO: 134

SEQ ID NO: 2319 - DNA, 2168 bp, Homo sapiens
gcgcggccgtcccggcccggggccccaggtgcgcttcccctagagagggattttccggtctcgtgggcagaggaacaaccaggaacttgggctcagtctccaccccacagtggggcggatccgtcccggataagacccgctgtctggccctgagtagggtgtgacctccgcagccgcagaggaggagcgcagcccggcctcgaagaacttctgcttgggtggctgaactctgatcttgacctagagtcatggccatggcaaccaaaggaggtactgtcaaagctgcttcaggattcaatgccatggaagatgcccagaccctgaggaaggccatgaaagggctcggcaccgatgaagacgccattattagcgtccttgcctaccgcaacaccgcccagcgccaggagatcaggacagcctacaagagcaccatcggcagggacttgatagacgacctgaagtcagaactgagtggcaacttcgagcaggtgattgtggggatgatgacgcccacggtgctgtatgacgtgcaagagctgcgaagggccatgaagggagccggcactgatgagggctgcctaattgagatcctggcctcccggacccctgaggagatccggcgcataagccaaacctaccagcagcaatatggacggagccttgaagatgacattcgctctgacacatcgttcatgttccagcgagtgctggtgtctctgtcagctggtgggagggatgaaggaaattatctggacgatgctctcgtgagacaggatgcccaggacctgtatgaggctggagagaagaaatgggggacagatgaggtgaaatttctaactgttctctgttcccggaaccgaaatcacctgttgcatgtgtttgatgaatacaaaaggatatcacagaaggatattgaacagagtattaaatctgaaacatctggtagctttgaagatgctctgctggctatagtaaagtgcatgaggaacaaatctgcatattttgctgaaaagctctataaatcgatgaagggcttgggcaccgatgataacaccctcatcagagtgatggtttctcgagcagaaattgacatgttggatatccgggcacacttcaagagactctatggaaagtctctgtactcgttcatcaagggtgacacatctggagactacaggaaagtactgcttgttctctgtggaggagatgattaaaataaaaatcccagaaggacaggaggattctcaacactttgaatttttttaacttcatttttctacactgctattatcattatctcagaatgcttatttccaattaaaacgcctacagctgcctcctagaatatagactgtctgtattattattcacctataattagtcattatgatgctttaaagctgtacttgcatttcaaagcttataagatataaatggagattttaaagtagaaataaatatgtattccatgtttttaaaagattactttctactttgtgtttcacagacattgaatatattaaattattccatattttcttttcagtgaaaaattttttaaatggaagactgttctaaaatcacttttttccctaatccaatttttagagtggctagtagtttcttcatttgaaattgtaagcatccggtcagtaagaatgcccatccagttttctatatttcatagtcaaagccttgaaagcatctacaaatctctttttttaggttttgtccatagcatcagttgatccttactaagtttttcatgggagacttccttcatcacatcttatgttgaaatcactttctgtagtcaaagtataccaaaaccaatttatctgaactaaattctaaagtatggttatacaaaccatatacatctggttaccaaacataaatgctgaacattccatattattatagttaatgtcttaatccagcttgcaagtgaatggaaaaaaaaataagcttcaaactaggtattctgggaatgatgtaatgctctgaatttagtatgatataaagaaaacttttttgtgctaaaaatactttttaaaatcaattttgttgattgtagtaatttctatttgcactgtgcctttcaactccagaaacattctgaagatgtacttggatttaattaaaaagttcactttgtaagaacgtgg

SEQ ID NO: 2320 - protein, 321 aa, Homo sapiens; identical to SEQ ID NO: 134

SEQ ID NO: 2321 - DNA, 2104 bp, Homo sapiens
cccacagtggggcggatccgtcccggataagacccgctgtctggccctgagtagggtgtgacctccgcagccgcagaggaggagcgcagcccggcctcgaatcttgaatgagaaactgggagcggctgctgcatcagaaataaagaacttctgcttgggtggctgaactctgatcttgacctagagtcatggccatggcaaccaaaggaggtactgtcaaagctgcttcaggattcaatgccatggaagatgcccagaccctgaggaaggccatgaaagggctcggcaccgatgaagacgccattattagcgtccttgcctaccgcaacaccgcccagcgccaggagatcaggacagcctacaagagcaccatcggcagggacttgatagacgacctgaagtcagaactgagtggcaacttcgagcaggtgattgtggggatgatgacgcccacggtgctgtatgacgtgcaagagctgcgaagggccatgaagggagccggcactgatgagggctgcctaattgagatcctggcctcccggacccctgaggagatccggcgcataagccaaacctaccagcagcaatatggacggagccttgaagatgacattcgctctgacacatcgttcatgttccagcgagtgctggtgtctctgtcagctggtgggagggatgaaggaaattatctggacgatgctctcgtgagacaggatgcccaggacctgtatgaggctggagagaagaaatgggggacagatgaggtgaaatttctaactgttctctgttcccggaaccgaaatcacctgttgcatgtgtttgatgaatacaaaaggatatcacagaaggatattgaacagagtattaaatctgaaacatctggtagctttgaagatgctctgctggctatagtaaagtgcatgaggaacaaatctgcatattttgctgaaaagctctataaatcgatgaagggcttgggcaccgatgataacaccctcatcagagtgatggtttctcgagcagaaattgacatgttggatatccgggcacacttcaagagactctatggaaagtctctgtactcgttcatcaagggtgacacatctggagactacaggaaagtactgcttgttctctgtggaggagatgattaaaataaaaatcccagaaggacaggaggattctcaacactttgaatttttttaacttcatttttctacactgctattatcattatctcagaatgcttatttccaattaaaacgcctacagctgcctcctagaatatagactgtctgtattattattcacctataattagtcattatgatgctttaaagctgtacttgcatttcaaagcttataagatataaatggagattttaaagtagaaataaatatgtattccatgtttttaaaagattactttctactttgtgtttcacagacattgaatatattaaattattccatattttcttttcagtgaaaaattttttaaatggaagactgttctaaaatcacttttttccctaatccaatttttagagtggctagtagtttcttcatttgaaattgtaagcatccggtcagtaagaatgcccatccagttttctatatttcatagtcaaagccttgaaagcatctacaaatctctttttttaggttttgtccatagcatcagttgatccttactaagtttttcatgggagacttccttcatcacatcttatgttgaaatcactttctgtagtcaaagtataccaaaaccaatttatctgaactaaattctaaagtatggttatacaaaccatatacatctggttaccaaacataaatgctgaacattccatattattatagttaatgtcttaatccagcttgcaagtgaatggaaaaaaaaataagcttcaaactaggtattctgggaatgatgtaatgctctgaatttagtatgatataaagaaaacttttttgtgctaaaaatactttttaaaatcaattttgttgattgtagtaatttctatttgcactgtgcctttcaactccagaaacattctgaagatgtacttggatttaattaaaaagttcactttgtaagaac

SEQ ID NO: 2322 - protein, 321 aa, Homo sapiens; identical to SEQ ID NO: 134

SEQ ID NO: 2323 - DNA, 220 bp, Homo sapiens
caggcggatcacttgaggtcagaagtttgagaccagcctagccaacatggtaaaaccccgtctcttaccaaagagccatagcaattaatgccagtcctatggcttcgggggcagccagttcaattaatcagcaggcatttcttgcaggcccgctatgtgcaaggcactgctaaaatttagaaacaggaaagtagaggcccaggatgagaatttggagagg

SEQ ID NO: 2324 - protein, 30 aa, Homo sapiens
MPVLWLRGQPVQLISRHFLQARYVQGTAKI

SEQ ID NO: 2325 - DNA, 815 bp, Homo sapiens
gtttcaccatgttcgccaggctggtcttgaactcctggcctcaagtgatctgcccatcttggccccagcactttgggaggctgaggcaggaagattggttgaggccagaagcttgagaccagcctgctgggcaacatagggagactctacctctgcaaaaaaattttgaaaattagccggaagtggtggcacatgcctgtagtcccagctactcaacaggctgagatgggaggattgtttgagcccagaagttccaggctgcagtgagctatgactgtgctactgcactccagcttgggtgacagagtgagaccctgtttcttaaaaaaataaaaatgataaggcaagttaataataataaggttcaattttacgcctaaatattaaattaagaataaataaattgagcaagcaagctaacttatgggtggttgggctttggatatccttataaattttgaggacaactagaaatgttcataattatcagatatcacaaggaataagccaacagaagtaagtatctacaaggctaattgtaaagattataggccaggcacagtggctcatgcctgtaatcccagcactttgggaggctgagcctcgcagatcacctgaagtcagtagttcaagacccgtcttggcaacatggtgaaaccccatttctactaaaagtgttctaaaaattagttgggtatggtgacgcatgcctgtaatcccagctactcaggaggctggggcaagagaatcccttgaacacgggaggcggaggtttcagtgagccaagatagcaccactgcactccagcgacagag

SEQ ID NO: 2326 - protein, 35 aa, Homo sapiens [sequence omitted]

SEQ ID NO: 2327 - DNA, 570 bp, Homo sapiens
actttgttctggggcctcccgcgccccgaagtcatcaagttccagctctgtgggcaactcctcctccccttggatcagccattccctctctgggccagggcagggttctgtccccacatctttccaaaattcaagctgattccggcagaagagcacaaaaacagaactgtaaaattcttccacagtggatttctgattcacgtgaggaacttactatttctgatgcagcagccgctcccagtttctcattcaagattctcgtgaaggcacagggaagaaaagggagaaactcatgacacaatggaaaagactaggatggtcatgagataatgttagaagctgagaggaagtgaaacggacttacggcagatggagctggatgaagaacagcatcttgctctgtcacagacggggtctcaccatgttgtccaggctggtcttgaactcctgggctcaagcgatcctaccacctcagactcccaaagtgctgggattacaggcgtgagccactgcacccagctacgttttaagatttaaaacaaaggcacgttactgatgtacaattgagtg

SEQ ID NO: 2328 - protein, 55 aa, Homo sapiens
MELDEEQHLALSQTGSHHVVQAGLELLGSSDPTTSDSQSAGITGVSHCTQLRFKI

SEQ ID NO: 2329 - DNA, 2100 bp, Homo sapiens
tcaaagggggaacctcttctgatctgctgtaacattcagttcagaatctgtgtccagcttgagtacaagtattggtacttaacctaacaaaacaataggaatcctttctgtagtgtgtatctccaaacagaagaacagaagaacttctgcttgggtggctgaactctgatcttgacctagagtcatggccatggcaaccaaaggaggtactgtcaaagctgcttcaggattcaatgccatggaagatgcccagaccctgaggaaggccatgaaagggctcggcaccgatgaagacgccattattagcgtccttgcctaccgcaacaccgcccagcgccaggagatcaggacagcctacaagagcaccatcggcagggacttgatagacgacctgaagtcagaactgagtggcaacttcgagcaggtgattgtggggatgatgacgcccacggtgctgtatgacgtgcaagagctgcgaagggccatgaagggagccggcactgatgagggctgcctaattgagatcctggcctcccggacccctgaggagatccggcgcataagccaaacctaccagcagcaatatggacggagccttgaagatgacattcgctctgacacatcgttcatgttccagcgagtgctggtgtctctgtcagctggtgggagggatgaaggaaattatctggacgatgctctcgtgagacaggatgcccaggacctgtatgaggctggagagaagaaatgggggacagatgaggtgaaatttctaactgttctctgttcccggaaccgaaatcacctgttgcatgtgtttgatgaatacaaaaggatatcacagaaggatattgaacagagtattaaatctgaaacatctggtagctttgaagatgctctgctggctatagtaaagtgcatgaggaacaaatctgcatattttgctgaaaagctctataaatcgatgaagggcttgggcaccgatgataacaccctcatcagagtgatggtttctcgagcagaaattgacatgttggatatccgggcacacttcaagagactctatggaaagtctctgtactcgttcatcaagggtgacacatctggagactacaggaaagtactgcttgttctctgtggaggagatgattaaaataaaaatcccagaaggacaggaggattctcaacactttgaatttttttaacttcatttttctacactgctattatcattatctcagaatgcttatttccaattaaaacgcctacagctgcctcctagaatatagactgtctgtattattattcacctataattagtcattatgatgctttaaagctgtacttgcatttcaaagcttataagatataaatggagattttaaagtagaaataaatatgtattccatgtttttaaaagattactttctactttgtgtttcacagacattgaatatattaaattattccatattttcttttcagtgaaaaattttttaaatggaagactgttctaaaatcacttttttccctaatccaatttttagagtggctagtagtttcttcatttgaaattgtaagcatccggtcagtaagaatgcccatccagttttctatatttcatagtcaaagccttgaaagcatctacaaatctctttttttaggttttgtccatagcatcagttgatccttactaagtttttcatgggagacttccttcatcacatcttatgttgaaatcactttctgtagtcaaagtataccaaaaccaatttatctgaactaaattctaaagtatggttatacaaaccatatacatctggttaccaaacataaatgctgaacattccatattattatagttaatgtcttaatccagcttgcaagtgaatggaaaaaaaaataagcttcaaactaggtattctgggaatgatgtaatgctctgaatttagtatgatataaagaaaacttttttgtgctaaaaatactttttaaaatcaattttgttgattgtagtaatttctatttgcactgtgcctttcaactccagaaacattctgaagatgtacttggatttaattaaaaagttcactttgtaagaac

SEQ ID NO: 2330 - protein, 321 aa, Homo sapiens; identical to SEQ ID NO: 134

SEQ ID NO: 2331 - DNA, 517 bp, Homo sapiens
agccaaacctaccagcagcgtacgtgacatccgcagtggccctggctgaggtttcgctgtgattagagaatgagggtagcagcgggttgttgtttgctgattagacttttcacagaacgctgagcatgagggatcctcggtgccaagctctgcttcgagggagatccctgtttagccaaatggcggtctgttggctccttaagatttctcagaatatggacggagccttgaagatgacattcgctctgacacatcgttcatgttccagcgagtgctggtgtctctgtcagctgtgagtgactgcttctgatggggggcgggttttatcgaaatgtccactctatcccctttgccagcctttctcatcctttcagcccctgacatgtggatattccccaggtagtgttctcagacccctctgttcctttatcttatttctccttcagagactctggctaatcctgcctgcccattttttctactttaatttgatatttacaagtacctaacacctgcc

SEQ ID NO: 2332 - protein, 56 aa, Homo sapiens
MRDPRCQALLRGRSLFSQMAVCWLLKISQNMDGALKMTFALTHRSCSSECWCLCQL

SEQ ID NO: 2333 - DNA, 368 bp, Homo sapiens
cagcagcgtacgtgacatccgcagtggccctggctgaggtttcgctgtgattagagaatgagggtagcagcgggttgttgtttgctgattagacttttcacagaacgctgagcatgagggatcctcggtgccaagctctgcttcgagggagatccctgtttagccaaatggcggtctgttggctccttaagatttctcagaatatggacggagccttgaagatgacattcgctctgacacatcgttcatgttccagcgagtgctggtgtctctgtcagctatgacgtgatgatgacaacgatgatgggagtgatgtgactggagctgcactttcagaagagtaatgtaatagtgacgtgtaggatgaa

SEQ ID NO: 2334 - protein, 56 aa, Homo sapiens; identical to SEQ ID NO: 2332

SEQ ID NO: 2335 - DNA, 940 bp, Homo sapiens
cctgtttagccaaatggcggtctgttggctccttaagatttctcagaatatggacggagccttgaagatgacattcgctctgacacatcgttcatgttccagcgagtgctggtgtctctgtcagctggtgggagggatgaaggaaattatctggacgatgctctcgtgagacaggatgcccaggacctgtatgaggctggagagaagaaatgggggacagatgaggtgaaatttctaactgttctctgttcccggaaccgaaatcacctgttgcatgtgtttgatgaatacaaaaggatatcacagaaggatattgaacagagtattaaatctgaaacatctggtagctttgaagatgctctgctggctatagtaaagtgcatgaggaacaaatctgcatattttgctgaaaagctctataaatcgatgaagggcttgggcaccgatgataacaccctcatcagagtgatggtttctcgagcagaaattgacatgttggatatccgggcacacttcaagagactctatggaaagtctctgtactcgttcatcaagggtgacacatctggagactacaggaaagtactgcttgttctctgtggaggagatgattaaaataaaaatcccagaaggacaggaggattctcaacactttgaatttttttaacttcatttttctacactgctattatcattatctcagaatgcttatttccaattaaaacgcctacagctgcctcctagaatatagactgtctgtattattattcacctataattagtcattatgatgctttaaagctgtacttgcatttcaaagcttataagatataaatggagattttaaagtagaaataaatatgtattccatgtttttaaaagattactttctactttgtgtttcacagacattgaatatattaaattattccatattttc

SEQ ID NO: 2336 - protein, 173 aa, Homo sapiens [sequence omitted]

SEQ ID NO: 2337 - DNA, 1565 bp, Homo sapiens
cctgtttagccaaatggcggtctgttggctccttaagatttctcagaatatggacggagccttgaagatgacattcgctctgacacatcgttcatgttccagcgagtgctggtgtctctgtcagctggtgggagggatgaaggaaattatctggacgatgctctcgtgagacaggatgcccaggacctgtatgaggctggagagaagaaatgggggacagatgaggtgaaatttctaactgttctctgttcccggaaccgaaatcacctgttgcatgtgtttgatgaatacaaaaggatatcacagaaggatattgaacagagtattaaatctgaaacatctggtagctttgaagatgctctgctggctatagtaaagtgcatgaggaacaaatctgcatattttgctgaaaagctctataaatcgatgaagggcttgggcaccgatgataacaccctcatcagagtgatggtttctcgagcagaaattgacatgttggatatccgggcacacttcaagagactctatggaaagtctctgtactcgttcatcaagggtgacacatctggagactacaggaaagtactgcttgttctctgtggaggagatgattaaaataaaaatcccagaaggacaggaggattctcaacactttgaatttttttaacttcatttttctacactgctattatcattatctcagaatgcttatttccaattaaaacgcctacagctgcctcctagaatatagactgtctgtattattattcacctataattagtcattatgatgctttaaagctgtacttgcatttcaaagcttataagatataaatggagattttaaagtagaaataaatatgtattccatgtttttaaaagattactttctactttgtgtttcacagacattgaatatattaaattattccatattttcttttcagtgaaaaattttttaaatggaagactgttctaaaatcacttttttccctaatccaatttttagagtggctagtagtttcttcatttgaaattgtaagcatccggtcagtaagaatgcccatccagttttctatatttcatagtcaaagccttgaaagcatctacaaatctctttttttaggttttgtccatagcatcagttgatccttactaagtttttcatgggagacttccttcatcacatcttatgttgaaatcactttctgtagtcaaagtataccaaaaccaatttatctgaactaaattctaaagtatggttatacaaaccatatacatctggttaccaaacataaatgctgaacattccatattattatagttaatgtcttaatccagcttgcaagtgaatggaaaaaaaaataagcttcaaactaggtattctgggaatgatgtaatgctctgaatttagtatgatataaagaaaacttttttgtgctaaaaatactttttaaaatcaattttgttgattgtagtaatttctatttgcactgtgcctttcaactccagaaacattctgaagatgtacttggatttaattaaaaagttcactttgtaagaac

SEQ ID NO: 2338 - protein, 173 aa, Homo sapiens [sequence omitted]

SEQ ID NO: 2339 - DNA, 882 bp, Homo sapiens
cctgtttagccaaatggcggtctgttggctccttaagatttctcagaatatggacggagccttgaagatgacattcgctctgacacatcgttcatgttccagcgagtgctggtgtctctgtcagctggtgggagggatgaaggaaattatctggacgatgctctcgtgagacaggatgcccaggacctgtatgaggctggagagaagaaatgggggacagatgaggtgaaatttctaactgttctctgttcccggaaccgaaatcacctgttgcatgtgtttgatgaatacaaaaggatatcacagaaggatattgaacagagtattaaatctgaaacatctggtagctttgaagatgctctgctggctatagtaaagtgcatgaggaacaaatctgcatattttgctgaaaagctctataaatcgatgaagggcttgggcaccgatgataacaccctcatcagagtgatggtttctcgagcagaaattgacatgttggatatccgggcacacttcaagagactctatggaaagtctctgtactcgttcatcaagggtgacacatctggagactacaggaaagtactgcttgttctctgtggaggagatgattaaaataaaaatcccagaaggacaggaggattctcaacactttgaatttttttaacttcatttttctacactgctattatcattatctcagaatgcttatttccaattaaaacgcctacagctgcctcctagaatatagactgtctgtattattattcacctataattagtcattatgatgctttaaagctgtacttgcatttcaaagcttataagatataaatggagattttaaagtagaaataaatatgtattccatgtttttaaaag

SEQ ID NO: 2340 - protein, 173 aa, Homo sapiens [sequence omitted]

SEQ ID NO: 2341 - DNA, 1222 bp, Homo sapiens
gtgagctggtgttggtgaggggtagggggacatttttatgggatcctcaagtcccaccataggtctcatattctctcgactctcctctgttcccaacctccccaccttttttttttttttttttaagattcaaggtcttgctatgtttcccaggccagctcttcacaggtgccatcttagctcactgccttgaactcctggcctcaagacatcctcccacctcagcctcgagtagctggaactacatgcacatcccgacccccttttggcagaggttgatcaatgtagatttgccagttaggaaggcatgagtcagctgggaagacacaggagagtggggtggtgggggaggccaggagatagtggagggagctgtccttgggaagcttctcctgctattggcagaggcactcatgcaacgttaggggccacactgaggctcagccctctaggcacacatcagagccattgtaataatgcgagcgcatttagaggacgtctgtcctccctccctgggtctgaagctccaattcttgtggtattttgtctcattactctagacctgctatcttaatggtgtccccagatcttcatgtatactctcgaattattttttatttgtttttctcatcctcagggtgggagggatgaaggaaattatctggacgatgctctcgtgagacaggatgcccaggacctgtatgaggctggagagaagaaatgggggacagatgaggtgaaatttctaactgttctctgttcccggaaccgaaatcacctgttgcatgtgtttgatgaatacaaaaggatatcacagaaggatattgaacagagtattaaatctgaaacatctggtagctttgaagatgctctgctggctatagtaaagtgcatgaggaacaaatctgcatattttgctgaaaagctctataaatcgatgaaggtaaatggccttattttcagcatctaaatgaatttgagttatcttgtgtccaccttcttaagcttacttatatcccctatccaaactttgctctgaaagatccaattcaattcatcaaatacttcagtgagtgcctgctaataataatactaggtgatatttactgagtacttaggatgtatggatcactgtttttaatagattaattatatccccacaacagctctatcaggctggtactattactaacctccaatttacagatgaggaaactgaggc

SEQ ID NO: 2342 - protein, 125 aa, Homo sapiens
MYTLELFFICFSHPQGGRDEGNYLDDALVRQDAQDLYEAGEKKWGTDEVKFLTVLCSRNRNHLLHVFDEYKRISQKDIEQSIKSETSGSFEDALLAIVKCMRNKSAYFAEKLYKSMKVNGLIFSI

SEQ ID NO: 2343 - DNA, 4417 bp, Homo sapiens
tgtgtgtgagagaaagagagagaggatggagttgggcaagtaccaggatcttcagagggaatcagcaagctggagatgcaggccagcctatggttttgttccagtctgagtccaaaggcctgagaactaggagcagttcccatctgaaggccagcaggctggaaacccatgaagagctgatgttccagttcaagtccaaaggcaggaaaaaaactgatgtcctagctcaaggcagtcaggcaggaggagtccctctcactcttgggaaggtcagccctcttcttgaaaacaaaagctttcagctgattgtatgagggcccctcctccatattggatcatccaaaaaccctcacagaaacacccagaataatgtttgagcaaaaatctgggtaacccatggctcagtcaagttgacataaaataaattgtcacaagcctgttgagattcaagtttcagaagtgctgaataagatgaactcttttgaattaggtgaattagatgaacgctttcagctttaaatttttatgattatgtgaattgactctaaagcagtgagggaatcagagaaagaagtgaaaaaatgggggagtatatggaggtaagcccaatgagccacaatatgtgtgagttaagatctttttgagaaatgtaacaggcaagctgcttattaaaaatgaacagtaattctgattgagcaataatgtagttaaattgagcagaatgagtttcctatattcctacctggttggaatgtaagcaattggcaatgggtccctggttctactgtgagacctgtagcctcaggaaaatcacagatcattctagagcagggctatccaatagaactccccgcagtgatgagaacattccacatctgcactgtcctgtatgggtgactaccggctacctgtagccgctgggtacttgaaatgaggccaatgtgattgaagagctgaattttaaattgtatttaatttcaattaacatttaaacagccacatgtggttagtggcaactgtaggggacagcccaaatctagggcatttcttttagctcttaagatagaaccatgtagtctccagctagggaactgctagtgtttgccctgactcccaggggggtatgacagggtcccaacagccttatgcctgaggaaggatcctgagtcatttccactcaccactaccatttccaaccccatcaccaacaaaataaaactaagccagctcagctctttgagcttctggaaatatttgcctgtgtcctggcacatcgtttttggaattttagacctgtgctttgtttggcttcaggacctgtatgaggctggagagaagaaatgggggacagatgaggtgaaatttctaactgttctctgttcccggaaccgaaatcacctgttgcatggtaaggcacttacttcatttcccaaagaaaaggagtgaaagatagcaaaaactatattgcccataagtagttgataaccttcctccttcagttggtacaaagaactgattgtacccaagtgtcttagattctcaccctggaaatgtattagtccaatgatgtatatgaaagctaatttctgaaagattaattatgaataattagaaaaagtgcatgtagtcatagaagtttggcattcttgtttctaggaaactgaccttcacagtcagtcctttttctaaagtagccccagtattttcattctaatgtagttacatatgaaagtaatctgtagtagatcaggtagcaataaaatagcaatgttggttgatatttattcctgtgtaatatccaagctgtaaagctaatacaagtgatttctttaggggttatgttgtataagatgaatagtggataatttcaaatttgatatgtttctaatttgtttctgataaatataaactttgtaatgtgattttaacttatttgggggaaagatactagacaattttagaatatttgctgtcaggttcatattcttttaaacaagcaagtaaggatataataagatatttcatcttttatacgagttctttagatctttaagtacattataattttataaacccacccaccatacccttttaatcacacacactgatttgcaaagcttgtgggaaatttgagaatgagtttgctaaattgaaaacataaagcaattgagaagtacaacacattctgaagttgtaattatttcaggtttttcacagtgacaaaaaaacaggtgattactcctgttaatcaatatcccgggctaccatcaggtacacaaacttctgactcagcttctttcttcacttccttcccttgcctggttacaaataacaggaatctccccctggtggtgttttccaagaactgcaggtcctcagaagccgatttagtgcataaatgcatttgcaagaattttcacttctgggtacaagtcaatagttaggcagttatgaaatatctgtttgtaagccactgggagaaaatattttaagcactgtttggactaggaaaacttcataattgtcttaccaaccaacaataatggtgagatttcataataactaccgttttgttaataatgttctattttctaggtgcagtgttaagcattttataagcattgtttcttgcaacactcaatggagcagtaattattttccccattttacagtggagaaaactgaggcttagaaaatgtgtcaattaagttctttgattccaagccacacacactgacttcaatttaagtaagaaaagatgaaataatatagaatggcacaggagggaaaatggaaaatactggtagctcacagatttgaacagacagctgaacaccttcaggaagaacagaaatcaaggcagttctgggggtctcagtagaagggaataatggattttatttctaaagcagagtttctgaagttcgttttctattaaaaatgctaaatattgaccccctacttcagactggctgaattagaatctctgagtgtgacacccaggaagtttaataggtttctctgagggtaaagatgatgcagtgcttttggccatccccgtgagctgctcaattaaaaagttcccaggagagagtctaacgggtcctgactgggtcaactgctcacgtgtttgacagaggttgtggtgtatgttgttgggtatggtgtcccttgattgacagccctgttaaaatcacattgatggaagtgaggcagcaccccaaagaaggcgatggtgagaagataaaatagatacctgctctaagaagtttccagaaggagacagcaagagaggggaacatattcaccacattcaaaaatacttggcaaaaaacaacaacaaatgtaattatgtttaagtattttaaaagatgcaaccagctgttattaactgtgactcagttctgaagcagttgaattgttctagttttgatgagccaaaagggagatgacagggaggtgattgccaaggacaaaaacacaaaaagacacattctgcttattaaggaaacaatgagaaaggaaagcaaagctccccagaggccatctccattttatgtgtgagggtcccagataagggaaaggacttgactgatgtcctccaaacatcacagcatttcttcctccttatctggggcccattccactctgcacatccctcctggctgcttgcccacattactaattagtttcctcctgaaatatgccaaagaataaatagtgtaggctagttaaaaatgctcattctctccataaattttagtttcctctgttttttcttcccaataatactattttgttattgtctgcagtgtttgatgaatacaaaaggatatcacagaaggatattgaacagagtattaaatctgaaacatctggtagctttgaagatgctctgctggctatagtaaagtgcatgaggaacaaatctgcatattttgctgaaaagctctataaatcgatgaagggcttgggcaccgatgataacaccctcatcagagtgatggtttctcgagcagaaattgacatgttggatatccgggcacacttcaagagactctatggaaagtctctgtactcgttcatcaagggtgacacatctggagactacaggaaagtactgcttgttctctgtggaggagatgattaaaataaaaatcccagaaggacaggaggattctcaacactttgaatttttttaacttcatttttctacactgctattatcattatctcagaatgcttatttccaattaaaacgcctacagctgcctcctagaatatagactgtctgtattattattcacctataattagtcattatgatgctttaaagctgtacttgcatttcaaagcttataagatataaatggagattttaaagtagaaataaatatgtattccatgtttttaaaag

SEQ ID NO: 2344 - protein, 77 aa, Homo sapiens
MRNKSAYFAEKLYKSMKGLGTDDNTLIRVMVSRAEIDMLDIRAHFKRLYGKSLYSFIKGDTSGDYRKVLLVLCGGDD

SEQ ID NO: 2345 - DNA, 885 bp, Homo sapiens
gccttgccccgccccttccggaggctcgccgtacgcatgcgccctccgtcccgcgctttgttgcgaaagcgagggggcgaggtgctgcggtgctagagcgcggcgcgaccggacgctgcgggcggggaagaggatggagactgtggcgtccgctgcaacggttggggctgcgcgtgagaaggtggcggtgtaggcacctgcgctcggggaaggctggcggcggcggccgagccatggcgggagacccccttctctgggctccctgaagtctcggggagccgtgacccatgggatcgttgagcagccgggtgctgcgccagccaagaccagcccttgcccagcaggcgcagggtgccagggcggggggctcggcccggaggccggacactggagacgatgcggcgggccacggattctgttactgtgcgggcagccacaagcgcaagcggagcagcgggtccttctgctactgtcaccctgactcggagacggacgaggatgaggaggagggggacgagcagcagcggctcctcaacacccctcgaaggaaaaaattaaagagtacatctaaatatatttatcaaacattatttttgaatggtgaaaacagtgacattaagatttgtgctctaggagaagaatggagcttacacaaaatatatttatgtcaatctggctacttttctagtatgttcagtggttcttggaaagaatccagcatgaatattattgaactggagattcctgaccagaacattgatgtagaagtgctcttgctgctcccctcattggtggtccacatggaagtacctggtgcgatacaaaggcaaagaaatactttagttaagaatatttacagcctgtaatcccagcacgttgggaggc

SEQ ID NO: 2346 - protein, 192 aa, Homo sapiens
MGSLSSRVLRQPRPALAQQAQGARAGGSARRPDTGDDAAGHGFCYCAGSHKRKRSSGSFCYCHPDSETDEDEEEGDEQQRLLNTPRRKKLKSTSKYIYQTLFLNGENSDIKICALGEEWSLHKIYLCQSGYFSSMFSGSWKESSMNIIELEIPDQNIDVEVLLLLPSLVVHMEVPGAIQRQRNTLVKNIYSL

SEQ ID NO: 2347 - DNA, 2431 bp, Homo sapiens
gccttgccccgccccttccggaggctcgccgtacgcatgcgccctccgtcccgcgctttgttgcgaaagcgagggggcgaggtgctgcggtgctagagcgcggcgcgaccggacgctgcgggcggggaagaggatggagactgtggcgtccgctgcaacggttggggctgcgcgtgagaaggtggcggtgtaggcacctgcgctcggggaaggctggcggcggcggccgagccatggcgggagacccccttctctgggctccctgaagtctcggggagccgtgacccatgggatcgttgagcagccgggtgctgcgccagccaagaccagcccttgcccagcaggcgcagggtgccagggcggggggctcggcccggaggccggacactggagacgatgcggcgggccacggattctgttactgtgcgggcagccacaagcgcaagcggagcagcgggtccttctgctactgtcaccctgactcggagacggacgaggatgaggaggagggggacgagcagcagcggctcctcaacacccctcgaaggaaaaaattaaagagtacatctaaatatatttatcaaacattatttttgaatggtgaaaacagtgacattaagatttgtgctctaggagaagaatggagcttacacaaaatatatttatgtcaatctggctacttttctagtatgttcagtggttcttggaaagaatccagcatgaatattattgaactggagattcctgaccagaacattgatgtagaagcactgcaggttgcatttggttcactgtatcgagatgatgtcttgataaagcccagtcgagttgttgccattttggcagcagcttgtttgctgcagttggacggtttaatacagcagtgtggtgagacaatgaaggaaacagttaatgtgaaaactgtatgtggctattacacatcagcagggacctatggattagattctgtaaagaaaaagtgccttgaatggcttctaaacaatttgatgactcaccagaatgttgaactttttaaagaactcagtataaatgtcatgaaacagctcattggttcatctaacttatttgtgatgcaagtggagatggatatatacactgctctaaaaaagtggatgttccttcaacttgtgccttcttggaatggatctttaaaacagcttttgacagaaacagatgtctggttttctaaacagaggaaagattttgaaggtatggcctttcttgaaactgaacaaggaaaaccatttgtgtcagtattcagacatttaaggttacaatatattatcagtgatctggcttctgcaagaattattgaacaagatgctgtagtaccttcagaatggctctcttctgtgtataaacagcagtggtttgctatgctgcgggcagaacaggacagtgaggtggggcctcaagaaatcaataaagaagaactagagggaaacagcatgaggtgtggtagaaagcttgccaaagatggtgaatactgctggcgttggacaggttttaacttcggcttcgacctacttgtaacttacaccaatcgatacatcattttcaaacgcaatacactgaatcagccatgtagcggatctgtcagtttacagcctcgaaggagcatagcatttagattacgtttggcttcttttgatagtagtggaaaactaatatgtagtagaacaactggctatcaaatacttacacttgaaaaggatcaggaacaagtggtgatgaacttggacagcaggcttctgatcttccctttatatatctgctgtaacttcttgtatatatcaccagaaaaaaagaattgaaaataatcgtcacccagaaaatccagaaaactgaagatttcatcagttggaaacagtagcactttgaaaactttttaggccagctttaatttaatggccctactgatattcacatcgaaggtgactaacaatgacaaaggccttatgaactgtacagacaatacagaagattattcttatcctcattgcatttctatgcatatgcgtaagaacattttaaagccaagaaaatatctgtcaaaccatttctgttagaacgatgtcaattcatgcttttaatttagcatcaatagaaaattgctgtaggtaaatctcacatttatctgcaacaaaatatagatttaatttttagcttaaactttgtttctaccttatgttagtggacctcagttatccatctgtaaatttctttttatttggctaaaataatctaaaagaataatttggttggccaattagaaatgcctttttcagttggtgtattgaaagctttcctttaacattttcacctgctcattgtgattcctccttttagtctaatatctttccaggtcatacttgtttttaatcattaaatattttcttcctggttttgg

SEQ ID NO: 2348 - protein, 515 aa, Homo sapiens; identical to SEQ ID NO: 136

SEQ ID NO: 2349 - DNA, 3083 bp, Homo sapiens
gccttgccccgccccttccggaggctcgccgtacgcatgcgccctccgtcccgcgctttgttgcgaaagcgagggggcgaggtgctgcggtgctagagcgcggcgcgaccggacgctgcgggcggggaagaggatggagactgtggcgtccgctgcaacggttggggctgcgcgtgagaaggtggcggtgtaggcacctgcgctcggggaaggctggcggcggcggccgagccatggcgggagacccccttctctgggctccctgaagtctcggggagccgtgacccatgggatcgttgagcagccgggtgctgcgccagccaagaccagcccttgcccagcaggcgcagggtgccagggcggggggctcggcccggaggccggacactggagacgatgcggcgggccacggattctgttactgtgcgggcagccacaagcgcaagcggagcagcgggtccttctgctactgtcaccctgactcggagacggacgaggatgaggaggagggggacgagcagcagcggctcctcaacacccctcgaaggaaaaaattaaagagtacatctaaatatatttatcaaacattatttttgaatggtgaaaacagtgacattaagatttgtgctctaggagaagaatggagcttacacaaaatatatttatgtcaatctggctacttttctagtatgttcagtggttcttggaaagaatccagcatgaatattattgaactggagattcctgaccagaacattgatgtagaagcactgcaggttgcatttggttcactgtatcgagatgatgtcttgataaagcccagtcgagttgttgccattttggcagcagcttgtttgctgcagttggacggtttaatacagcagtgtggtgagacaatgaaggaaacagttaatgtgaaaactgtatgtggctattacacatcagcagggacctatggattagattctgtaaagaaaaagtgccttgaatggcttctaaacaatttgatgactcaccagaatgttgaactttttaaagaactcagtataaatgtcatgaaacagctcattggttcatctaacttatttgtgatgcaagtggagatggatatatacactgctctaaaaaagtggatgttccttcaacttgtgccttcttggaatggatctttaaaacagcttttgacagaaacagatgtctggttttctaaacagaggaaagattttgaaggtatggcctttcttgaaactgaacaaggaaaaccatttgtgtcagtattcagacatttaaggttacaatatattatcagtgatctggcttctgcaagaattattgaacaagatgctgtagtaccttcagaatggctctcttctgtgtataaacagcagtggtttgctatgctgcgggcagaacaggacagtgaggtggggcctcaagaaatcaataaagaagaactagagggaaacagcatgaggtgtggtagaaagcttgccaaagatggtgaatactgctggcgttggacaggttttaacttcggcttcgacctacttgtaacttacaccaatcgatacatcattttcaaacgcaatacactgaatcagccatgtagcggatctgtcagtttacagcctcgaaggagcatagcatttagattacgtttggcttcttttgatagtagtggaaaactaatatgtagtagaacaactggctatcaaatacttacacttgaaaaggatcaggaacaagtggtgatgaacttggacagcaggcttctgatcttccctttatatatctgctgtaacttcttgtatatatcaccagaaaaaaagaattgaaaataatcgtcacccagaaaatccagaaaactgaagatttcatcagttggaaacagtagcactttgaaaactttttaggccagctttaatttaatggccctactgatattcacatcgaaggtgactaacaatgacaaaggccttatgaactgtacagacaatacagaagattattcttatcctcattgcatttctatgcatatgcgtaagaacattttaaagccaagaaaatatctgtcaaaccatttctgttagaacgatgtcaattcatgcttttaatttagcatcaatagaaaattgctgtaggtaaatctcacatttatctgcaacaaaatatagatttaatttttagcttaaactttgtttctaccttatgttagtggacctcagttatccatctgtaaatttctttttatttggctaaaataatctaaaagaataatttggttggccaattagaaatgcctttttcagttggtgtattgaaagctttcctttaacattttcacctgctcattgtgattcctccttttagtctaatatctttccaggtcatacttgtttttaatcattaaatattttcttcctggttttggagactaagctgataaactttttttaaaacttaagcattgtcattgctattttttttaatttgactttcctaggagtttaagaacagtgaaagttagctttgcaccttcaaatgatcttgaatgagggaaaaatcagtttgattccaaggatatttcttgccttacatggtcttttctttgacagtctgtacacctttattattaggttttgaattatttatgtaccagatattatagttttaaacattttaatattctctgatctttagaattatttatgttcaaattttagttgggaactttgtttcctacttaagctcaggactttttaccctctgaattgagtgcctttgagtgacacatgctaatagaaatttcatagtaaatgtaaataaggtcagaggatgtaatatggagcctgatgatgaagcattaatgtaaaaatggaacttatttttgtcaaaaatgagatgtacacttgtcatgatttatgtatgttgaccttttgtgtttattactgttttgaaaatagccatgttcattttctttccagttagagtaagtacttctgtggttaatgtatatttttattatggtttttaaaatgggaatcatttttatgtatctgtgcaaataataaatgcccatttgg

SEQ ID NO: 2350 - protein, 515 aa, Homo sapiens; identical to SEQ ID NO: 136

SEQ ID NO: 2351 - DNA, 4224 bp, Homo sapiens
gccttgccccgccccttccggaggctcgccgtacgcatgcgccctccgtcccgcgctttgttgcgaaagcgagggggcgaggtgctgcggtgctagagcgcggcgcgaccggacgctgcgggcggggaagaggatggagactgtggcgtccgctgcaacggttggggctgcgcgtgagaaggtggcggtgtaggcacctgcgctcggggaaggctggcggcggcggccgagccatggcgggagacccccttctctgggctccctgaagtctcggggagccgtgacccatgggatcgttgagcagccgggtgctgcgccagccaagaccagcccttgcccagcaggcgcagggtgccagggcggggggctcggcccggaggccggacactggagacgatgcggcgggccacggattctgttactgtgcgggcagccacaagcgcaagcggagcagcgggtccttctgctactgtcaccctgactcggagacggacgaggatgaggaggagggggacgagcagcagcggctcctcaacacccctcgaaggaaaaaattaaagagtacatctaaatatatttatcaaacattatttttgaatggtgaaaacagtgacattaagatttgtgctctaggagaagaatggagcttacacaaaatatatttatgtcaatctggctacttttctagtatgttcagtggttcttggaaagaatccagcatgaatattattgaactggagattcctgaccagaacattgatgtagaagcactgcaggttgcatttggttcactgtatcgagatgatgtcttgataaagcccagtcgagttgttgccattttggcagcagcttgtttgctgcagttggacggtttaatacagcagtgtggtgagacaatgaaggaaacagttaatgtgaaaactgtatgtggctattacacatcagcagggacctatggattagattctgtaaagaaaaagtgccttgaatggcttctaaacaatttgatgactcaccagaatgttgaactttttaaagaactcagtataaatgtcatgaaacagctcattggttcatctaacttatttgtgatgcaagtggagatggatatatacactgctctaaaaaagtggatgttccttcaacttgtgccttcttggaatggatctttaaaacagcttttgacagaaacagatgtctggttttctaaacagaggaaagattttgaaggtatggcctttcttgaaactgaacaaggaaaaccatttgtgtcagtattcagacatttaaggttacaatatattatcagtgatctggcttctgcaagaattattgaacaagatgctgtagtaccttcagaatggctctcttctgtgtataaacagcagtggtttgctatgctgcgggcagaacaggacagtgaggtggggcctcaagaaatcaataaagaagaactagagggaaacagcatgaggtgtggtagaaagcttgccaaagatggtgaatactgctggcgttggacaggttttaacttcggcttcgacctacttgtaacttacaccaatcgatacatcattttcaaacgcaatacactgaatcagccatgtagcggatctgtcagtttacagcctcgaaggagcatagcatttagattacgtttggcttcttttgatagtagtggaaaactaatatgtagtagaacaactggctatcaaatacttacacttgaaaaggatcaggaacaagtggtgatgaacttggacagcaggcttctgatcttccctttatatatctgctgtaacttcttgtatatatcaccagaaaaaaagaattgaaaataatcgtcacccagaaaatccagaaaactgaagatttcatcagttggaaacagtagcactttgaaaactttttaggccagctttaatttaatggccctactgatattcacatcgaaggtgactaacaatgacaaaggccttatgaactgtacagacaatacagaagattattcttatcctcattgcatttctatgcatatgcgtaagaacattttaaagccaagaaaatatctgtcaaaccatttctgttagaacgatgtcaattcatgcttttaatttagcatcaatagaaaattgctgtaggtaaatctcacatttatctgcaacaaaatatagatttaatttttagcttaaactttgtttctaccttatgttagtggacctcagttatccatctgtaaatttctttttatttggctaaaataatctaaaagaataatttggttggccaattagaaatgcctttttcagttggtgtattgaaagctttcctttaacattttcacctgctcattgtgattcctccttttagtctaatatctttccaggtcatacttgtttttaatcattaaatattttcttcctggttttggagactaagctgataaactttttttaaaacttaagcattgtcattgctattttttttaatttgactttcctaggagtttaagaacagtgaaagttagctttgcaccttcaaatgatcttgaatgagggaaaaatcagtttgattccaaggatatttcttgccttacatggtcttttctttgacagtctgtacacctttattattaggttttgaattatttatgtaccagatattatagttttaaacattttaatattctctgatctttagaattatttatgttcaaattttagttgggaactttgtttcctacttaagctcaggactttttaccctctgaattgagtgcctttgagtgacacatgctaatagaaatttcatagtaaatgtaaataaggtcagaggatgtaatatggagcctgatgatgaagcattaatgtaaaaatggaacttatttttgtcaaaaatgagatgtacacttgtcatgatttatgtatgttgaccttttgtgtttattactgttttgaaaatagccatgttcattttctttccagttagagtaagtacttctgtggttaatgtatatttttattatggtttttaaaatgggaatcatttttatgtatctgtgcaaataataaatgcccatttggaaaaagagtaagctcttacataaaatggaccaaaaaatcccccttaattgaaaccaaaattttttctttctagttaggtttttttcccaactccttttaacttttggaatttattaataatttttttcttttttaatgatatgcccataggttcataaattgcttttgttcttttaaaattcatccatttggtttaacttaaaggaaccttttaaatgcctcacccttgaccctcagagctggaatttaaatgtttctaatacagtgatttggctgttatcaagaggttacatttcagctgggtgtcagccaggtgtggtggctcacacttgtaagcccagcactttgggaggccgaggcaggcagatcatctgaggtcaggagtttaagatcagccatgaccaacatggtgaaaccccatctctattaaatacacaaaataaaaattagccaggcatggtggcacacgcctgtcatctcagctactcaggaggctgaggcaggagaatcacttgaacccaggaggcagaggttgcagtgagtggagattgcgccattgcactccaacctaggcgacagagtgagactccgtctcaaaaaaaaaaaaaaaaaaaaagaggctactgtacttatttttatatttgactacattaggtctttttcacgggaagctgttgttttctttccgtctcattactgtataagagtttccttaccctttatgtattgaaaaatatataaattccaaacttaaattatttggataattaagtttttgcagatcttggaagtaaagataatgttttgatcatattaatgaataaagttaactgtttcatttcacttacataagttaactggccaaattggatttatatgtggtttcatccattggttctgtcctggccaagttgcttatgtcatccatagacaggataattctttcttcaatcacaagtaggttaatgttcttatttgagaagttgataattgtcaggtagtaattcacactggtagtaaagatgtgcttttgttttcttaccaaatatttttatgtgtttccagagttcttttcaatagaaatattttcaataaagtgttaatagtgtaagataaagtattgtataaaccatggtttgtg

SEQ ID NO: 2352 - protein, 515 aa, Homo sapiens; identical to SEQ ID NO: 136

SEQ ID NO: 2353 - DNA, 651 bp, Homo sapiens
ttcaaaatctccatttcaggcatcccgttttcagaccccacctcgtctttctagctcattgcgccattgcactccaacctaggcgacagagtgagactccgtctcaaaaaaaaaaaaaaaaaaaaagaggctactgtacttatttttatatttgactacattaggtctttttcacgggaagctgttgttttctttccgtctcattactgtataagagtttccttaccctttatgtattgaaaaatatataaattccaaacttaaattatttggataattaagtttttgcagatcttggaagtaaagataatgttttgatcatattaatgaataaagttaactgtttcatttcacttacataagttaactggccaaattggatttatatgtggtttcatccattggttctgtcctggccaagttgcttatgtcatccatagacaggataattctttcttcaatcacaagtaggttaatgttcttatttgagaagttgataattgtcaggtagtaattcacactggtagtaaagatgtgcttttgttttcttaccaaatatttttatgtgtttccagagttcttttcaatagaaatattttcaataaagtgttaatagtgtaagataaagtattgtataaaccatggtttgtg

SEQ ID NO: 2354 - protein, 50 aa, Homo sapiens
QNLHFRHPVFRPHLVFLAHCAIALQPRRQSETPSQKKKKKKRGYCTYFYI

SEQ ID NO: 2355 - DNA, 1418 bp, Homo sapiens
caactagagcaaacctctgtctcaaaaaaaaaaaaaaaaaaattagccgggcgtggtggcagggacctgtagtcccagctacttgggaggctgaggcaggagaatcgcttgaacccgggaggtggaggttgcagtgagccaagatcatgccactgcactccagcctgagtgacagaatgagactctgtctcaaaaaaaaaaaaaaaaaaaaaaagccttattatttatggtagaattgcagtatggagagataaggaaactgatcatgaagaggaaagtagcttagagaattatgatcattaagggcagcttttctagcttagataaatagttttgggtggtaagccttaagaaaaagtcactgacaaaaagtcgaccacccatgagggaaatacttggaatgagttagagacaaaaagacattttgaattttttattttctacttgctaatatgataaactgaaataagtcttctctcttgtattttttagtactgctggcgttggacaggttttaacttcggcttcgacctacttgtaacttacaccaatcgatacatcattttcaaacgcaatacactgaatcagccatgtagcggatctgtcagtttacagcctcgaaggagcatagcatttagattacgtttggcttcttttgatagtagtggaaaactaatatgtagtagaacaactggctatcaaatacttacacttgaaaaggatcaggaacaagtggtgatgaacttggacagcaggcttctgatcttccctttatatatctgctgtaacttcttgtatatatcaccagaaaaaaagaattgaaaataatcgtcacccagaaaatccagaaaactgaagatttcatcagttggaaacagtagcactttgaaaactttttaggccagctttaatttaatggccctactgatattcacatcgaaggtgactaacaatgacaaaggccttatgaactgtacagacaatacagaagattattcttatcctcattgcatttctatgcatatgcgtaagaacattttaaagccaagaaaatatctgtcaaaccatttctgttagaacgatgtcaattcatgcttttaatttagcatcaatagaaaattgctgtaggtaaatctcacatttatctgcaacaaaatatagatttaatttttagcttaaactttgtttctaccttatgttagtggacctcagttatccatctgtaaatttctttttatttggctaaaataatctaaaagaataatttggttggccaattagaaatgcctttttcagttggtgtattgaaagctttcctttaacattttcacctgctcattgtgattcctccttttagtctaatatctttccaggtcatacttgtttttaatcattaaatattttcttcctggttttgg

SEQ ID NO: 2356 - protein, 53 aa, Homo sapiens
MALLIFTSKVTNNDKGLMNCTDNTEDYSYPHCISMHMRKNILKPRKYLSNHFC

SEQ ID NO: 2357 - DNA, 2070 bp, Homo sapiens
caactagagcaaacctctgtctcaaaaaaaaaaaaaaaaaaattagccgggcgtggtggcagggacctgtagtcccagctacttgggaggctgaggcaggagaatcgcttgaacccgggaggtggaggttgcagtgagccaagatcatgccactgcactccagcctgagtgacagaatgagactctgtctcaaaaaaaaaaaaaaaaaaaaaaagccttattatttatggtagaattgcagtatggagagataaggaaactgatcatgaagaggaaagtagcttagagaattatgatcattaagggcagcttttctagcttagataaatagttttgggtggtaagccttaagaaaaagtcactgacaaaaagtcgaccacccatgagggaaatacttggaatgagttagagacaaaaagacattttgaattttttattttctacttgctaatatgataaactgaaataagtcttctctcttgtattttttagtactgctggcgttggacaggttttaacttcggcttcgacctacttgtaacttacaccaatcgatacatcattttcaaacgcaatacactgaatcagccatgtagcggatctgtcagtttacagcctcgaaggagcatagcatttagattacgtttggcttcttttgatagtagtggaaaactaatatgtagtagaacaactggctatcaaatacttacacttgaaaaggatcaggaacaagtggtgatgaacttggacagcaggcttctgatcttccctttatatatctgctgtaacttcttgtatatatcaccagaaaaaaagaattgaaaataatcgtcacccagaaaatccagaaaactgaagatttcatcagttggaaacagtagcactttgaaaactttttaggccagctttaatttaatggccctactgatattcacatcgaaggtgactaacaatgacaaaggccttatgaactgtacagacaatacagaagattattcttatcctcattgcatttctatgcatatgcgtaagaacattttaaagccaagaaaatatctgtcaaaccatttctgttagaacgatgtcaattcatgcttttaatttagcatcaatagaaaattgctgtaggtaaatctcacatttatctgcaacaaaatatagatttaatttttagcttaaactttgtttctaccttatgttagtggacctcagttatccatctgtaaatttctttttatttggctaaaataatctaaaagaataatttggttggccaattagaaatgcctttttcagttggtgtattgaaagctttcctttaacattttcacctgctcattgtgattcctccttttagtctaatatctttccaggtcatacttgtttttaatcattaaatattttcttcctggttttggagactaagctgataaactttttttaaaacttaagcattgtcattgctattttttttaatttgactttcctaggagtttaagaacagtgaaagttagctttgcaccttcaaatgatcttgaatgagggaaaaatcagtttgattccaaggatatttcttgccttacatggtcttttctttgacagtctgtacacctttattattaggttttgaattatttatgtaccagatattatagttttaaacattttaatattctctgatctttagaattatttatgttcaaattttagttgggaactttgtttcctacttaagctcaggactttttaccctctgaattgagtgcctttgagtgacacatgctaatagaaatttcatagtaaatgtaaataaggtcagaggatgtaatatggagcctgatgatgaagcattaatgtaaaaatggaacttatttttgtcaaaaatgagatgtacacttgtcatgatttatgtatgttgaccttttgtgtttattactgttttgaaaatagccatgttcattttctttccagttagagtaagtacttctgtggttaatgtatatttttattatggtttttaaaatgggaatcatttttatgtatctgtgcaaataataaatgcccatttgg

SEQ ID NO: 2358 - protein, 53 aa, Homo sapiens; identical to SEQ ID NO: 2356

SEQ ID NO: 2359 - DNA, 3211 bp, Homo sapiens
caactagagcaaacctctgtctcaaaaaaaaaaaaaaaaaaattagccgggcgtggtggcagggacctgtagtcccagctacttgggaggctgaggcaggagaatcgcttgaacccgggaggtggaggttgcagtgagccaagatcatgccactgcactccagcctgagtgacagaatgagactctgtctcaaaaaaaaaaaaaaaaaaaaaaagccttattatttatggtagaattgcagtatggagagataaggaaactgatcatgaagaggaaagtagcttagagaattatgatcattaagggcagcttttctagcttagataaatagttttgggtggtaagccttaagaaaaagtcactgacaaaaagtcgaccacccatgagggaaatacttggaatgagttagagacaaaaagacattttgaattttttattttctacttgctaatatgataaactgaaataagtcttctctcttgtattttttagtactgctggcgttggacaggttttaacttcggcttcgacctacttgtaacttacaccaatcgatacatcattttcaaacgcaatacactgaatcagccatgtagcggatctgtcagtttacagcctcgaaggagcatagcatttagattacgtttggcttcttttgatagtagtggaaaactaatatgtagtagaacaactggctatcaaatacttacacttgaaaaggatcaggaacaagtggtgatgaacttggacagcaggcttctgatcttccctttatatatctgctgtaacttcttgtatatatcaccagaaaaaaagaattgaaaataatcgtcacccagaaaatccagaaaactgaagatttcatcagttggaaacagtagcactttgaaaactttttaggccagctttaatttaatggccctactgatattcacatcgaaggtgactaacaatgacaaaggccttatgaactgtacagacaatacagaagattattcttatcctcattgcatttctatgcatatgcgtaagaacattttaaagccaagaaaatatctgtcaaaccatttctgttagaacgatgtcaattcatgcttttaatttagcatcaatagaaaattgctgtaggtaaatctcacatttatctgcaacaaaatatagatttaatttttagcttaaactttgtttctaccttatgttagtggacctcagttatccatctgtaaatttctttttatttggctaaaataatctaaaagaataatttggttggccaattagaaatgcctttttcagttggtgtattgaaagctttcctttaacattttcacctgctcattgtgattcctccttttagtctaatatctttccaggtcatacttgtttttaatcattaaatattttcttcctggttttggagactaagctgataaactttttttaaaacttaagcattgtcattgctattttttttaatttgactttcctaggagtttaagaacagtgaaagttagctttgcaccttcaaatgatcttgaatgagggaaaaatcagtttgattccaaggatatttcttgccttacatggtcttttctttgacagtctgtacacctttattattaggttttgaattatttatgtaccagatattatagttttaaacattttaatattctctgatctttagaattatttatgttcaaattttagttgggaactttgtttcctacttaagctcaggactttttaccctctgaattgagtgcctttgagtgacacatgctaatagaaatttcatagtaaatgtaaataaggtcagaggatgtaatatggagcctgatgatgaagcattaatgtaaaaatggaacttatttttgtcaaaaatgagatgtacacttgtcatgatttatgtatgttgaccttttgtgtttattactgttttgaaaatagccatgttcattttctttccagttagagtaagtacttctgtggttaatgtatatttttattatggtttttaaaatgggaatcatttttatgtatctgtgcaaataataaatgcccatttggaaaaagagtaagctcttacataaaatggaccaaaaaatcccccttaattgaaaccaaaattttttctttctagttaggtttttttcccaactccttttaacttttggaatttattaataatttttttcttttttaatgatatgcccataggttcataaattgcttttgttcttttaaaattcatccatttggtttaacttaaaggaaccttttaaatgcctcacccttgaccctcagagctggaatttaaatgtttctaatacagtgatttggctgttatcaagaggttacatttcagctgggtgtcagccaggtgtggtggctcacacttgtaagcccagcactttgggaggccgaggcaggcagatcatctgaggtcaggagtttaagatcagccatgaccaacatggtgaaaccccatctctattaaatacacaaaataaaaattagccaggcatggtggcacacgcctgtcatctcagctactcaggaggctgaggcaggagaatcacttgaacccaggaggcagaggttgcagtgagtggagattgcgccattgcactccaacctaggcgacagagtgagactccgtctcaaaaaaaaaaaaaaaaaaaaagaggctactgtacttatttttatatttgactacattaggtctttttcacgggaagctgttgttttctttccgtctcattactgtataagagtttccttaccctttatgtattgaaaaatatataaattccaaacttaaattatttggataattaagtttttgcagatcttggaagtaaagataatgttttgatcatattaatgaataaagttaactgtttcatttcacttacataagttaactggccaaattggatttatatgtggtttcatccattggttctgtcctggccaagttgcttatgtcatccatagacaggataattctttcttcaatcacaagtaggttaatgttcttatttgagaagttgataattgtcaggtagtaattcacactggtagtaaagatgtgcttttgttttcttaccaaatatttttatgtgtttccagagttcttttcaatagaaatattttcaataaagtgttaatagtgtaagataaagtattgtataaaccatggtttgtg

SEQ ID NO: 2360 - protein, 53 aa, Homo sapiens; identical to SEQ ID NO: 2356

SEQ ID NO: 2361 - DNA, 1191 bp, Homo sapiens
gggcctttagttttccttccaagagcccataggaggttttgggtgccttctcaatgctggcatgagaaaatataaagcagatggacagtgaactttggtatattcactccttatgaatgttatgtggaaaagtggaagaacataagctgtttgtctatgctatgtttacaattggtttgctctattttgtgcatgtggacaaaaatgggggaaaaatgaaagctgtgttaggataatgggtatacggctgaattttccaggaatttctataataacaccaaatcgcatgttttaatgcccaccgtgaacaaagaagaccggaaccctcgcaactcgttttgacgttttctggtcggcggtaaaagctcggttcccggccctcccggaagttgttgcacagttgtttccgggaagcgggactccaaatgggtcgcagtcgcagccgctctccacggagggaacgtaggcgttcccggtccacatcccgggagagagaacgcaggcgccgagaaaggtccaggtctcgggagagagatcggagaaggagccgctcgcgatccccgcaccgaagacgctcccgatctccaagacgacatagatccacatctccttccccttctcgactgaaagaaagaagagatgaggaaaagaaagaaacaaaagaaacaaagagcaaagaacggcagattactgaggaagacttagagggcaaaacagaggaagaaatagaaatgatgaagttaatgggatttgcctcctttgactccacaaaagcagtacatgaatcgaaaaggtggattcaacagacctttggatttcattgcatgagaattgaagtgttgaaggatgattttttttcccctcatcttggtcagagagtggattttgtattttgtatttaacttgcattcaaaaaacaggatctcagttctcctttcttgtaaagtaagaaaatcttatttatgatatatgcagttaacttaccttgcctcaacagaagaaaggttaaatattacatttttttcttttaggaaatatcatttgtggcaggcgtcaaccccattttatttgtccttattcctgtggaagcagtatatgttttcttcctgaatgctcattaggacttcttaaaaaacatgaaagtaatttggaagtaagtttatccaataaagcagtatttctaccctttta

SEQ ID NO: 2362 - protein, 158 aa, Homo sapiens
MGRSRSRSPRRERRRSRSTSRERERRRRERSRSRERDRRRSRSRSPHRRRSRSPRRHRSTSPSPSRLKERRDEEKKETKETKSKERQITEEDLEGKTEEEIEMMKLMGFASFDSTKAVHESKRWIQQTFGFHCMRIEVLKDDFFSPHLGQRVDFVFCI

SEQ ID NO: 2363 - DNA, 1170 bp, Homo sapiens
gggcctttagttttccttccaagagcccataggaggttttgggtgccttctcaatgctggcatgagaaaatataaagcagatggacagtgaactttggtatattcactccttatgaatgttatgtggaaaagtggaagaacataagctgtttgtctatgctatgtttacaattggtttgctctattttgtgcatgtggacaaaaatgggggaaaaatgaaagctgtgttaggataatgggtatacggctgaattttccaggaatttctataataacaccaaatcgcatgttttaatgcccaccgtgaacaaagaagaccggaaccctcgcaactcgttttgacgttttctggtcggcggtaaaagctcggttcccggccctcccggaagttgttgcacagttgtttccgggaagcgggactccaaatgggtcgcagtcgcagccgctctccacggagggaacgtaggcgttcccggtccacatcccgggagagagaacgcaggcgccgagaaaggtccaggtctcgggagagagatcggagaaggagccgctcgcgatccccgcaccgaagacgctcccgatctccaagacgacatagatccacatctccttccccttctcgactgaaagaaagaagagatgaggaaaagaaagaaacaaaagaaacaaagagcaaagaacggcagattactgaggaagacttagagggcaaaacagaggaagaaatagaaatgatgaagttaatgggatttgcctcctttgactccacaaaaggtaagaaggtggatggctctgtaaatgcctatgccataaatgtctctcagaagaggaagtacaggcagtacatgaatcgaaaaggtggattcaacagacctttggatttcattgcatgagaattgaagtgttgaaggatgattttttttcccctcatcttggtcagagagtggattttgtattttgtatttaacttgcattcaaaaaacaggatctcagttctcctttcttgtaaagaaatatcatttgtggcaggcgtcaaccccattttatttgtccttattcctgtggaagcagtatatgttttcttcctgaatgctcattaggacttcttaaaaaacatgaaagtaatttggaagtaagtttatccaataaagcagtatttctaccctttta

SEQ ID NO: 2364 - protein, 155 aa, Homo sapiens; identical to SEQ ID NO: 138

SEQ ID NO: 2365 - DNA, 1261 bp, Homo sapiens
gggcctttagttttccttccaagagcccataggaggttttgggtgccttctcaatgctggcatgagaaaatataaagcagatggacagtgaactttggtatattcactccttatgaatgttatgtggaaaagtggaagaacataagctgtttgtctatgctatgtttacaattggtttgctctattttgtgcatgtggacaaaaatgggggaaaaatgaaagctgtgttaggataatgggtatacggctgaattttccaggaatttctataataacaccaaatcgcatgttttaatgcccaccgtgaacaaagaagaccggaaccctcgcaactcgttttgacgttttctggtcggcggtaaaagctcggttcccggccctcccggaagttgttgcacagttgtttccgggaagcgggactccaaatgggtcgcagtcgcagccgctctccacggagggaacgtaggcgttcccggtccacatcccgggagagagaacgcaggcgccgagaaaggtccaggtctcgggagagagatcggagaaggagccgctcgcgatccccgcaccgaagacgctcccgatctccaagacgacatagatccacatctccttccccttctcgactgaaagaaagaagagatgaggaaaagaaagaaacaaaagaaacaaagagcaaagaacggcagattactgaggaagacttagagggcaaaacagaggaagaaatagaaatgatgaagttaatgggatttgcctcctttgactccacaaaaggtaagaaggtggatggctctgtaaatgcctatgccataaatgtctctcagaagaggaagtacaggcagtacatgaatcgaaaaggtggattcaacagacctttggatttcattgcatgagaattgaagtgttgaaggatgattttttttcccctcatcttggtcagagagtggattttgtattttgtatttaacttgcattcaaaaaacaggatctcagttctcctttcttgtaaagtaagaaaatcttatttatgatatatgcagttaacttaccttgcctcaacagaagaaaggttaaatattacatttttttcttttaggaaatatcatttgtggcaggcgtcaaccccattttatttgtccttattcctgtggaagcagtatatgttttcttcctgaatgctcattaggacttcttaaaaaacatgaaagtaatttggaagtaagtttatccaataaagcagtatttctacccttttagattt

SEQ ID NO: 2366 - protein, 155 aa, Homo sapiens; identical to SEQ ID NO: 138

SEQ ID NO: 2367 - DNA, 1755 bp, Homo sapiens
gggcctttagttttccttccaagagcccataggaggttttgggtgccttctcaatgctggcatgagaaaatataaagcagatggacagtgaactttggtatattcactccttatgaatgttatgtggaaaagtggaagaacataagctgtttgtctatgctatgtttacaattggtttgctctattttgtgcatgtggacaaaaatgggggaaaaatgaaagctgtgttaggataatgggtatacggctgaattttccaggaatttctataataacaccaaatcgcatgttttaatgcccaccgtgaacaaagaagaccggaaccctcgcaactcgttttgacgttttctggtcggcggtaaaagctcggttcccggccctcccggaagttgttgcacagttgtttccgggaagcgggactccaaatgggtcgcagtcgcagccgctctccacggagggaacgtaggcgttcccggtccacatcccgggagagagaacgcaggcgccgagaaaggtccaggtctcgggagagagatcggagaaggagccgctcgcgatccccgcaccgaagacgctcccgatctccaagacgacatagatccacatctccttccccttctcgactgaaagaaagaagagatgaggaaaagaaagaaacaaaagaaacaaagagcaaagaacggcagattactgaggaagacttagagggcaaaacagaggaagaaatagaaatgatgaagttaatgggatttgcctcctttgactccacaaaagcagtacatgaatcgaaaaggtggattcaacagacctttggatttcattgcatgagaattgaagtgttgaaggatgattttttttcccctcatcttggtcagagagtggattttgtattttgtatttaacttgcattcaaaaaacaggatctcagttctcctttcttgtaaagtaagaaaatcttatttatgatatatgcagttaacttaccttgcctcaacagaagaaaggttaaatattacatttttttcttttaggaaatatcatttgtggcaggcgtcaaccccattttatttgtccttattcctgtggaagcagtatatgttttcttcctgaatgctcattaggacttcttaaaaaacatgaaagtaatttggaagtaagtttatccaataaagcagtatttctacccttttagatttgataaatatttttattactaaagaatctccccagacattttcttttttttttcacacatagatttaagtatcttgattgttagtagtctaaaaatgggaagaatgaaaaagcataactagatttttctatcttctgtggtcgcccgcccccccccaaaaaaataccatttatggttctctccgcaagtataaaagcattacatgcaaaaaaaagatctcagagaaaacaaaagtaaaagaaaagcagaaaatcacctgttatctactcccagaaataatcaatttcaacattttggtatatgtttttccaggcttctttgggttgatcccacctatgagatcagaatatgtatgcagttctttctttaacccttttttctcctatgtactgtgaacatttaaaaagtacttttaaatattctttggaaacttagcttttagtaactacttggttgtatcataatttattaactaatgttttattggtaaacattggcttgcctcccatgacttgccattataattaaaactgtgactactatctgtctccattacatac

SEQ ID NO: 2368 - protein, 158 aa, Homo sapiens; identical to SEQ ID NO: 2362

SEQ ID NO: 2369 - DNA, 1734 bp, Homo sapiens
gggcctttagttttccttccaagagcccataggaggttttgggtgccttctcaatgctggcatgagaaaatataaagcagatggacagtgaactttggtatattcactccttatgaatgttatgtggaaaagtggaagaacataagctgtttgtctatgctatgtttacaattggtttgctctattttgtgcatgtggacaaaaatgggggaaaaatgaaagctgtgttaggataatgggtatacggctgaattttccaggaatttctataataacaccaaatcgcatgttttaatgcccaccgtgaacaaagaagaccggaaccctcgcaactcgttttgacgttttctggtcggcggtaaaagctcggttcccggccctcccggaagttgttgcacagttgtttccgggaagcgggactccaaatgggtcgcagtcgcagccgctctccacggagggaacgtaggcgttcccggtccacatcccgggagagagaacgcaggcgccgagaaaggtccaggtctcgggagagagatcggagaaggagccgctcgcgatccccgcaccgaagacgctcccgatctccaagacgacatagatccacatctccttccccttctcgactgaaagaaagaagagatgaggaaaagaaagaaacaaaagaaacaaagagcaaagaacggcagattactgaggaagacttagagggcaaaacagaggaagaaatagaaatgatgaagttaatgggatttgcctcctttgactccacaaaaggtaagaaggtggatggctctgtaaatgcctatgccataaatgtctctcagaagaggaagtacaggcagtacatgaatcgaaaaggtggattcaacagacctttggatttcattgcatgagaattgaagtgttgaaggatgattttttttcccctcatcttggtcagagagtggattttgtattttgtatttaacttgcattcaaaaaacaggatctcagttctcctttcttgtaaagaaatatcatttgtggcaggcgtcaaccccattttatttgtccttattcctgtggaagcagtatatgttttcttcctgaatgctcattaggacttcttaaaaaacatgaaagtaatttggaagtaagtttatccaataaagcagtatttctacccttttagatttgataaatatttttattactaaagaatctccccagacattttcttttttttttcacacatagatttaagtatcttgattgttagtagtctaaaaatgggaagaatgaaaaagcataactagatttttctatcttctgtggtcgcccgcccccccccaaaaaaataccatttatggttctctccgcaagtataaaagcattacatgcaaaaaaaagatctcagagaaaacaaaagtaaaagaaaagcagaaaatcacctgttatctactcccagaaataatcaatttcaacattttggtatatgtttttccaggcttctttgggttgatcccacctatgagatcagaatatgtatgcagttctttctttaacccttttttctcctatgtactgtgaacatttaaaaagtacttttaaatattctttggaaacttagcttttagtaactacttggttgtatcataatttattaactaatgttttattggtaaacattggcttgcctcccatgacttgccattataattaaaactgtgactactatctgtctccattacatac

SEQ ID NO: 2370 - protein, 155 aa, Homo sapiens; identical to SEQ ID NO: 138

SEQ ID NO: 2371 - DNA, 1820 bp, Homo sapiens
gggcctttagttttccttccaagagcccataggaggttttgggtgccttctcaatgctggcatgagaaaatataaagcagatggacagtgaactttggtatattcactccttatgaatgttatgtggaaaagtggaagaacataagctgtttgtctatgctatgtttacaattggtttgctctattttgtgcatgtggacaaaaatgggggaaaaatgaaagctgtgttaggataatgggtatacggctgaattttccaggaatttctataataacaccaaatcgcatgttttaatgcccaccgtgaacaaagaagaccggaaccctcgcaactcgttttgacgttttctggtcggcggtaaaagctcggttcccggccctcccggaagttgttgcacagttgtttccgggaagcgggactccaaatgggtcgcagtcgcagccgctctccacggagggaacgtaggcgttcccggtccacatcccgggagagagaacgcaggcgccgagaaaggtccaggtctcgggagagagatcggagaaggagccgctcgcgatccccgcaccgaagacgctcccgatctccaagacgacatagatccacatctccttccccttctcgactgaaagaaagaagagatgaggaaaagaaagaaacaaaagaaacaaagagcaaagaacggcagattactgaggaagacttagagggcaaaacagaggaagaaatagaaatgatgaagttaatgggatttgcctcctttgactccacaaaaggtaagaaggtggatggctctgtaaatgcctatgccataaatgtctctcagaagaggaagtacaggcagtacatgaatcgaaaaggtggattcaacagacctttggatttcattgcatgagaattgaagtgttgaaggatgattttttttcccctcatcttggtcagagagtggattttgtattttgtatttaacttgcattcaaaaaacaggatctcagttctcctttcttgtaaagtaagaaaatcttatttatgatatatgcagttaacttaccttgcctcaacagaagaaaggttaaatattacatttttttcttttaggaaatatcatttgtggcaggcgtcaaccccattttatttgtccttattcctgtggaagcagtatatgttttcttcctgaatgctcattaggacttcttaaaaaacatgaaagtaatttggaagtaagtttatccaataaagcagtatttctacccttttagatttgataaatatttttattactaaagaatctccccagacattttcttttttttttcacacatagatttaagtatcttgattgttagtagtctaaaaatgggaagaatgaaaaagcataactagatttttctatcttctgtggtcgcccgcccccccccaaaaaaataccatttatggttctctccgcaagtataaaagcattacatgcaaaaaaaagatctcagagaaaacaaaagtaaaagaaaagcagaaaatcacctgttatctactcccagaaataatcaatttcaacattttggtatatgtttttccaggcttctttgggttgatcccacctatgagatcagaatatgtatgcagttctttctttaacccttttttctcctatgtactgtgaacatttaaaaagtacttttaaatattctttggaaacttagcttttagtaactacttggttgtatcataatttattaactaatgttttattggtaaacattggcttgcctcccatgacttgccattataattaaaactgtgactactatctgtctccattacatac

SEQ ID NO: 2372 - protein, 155 aa, Homo sapiens; identical to SEQ ID NO: 138

SEQ ID NO: 2373 - DNA, 1922 bp, Homo sapiens
gggcctttagttttccttccaagagcccataggaggttttgggtgccttctcaatgctggcatgagaaaatataaagcagatggacagtgaactttggtatattcactccttatgaatgttatgtggaaaagtggaagaacataagctgtttgtctatgctatgtttacaattggtttgctctattttgtgcatgtggacaaaaatgggggaaaaatgaaagctgtgttaggataatgggtatacggctgaattttccaggaatttctataataacaccaaatcgcatgttttaatgcccaccgtgaacaaagaagaccggaaccctcgcaactcgttttgacgttttctggtcggcggtaaaagctcggttcccggccctcccggaagttgttgcacagttgtttccgggaagcgggactccaaatgggtcgcagtcgcagccgctctccacggagggaacgtaggcgttcccggtccacatcccgggagagagaacgcaggcgccgagaaaggtccaggtctcgggagagagatcggagaaggagccgctcgcgatccccgcaccgaagacgctcccgatctccaagacgacatagatccacatctccttccccttctcgactgaaagaaagaagagatgaggaaaagaaagaaacaaaagaaacaaagagcaaagaacggcagattactgaggaagacttagagggcaaaacagaggaagaaatagaaatgatgaagttaatgggatttgcctcctttgactccacaaaagcagtacatgaatcgaaaaggtggattcaacagacctttggatttcattgcatgagaattgaagtgttgaaggatgattttttttcccctcatcttggtcagagagtggattttgtattttgtatttaacttgcattcaaaaaacaggatctcagttctcctttcttgtaaagtaagaaaatcttatttatgatatatgcagttaacttaccttgcctcaacagaagaaaggttaaatattacatttttttcttttaggaaatatcatttgtggcaggcgtcaaccccattttatttgtccttattcctgtggaagcagtatatgttttcttcctgaatgctcattaggacttcttaaaaaacatgaaagtaatttggaagtaagtttatccaataaagcagtatttctacccttttagatttgataaatatttttattactaaagaatctccccagacattttcttttttttttcacacatagatttaagtatcttgattgttagtagtctaaaaatgggaagaatgaaaaagcataactagatttttctatcttctgtggtcgcccgcccccccccaaaaaaataccatttatggttctctccgcaagtataaaagcattacatgcaaaaaaaagatctcagagaaaacaaaagtaaaagaaaagcagaaaatcacctgttatctactcccagaaataatcaatttcaacattttggtatatgtttttccaggcttctttgggttgatcccacctatgagatcagaatatgtatgcagttctttctttaacccttttttctcctatgtactgtgaacatttaaaaagtacttttaaatattctttggaaacttagcttttagtaactacttggttgtatcataatttattaactaatgttttattggtaaacattggcttgcctcccatgacttgccattataattaaaactgtgactactatctgtctccattacatacatatttttgtatgtttcattatttcctcagggtccgtacttagacgtggcattgctgagtgagattaaaagggccatgtatacatgttttaagacatttggtatctctggctaaaaggtaacagccaactctatccagtaaagtatgagcattcttgtttcagatac

SEQ ID NO: 2374 - protein, 158 aa, Homo sapiens; identical to SEQ ID NO: 2362

SEQ ID NO: 2375 - DNA, 1901 bp, Homo sapiens
gggcctttagttttccttccaagagcccataggaggttttgggtgccttctcaatgctggcatgagaaaatataaagcagatggacagtgaactttggtatattcactccttatgaatgttatgtggaaaagtggaagaacataagctgtttgtctatgctatgtttacaattggtttgctctattttgtgcatgtggacaaaaatgggggaaaaatgaaagctgtgttaggataatgggtatacggctgaattttccaggaatttctataataacaccaaatcgcatgttttaatgcccaccgtgaacaaagaagaccggaaccctcgcaactcgttttgacgttttctggtcggcggtaaaagctcggttcccggccctcccggaagttgttgcacagttgtttccgggaagcgggactccaaatgggtcgcagtcgcagccgctctccacggagggaacgtaggcgttcccggtccacatcccgggagagagaacgcaggcgccgagaaaggtccaggtctcgggagagagatcggagaaggagccgctcgcgatccccgcaccgaagacgctcccgatctccaagacgacatagatccacatctccttccccttctcgactgaaagaaagaagagatgaggaaaagaaagaaacaaaagaaacaaagagcaaagaacggcagattactgaggaagacttagagggcaaaacagaggaagaaatagaaatgatgaagttaatgggatttgcctcctttgactccacaaaaggtaagaaggtggatggctctgtaaatgcctatgccataaatgtctctcagaagaggaagtacaggcagtacatgaatcgaaaaggtggattcaacagacctttggatttcattgcatgagaattgaagtgttgaaggatgattttttttcccctcatcttggtcagagagtggattttgtattttgtatttaacttgcattcaaaaaacaggatctcagttctcctttcttgtaaagaaatatcatttgtggcaggcgtcaaccccattttatttgtccttattcctgtggaagcagtatatgttttcttcctgaatgctcattaggacttcttaaaaaacatgaaagtaatttggaagtaagtttatccaataaagcagtatttctacccttttagatttgataaatatttttattactaaagaatctccccagacattttcttttttttttcacacatagatttaagtatcttgattgttagtagtctaaaaatgggaagaatgaaaaagcataactagatttttctatcttctgtggtcgcccgcccccccccaaaaaaataccatttatggttctctccgcaagtataaaagcattacatgcaaaaaaaagatctcagagaaaacaaaagtaaaagaaaagcagaaaatcacctgttatctactcccagaaataatcaatttcaacattttggtatatgtttttccaggcttctttgggttgatcccacctatgagatcagaatatgtatgcagttctttctttaacccttttttctcctatgtactgtgaacatttaaaaagtacttttaaatattctttggaaacttagcttttagtaactacttggttgtatcataatttattaactaatgttttattggtaaacattggcttgcctcccatgacttgccattataattaaaactgtgactactatctgtctccattacatacatatttttgtatgtttcattatttcctcagggtccgtacttagacgtggcattgctgagtgagattaaaagggccatgtatacatgttttaagacatttggtatctctggctaaaaggtaacagccaactctatccagtaaagtatgagcattcttgtttcagatac

SEQ ID NO: 2376 - protein, 155 aa, Homo sapiens; identical to SEQ ID NO: 138

SEQ ID NO: 2377 - DNA, 1987 bp, Homo sapiens
gggcctttagttttccttccaagagcccataggaggttttgggtgccttctcaatgctggcatgagaaaatataaagcagatggacagtgaactttggtatattcactccttatgaatgttatgtggaaaagtggaagaacataagctgtttgtctatgctatgtttacaattggtttgctctattttgtgcatgtggacaaaaatgggggaaaaatgaaagctgtgttaggataatgggtatacggctgaattttccaggaatttctataataacaccaaatcgcatgttttaatgcccaccgtgaacaaagaagaccggaaccctcgcaactcgttttgacgttttctggtcggcggtaaaagctcggttcccggccctcccggaagttgttgcacagttgtttccgggaagcgggactccaaatgggtcgcagtcgcagccgctctccacggagggaacgtaggcgttcccggtccacatcccgggagagagaacgcaggcgccgagaaaggtccaggtctcgggagagagatcggagaaggagccgctcgcgatccccgcaccgaagacgctcccgatctccaagacgacatagatccacatctccttccccttctcgactgaaagaaagaagagatgaggaaaagaaagaaacaaaagaaacaaagagcaaagaacggcagattactgaggaagacttagagggcaaaacagaggaagaaatagaaatgatgaagttaatgggatttgcctcctttgactccacaaaaggtaagaaggtggatggctctgtaaatgcctatgccataaatgtctctcagaagaggaagtacaggcagtacatgaatcgaaaaggtggattcaacagacctttggatttcattgcatgagaattgaagtgttgaaggatgattttttttcccctcatcttggtcagagagtggattttgtattttgtatttaacttgcattcaaaaaacaggatctcagttctcctttcttgtaaagtaagaaaatcttatttatgatatatgcagttaacttaccttgcctcaacagaagaaaggttaaatattacatttttttcttttaggaaatatcatttgtggcaggcgtcaaccccattttatttgtccttattcctgtggaagcagtatatgttttcttcctgaatgctcattaggacttcttaaaaaacatgaaagtaatttggaagtaagtttatccaataaagcagtatttctacccttttagatttgataaatatttttattactaaagaatctccccagacattttcttttttttttcacacatagatttaagtatcttgattgttagtagtctaaaaatgggaagaatgaaaaagcataactagatttttctatcttctgtggtcgcccgcccccccccaaaaaaataccatttatggttctctccgcaagtataaaagcattacatgcaaaaaaaagatctcagagaaaacaaaagtaaaagaaaagcagaaaatcacctgttatctactcccagaaataatcaatttcaacattttggtatatgtttttccaggcttctttgggttgatcccacctatgagatcagaatatgtatgcagttctttctttaacccttttttctcctatgtactgtgaacatttaaaaagtacttttaaatattctttggaaacttagcttttagtaactacttggttgtatcataatttattaactaatgttttattggtaaacattggcttgcctcccatgacttgccattataattaaaactgtgactactatctgtctccattacatacatatttttgtatgtttcattatttcctcagggtccgtacttagacgtggcattgctgagtgagattaaaagggccatgtatacatgttttaagacatttggtatctctggctaaaaggtaacagccaactctatccagtaaagtatgagcattcttgtttcagatac

SEQ ID NO: 2378 - protein, 155 aa, Homo sapiens; identical to SEQ ID NO: 138

SEQ ID NO: 2379 - DNA, 1364 bp, Homo sapiens
acagttgtttccgggaagcgggactccaaatgggtcgcagtcgcagccgctctccacggagggaacgtaggcgttcccggtccacatcccgggagagagaacgcaggcgccgagaaaggtccagatctccaagacgacatagatccacatctccttccccttctcgactgaaagaaagaagagatgaggaaaagaaagaaacaaaagaaacaaagagcaaagaacggcagattactgaggaagacttagagggcaaaacagaggaagaaatagaaatgatgaagttaatgggatttgcctcctttgactccacaaaaggtaagaaggtggatggctctgtaaatgcctatgccataaatgtctctcagaagaggaagtacaggcagtacatgaatcgaaaaggtggattcaacagacctttggatttcattgcatgagaattgaagtgttgaaggatgattttttttcccctcatcttggtcagagagtggattttgtattttgtatttaacttgcattcaaaaaacaggatctcagttctcctttcttgtaaagtaagaaaatcttatttatgatatatgcagttaacttaccttgcctcaacagaagaaaggttaaatattacatttttttcttttaggaaatatcatttgtggcaggcgtcaaccccattttatttgtccttattcctgtggaagcagtatatgttttcttcctgaatgctcattaggacttcttaaaaaacatgaaagtaatttggaagtaagtttatccaataaagcagtatttctacccttttagatttgataaatatttttattactaaagaatctccccagacattttcttttttttttcacacatagatttaagtatcttgattgttagtagtctaaaaatgggaagaatgaaaaagcataactagatttttctatcttctgtggtcgcccgcccccccccaaaaaaataccatttatggttctctccgcaagtataaaagcattacatgcaaaaaaaagatctcagagaaaacaaaagtaaaagaaaagcagaaaatcacctgttatctactcccagaaataatcaatttcaacattttggtatatgtttttccaggcttctttgggttgatcccacctatgagatcagaatatgtatgcagttctttctttaacccttttttctcctatgtactgtgaacatttaaaaagtacttttaaatattctttggaaacttagcttttagtaactacttggttgtatcataatttattaactaatgttttattggtaaacattggcttgcctcccatgacttgccattataattaaaactgtgactactatctgtctccattacatac

SEQ ID NO: 2380 - protein, 135 aa, Homo sapiens
MGRSRSRSPRRERRRSRSTSRERERRRRERSRSPRRHRSTSPSPSRLKERRDEEKKETKETKSKERQITEEDLEGKTEEEIEMMKLMGFASFDSTKGKKVDGSVNAYAINVSQKRKYRQYMNRKGGFNRPLDFIA

SEQ ID NO: 2381 - DNA, 1531 bp, Homo sapiens
acagttgtttccgggaagcgggactccaaatgggtcgcagtcgcagccgctctccacggagggaacgtaggcgttcccggtccacatcccgggagagagaacgcaggcgccgagaaaggtccagatctccaagacgacatagatccacatctccttccccttctcgactgaaagaaagaagagatgaggaaaagaaagaaacaaaagaaacaaagagcaaagaacggcagattactgaggaagacttagagggcaaaacagaggaagaaatagaaatgatgaagttaatgggatttgcctcctttgactccacaaaaggtaagaaggtggatggctctgtaaatgcctatgccataaatgtctctcagaagaggaagtacaggcagtacatgaatcgaaaaggtggattcaacagacctttggatttcattgcatgagaattgaagtgttgaaggatgattttttttcccctcatcttggtcagagagtggattttgtattttgtatttaacttgcattcaaaaaacaggatctcagttctcctttcttgtaaagtaagaaaatcttatttatgatatatgcagttaacttaccttgcctcaacagaagaaaggttaaatattacatttttttcttttaggaaatatcatttgtggcaggcgtcaaccccattttatttgtccttattcctgtggaagcagtatatgttttcttcctgaatgctcattaggacttcttaaaaaacatgaaagtaatttggaagtaagtttatccaataaagcagtatttctacccttttagatttgataaatatttttattactaaagaatctccccagacattttcttttttttttcacacatagatttaagtatcttgattgttagtagtctaaaaatgggaagaatgaaaaagcataactagatttttctatcttctgtggtcgcccgcccccccccaaaaaaataccatttatggttctctccgcaagtataaaagcattacatgcaaaaaaaagatctcagagaaaacaaaagtaaaagaaaagcagaaaatcacctgttatctactcccagaaataatcaatttcaacattttggtatatgtttttccaggcttctttgggttgatcccacctatgagatcagaatatgtatgcagttctttctttaacccttttttctcctatgtactgtgaacatttaaaaagtacttttaaatattctttggaaacttagcttttagtaactacttggttgtatcataatttattaactaatgttttattggtaaacattggcttgcctcccatgacttgccattataattaaaactgtgactactatctgtctccattacatacatatttttgtatgtttcattatttcctcagggtccgtacttagacgtggcattgctgagtgagattaaaagggccatgtatacatgttttaagacatttggtatctctggctaaaaggtaacagccaactctatccagtaaagtatgagcattcttgtttcagatac

SEQ ID NO: 2382 - protein, 135 aa, Homo sapiens; identical to SEQ ID NO: 2380

SEQ ID NO: 2383 - DNA, 3243 bp, Homo sapiens
aaagaagaggaagaagattatttcaggtagagggaagagctcatgaaaatgccatggtaagaaggtggatggctctgtaaatgcctatgccataaatgtctctcagaagaggaagtacaggcagtacatgaatcgaaaaggtggattcaacagacctttggatttcattgcatgagaattgaagtgttgaaggatgattttttttcccctcatcttggtcagagagtggattttgtattttgtatttaacttgcattcaaaaaacaggatctcagttctcctttcttgtaaaaagctgaacatggttatgcctccatgttaccatacaataacaaggacagagatgccttaaaacggaggaacaaatccaaaaagaataacagcagtagcagatcaactcacaatgaaatggagaagaatagacgggctcatcttcgcttgtgcctggagaagttgaaggggctggtgccacttggacccgaatcaagtcgacacactacgttgagtttattaacaaaagccaaattgcacataaagaaacttgaagattgtgacagaaaagccgttcaccaaatcgaccagcttcagcgagagcagcgacacctgaagaggcagctggagaagctgggcattgagaggatccggatggacagcatcggctccaccgtctcctcggagcgctccgactccgacagggaagaaatcgacgttgacgtggagagcacggactatctcacaggtgatctggactggagcagcagcagtgtgagcgactctgacgagcggggcagcatgcagagcctcggcagtgatgagggctattccagcaccagcatcaagagaataaagctgcaggacagtcacaaggcgtgtcttggtctctaagagagtgggcactgcggctgtctccttgaaggttctccctgttggttctgattaggtaacgtattggacctgcccacaactcccttgcacgtaaacttcagtgtcccaccttgaccaaaatcagctttgtaactgttttcaaggaggtgcttaggattgtgggtttctgattgcatccactagcttctctttttctcgccataaaaatttgtctctgagagactatacattccaatcaatttgaagcatccaagaattcttagaccgaataagcaatgtccacatctcagcaatccccctctttgctctcctcgtgtcctctcccagacctttcttccagttttctggcttactgtgttacttgcctaggaggaatgtccaagtgtgtcttgtacttaggaaactgaaggaaacaaacttttgaaattgagatcctgatctcagaactccaaagtaagctttgaaagcagcatttaagagcacttaaccatggacctcaccaccagtgaggaagtcaggaatacctctagaaaacacgcccttcacaccgcgcatgctcattcccccgacgcgccgcgtgtggatgggagcagtatttctcactttaaaatggacaccttgatagtgtgtctctggggttgcacagctcatcaaagttccaaattgtttgttctcacaaacaaaacggtacaatctatttttgtgcgatgttcttgggacctcgctgtgttctgctatctcgaggcacattctcccctccaactttgttaatgctacttgtctctggaacatttttttttcctacctcagagataaatgagatctccatttcccacttaacacagtgattatccttttttccccccccaaaatagtgacatttggtccaattataatctattttcctattgaactttcagcaataactgagctgtggcactagcagagctagtagccattatcagtgaaagaaaaagtccacatttctactctctgttgcaggtgaacaggagaggatggtacactgttactagaactcctctccttattgattatttttggacacacccagaaacttctttatggaggcttttgggttgatagtttaaaaggctgatttttctttttggttatgatttctcccttaagtggtctccgactttgtagcatttttatttaagctaaaacagagcacatgtatatgtacataagacacattaaatctataaatactatttattcattttatataaactaatgtaatggaaaacaaattcttatgactttgtggttttatagatgttctagaaactttgtatgtaggtatctacaaaattagttcattcccctgaatatttttgcattcatatttttgaggtcttgatgttttcagcctctggcgaatctttttcattgaatttgaaccatttgtaaaatctgtgatgctgaagcagagtgtgtcacaaagtgatgagaacattactaaaatccacggacgcactgcgacctaagggctcaacggctgactcggcagcgggcagccaccccacgctcccctgcggtcactcgcacaccacagcctgaagctcccccagcgcctgcacctcgcacacagctaaggtcaaagttcaaacgcactccacacggaagctcattctatacccgaagagcagtctcagaaagcaagattacttttgtgttttttaaaaaatgattctttaatgtatttttctaaacattctgattggaagtagtggattcctaaatgattccaaagtcacctgtaattcttctgtttttgttttgttctgtcttttcttcattttggctttgggtggggggaggggcaggtgacacaaaggattttttttttttttttttaatttttggaatcttttccaataaccagctaaagatttgcactgaaatacaacttgtatgccttttgcatttttaaagcctgcttcctggatttaagcagagtgatagtgttcaaagagccagttcagcctgtaacatatttgaaaaagatatgtctgcactttgaggtcccttttgaatgccattcactagacctctcaagcattttgtttcattgctacatccaagcgcctcacaagtccacaatgcgggacagcatcaaaagctcaagactttggaaaaagcttgtgggcttgcactgggggagggaagggaacaaaatttgtgtacttctttgtttaatttagaaataaggcatccaagagatgccattattttctgtgtttcaattgttgtgcctttgagttaaactgcatttttgtcttttggttgaaatctgaaatgtactgtcccaatataaaacagtaattatttgac

SEQ ID NO: 2384 - protein, 189 aa, Homo sapiens [sequence omitted]

SEQ ID NO: 2385 - DNA, 5546 bp, Homo sapiens
aaagaagaggaagaagattatttcaggtagagggaagagctcatgaaaatgccatggtaagaaggtggatggctctgtaaatgcctatgccataaatgtctctcagaagaggaagtacaggcagtacatgaatcgaaaaggtggattcaacagacctttggatttcattgcatgagaattgaagtgttgaaggatgattttttttcccctcatcttggtcagagagtggattttgtattttgtatttaacttgcattcaaaaaacaggatctcagttctcctttcttgtaaaaagctgaacatggttatgcctccatgttaccatacaataacaaggacagagatgccttaaaacggaggaacaaatccaaaaagaataacagcagtagcagatcaactcacaatgaaatggagaagaatagacgggctcatcttcgcttgtgcctggagaagttgaaggggctggtgccacttggacccgaatcaagtcgacacactacgttgagtttattaacaaaagccaaattgcacataaagaaacttgaagattgtgacagaaaagccgttcaccaaatcgaccagcttcagcgagagcagcgacacctgaagaggcagctggagaagctgggcattgagaggatccggatggacagcatcggctccaccgtctcctcggagcgctccgactccgacagggaagaaatcgacgttgacgtggagagcacggactatctcacaggtgatctggactggagcagcagcagtgtgagcgactctgacgagcggggcagcatgcagagcctcggcagtgatgagggctattccagcaccagcatcaagagaataaagctgcaggacagtcacaaggcgtgtcttggtctctaagagagtgggcactgcggctgtctccttgaaggttctccctgttggttctgattaggtaacgtattggacctgcccacaactcccttgcacgtaaacttcagtgtcccaccttgaccaaaatcagctttgtaactgttttcaaggaggtgcttaggattgtgggtttctgattgcatccactagcttctctttttctcgccataaaaatttgtctctgagagactatacattccaatcaatttgaagcatccaagaattcttagaccgaataagcaatgtccacatctcagcaatccccctctttgctctcctcgtgtcctctcccagacctttcttccagttttctggcttactgtgttacttgcctaggaggaatgtccaagtgtgtcttgtacttaggaaactgaaggaaacaaacttttgaaattgagatcctgatctcagaactccaaagtaagctttgaaagcagcatttaagagcacttaaccatggacctcaccaccagtgaggaagtcaggaatacctctagaaaacacgcccttcacaccgcgcatgctcattcccccgacgcgccgcgtgtggatgggagcagtatttctcactttaaaatggacaccttgatagtgtgtctctggggttgcacagctcatcaaagttccaaattgtttgttctcacaaacaaaacggtacaatctatttttgtgcgatgttcttgggacctcgctgtgttctgctatctcgaggcacattctcccctccaactttgttaatgctacttgtctctggaacatttttttttcctacctcagagataaatgagatctccatttcccacttaacacagtgattatccttttttccccccccaaaatagtgacatttggtccaattataatctattttcctattgaactttcagcaataactgagctgtggcactagcagagctagtagccattatcagtgaaagaaaaagtccacatttctactctctgttgcaggtgaacaggagaggatggtacactgttactagaactcctctccttattgattatttttggacacacccagaaacttctttatggaggcttttgggttgatagtttaaaaggctgatttttctttttggttatgatttctcccttaagtggtctccgactttgtagcatttttatttaagctaaaacagagcacatgtatatgtacataagacacattaaatctataaatactatttattcattttatataaactaatgtaatggaaaacaaattcttatgactttgtggttttatagatgttctagaaactttgtatgtaggtatctacaaaattagttcattcccctgaatatttttgcattcatatttttgaggtcttgatgttttcagcctctggcgaatctttttcattgaatttgaaccatttgtaaaatctgtgatgctgaagcagagtgtgtcacaaagtgatgagaacattactaaaatccacggacgcactgcgacctaagggctcaacggctgactcggcagcgggcagccaccccacgctcccctgcggtcactcgcacaccacagcctgaagctcccccagcgcctgcacctcgcacacagctaaggtcaaagttcaaacgcactccacacggaagctcattctatacccgaagagcagtctcagaaagcaagattacttttgtgttttttaaaaaatgattctttaatgtatttttctaaacattctgattggaagtagtggattcctaaatgattccaaagtcacctgtaattcttctgtttttgttttgttctgtcttttcttcattttggctttgggtggggggaggggcaggtgacacaaaggattttttttttttttttttaatttttggaatcttttccaataaccagctaaagatttgcactgaaatacaacttgtatgccttttgcatttttaaagcctgcttcctggatttaagcagagtgatagtgttcaaagagccagttcagcctgtaacatatttgaaaaagatatgtctgcactttgaggtcccttttgaatgccattcactagacctctcaagcattttgtttcattgctacatccaagcgcctcacaagtccacaatgcgggacagcatcaaaagctcaagactttggaaaaagcttgtgggcttgcactgggggagggaagggaacaaaatttgtgtacttctttgtttaatttagaaataaggcatccaagagatgccattattttctgtgtttcaattgttgtgcctttgagttaaactgcatttttgtcttttggttgaaatctgaaatgtactgtcccaatataaaacagtaattatttgacctttgcactgtttgtctggtccttttcagtttgattgcatataaatgtggaacttgatagatctctatatttttaatgcacttgtgataaactggcagcagggttagacattactttcaaagcttgaggtagaccgagtcagcatgctagacaggcttctctctctaaccaaaactgtaatcttcaggaccagcaaactcagcccaaggcagctaatccccccaaccccatcctccgcgccccgtgcggctgatcggcagccctgattcgccaatttgtcctctctcattcactgatccaccagcctgactgctaagagctatagtctttttagttgttttgtctttttaagcaagatgaaaacctttctattagggattttggggttgggaggggatgggcagagatataaaccccagcctttaagactttgacaattgtacgtaaatacagatgtgtataaatataggcacatgcatatttttatgtgaaagttgattttaaaaaactaaaaaaatctaaactgcactcttattgataccatcataacgcaagtgggaaaaataagagtacgcagtctaatttaatttcatgcagtgggaaaatatatatgtgtgcttctgtaacatcctgaaaacatagctttccatcccctgttggctttgaatggtgggccgagcacccaggtcgtctgtattttggttttcttttgctaagcagagatcttgaattcttcaaggtgctgatagcaactgctggctcctttctgtagtcacacacctaatgctagtttagtgattcaaaatgcatcacatttttaggcaggacctagattttccctgtcaacctaagatgaaaataatttcagtgttgattcagaactgaacattaagtaggccctcgtcctgcagttggccacttgagtgttttgttttgtttttattttttaaggtgggcattttcctttaacctctactttttcaaaagcaacaaaggggcctcaacctgagtttcctatgggcctctcttctgcatccccaaagcggccaagagcaaatcctgggggataagaaaaaagtgtaaactaggtaggattgtgatgctcaaaataaccatctagcaatatcttggagcttgagaatagattttgtgggcttatttcttcttgcctcttccccatcctttcaagagagaacttatttttgaaaagtatctatatatacacacacacacacacacacacatattattatttaggtttttataccatactgtattggcgagaataccactatcattgtcctttacagtctatttcttcccccaagtcttggtctttttttattttctattttttcatgaaccacacaggagactttaacatcctggtcttttctgtttcttctttgtttccccaagtttgtctgtccccctttgccttccctgagtgttgaacatcaggtagtaaaaggctaaacgcaatttcttgcatgtcaatctattctttttctatgtttgactctgatgcagtgtgtttagcgtgtctagtagctggctactcctatttaaaaactcttcctggtagaagacaacccaaagacccttttcgatgaggtggtttctcattctacatcctctgatctctatagactgtaggatgctttgctttcaaagataactgggttagagggtggggtgtgcaataggtgatttatcatggtttttttcattatcaatattacatggatgattttctcagattcttctgaaagaagaaattgacaggcactgctagattcagctattgaatggctgaagagattgagtatttgaccttctctcaaaatcataaagtgagaattcataaggcacccaatgttaagatttatccagatttttacattttgatttcttctctctgtggggtggcaagttgagggagcattcttcattttagcttttacctgacaaccaaacttgcctttaccccatccctagaattggtgctcttggaatattgctgttaccatcatttttggggggccatcttcctaatgctacacacagcctgacaggggagcagcagatgaaagggtatgctattctgtttccagatgtttctttatgtaaatatgacgccaatgtaaatcctgtgtcaagatcatagagaatggtgctttttactacagttagcacatgcatttttagaaactactacatgttttagagaatctttgctgtgtatatgtaaactgtattgttcaactgttaacaaataataaattatttcattattaaagaaa

SEQ ID NO: 2386 - protein, 189 aa, Homo sapiens [sequence omitted]

SEQ ID NO: 2387 - DNA, 842 bp, Homo sapiens
aggcagtacatgaatcgaaaaggtggattcaacagacctttggatttcattgcatgagaattgaagtgttgaaggatgattttttttcccctcatcttggtcagagagtggattttgtattttgtatttaacttgcattcaaaaaacaggatctcagttctcctttcttgtaaagtaagaaaatcttatttatgatatatgcagttaacttaccttgcctcaacagaagaaaggttaaatattacatttttttcttttaggaaatatcatttgtggcaggcgtcaaccccattttatttgtccttattcctgtggaagcagtatatgttttcttcctgaatgctcattaggacttcttaaaaaacatgaaagtaatttggaagtaagtttatccaataaagcagtatttctacccttttagatttgataaatatttttattactaaagaatccgcccccccccaaaaaaataccatttatggttctctccgcaagtataaaagcattacatgcaaaaaaaagatctcagagaaaacaaaagtaaaagaaaagcagaaaatcacctgttatctactcccagaaataatcaatttcaacattttggtatatgtttttccaggcttctttgggttgatcccacctatgagatcagaatatgtatgcagttctttctttaacccttttttctcctatgtactgtgaacatttaaaaagtacttttaaatattctttggaaacttagcttttagtaactacttggttgtatcataatttattaactaatgttttattggtaaacattggcttgcctcccatgacttgccattataattaaaactgtg

SEQ ID NO: 2388 - protein, 55 aa, Homo sapiens
MQKKDLRENKSKRKAENHLLSTPRNNQFQHFGICFSRLLWVDPTYEIRICMQFFL

SEQ ID NO: 2389 - DNA, 3284 bp, Homo sapiens
gagtcggggataaacactccgcggcggtggcggctgctgctctgctccgggttctgtcactgtgtcggcggtgcccagctcactggccccctccctctcttgtcgagcgtggttgccagagaggctccctcagccctgctccgcggggtccacagcgggctccacagcgggctccatagcgggctccacagcggtccggcggcggcagcgagcccgtgggcagtgggggttggtcccgtggctccggcccccggtgcagaatggcggcggcggttcggatgaacatccagatgctgctggaggcggccgactatctggagcggcgggagagagaagctgaacatggttatgcctccatgttaccatacaataacaaggacagagatgccttaaaacggaggaacaaatccaaaaagaataacagcagtagcagatcaactcacaatgaaatggagaagaatagacgggctcatcttcgcttgtgcctggagaagttgaaggggctggtgccacttggacccgaatcaagtcgacacactacgttgagtttattaacaaaagccaaattgcacataaagaaacttgaagattgtgacagaaaagccgttcaccaaatcgaccagcttcagcgagagcagcgacacctgaagaggcagctggagaagctgggcattgagaggatccggatggacagcatcggctccaccgtctcctcggagcgctccgactccgacagggaagaaatcgacgttgacgtggagagcacggactatctcacaggtgatctggactggagcagcagcagtgtgagcgactctgacgagcggggcagcatgcagagcctcggcagtgatgagggctattccagcaccagcatcaagagaataaagctgcaggacagtcacaaggcgtgtcttggtctctaagagagtgggcactgcggctgtctccttgaaggttctccctgttggttctgattaggtaacgtattggacctgcccacaactcccttgcacgtaaacttcagtgtcccaccttgaccaaaatcagctttgtaactgttttcaaggaggtgcttaggattgtgggtttctgattgcatccactagcttctctttttctcgccataaaaatttgtctctgagagactatacattccaatcaatttgaagcatccaagaattcttagaccgaataagcaatgtccacatctcagcaatccccctctttgctctcctcgtgtcctctcccagacctttcttccagttttctggcttactgtgttacttgcctaggaggaatgtccaagtgtgtcttgtacttaggaaactgaaggaaacaaacttttgaaattgagatcctgatctcagaactccaaagtaagctttgaaagcagcatttaagagcacttaaccatggacctcaccaccagtgaggaagtcaggaatacctctagaaaacacgcccttcacaccgcgcatgctcattcccccgacgcgccgcgtgtggatgggagcagtatttctcactttaaaatggacaccttgatagtgtgtctctggggttgcacagctcatcaaagttccaaattgtttgttctcacaaacaaaacggtacaatctatttttgtgcgatgttcttgggacctcgctgtgttctgctatctcgaggcacattctcccctccaactttgttaatgctacttgtctctggaacatttttttttcctacctcagagataaatgagatctccatttcccacttaacacagtgattatccttttttccccccccaaaatagtgacatttggtccaattataatctattttcctattgaactttcagcaataactgagctgtggcactagcagagctagtagccattatcagtgaaagaaaaagtccacatttctactctctgttgcaggtgaacaggagaggatggtacactgttactagaactcctctccttattgattatttttggacacacccagaaacttctttatggaggcttttgggttgatagtttaaaaggctgatttttctttttggttatgatttctcccttaagtggtctccgactttgtagcatttttatttaagctaaaacagagcacatgtatatgtacataagacacattaaatctataaatactatttattcattttatataaactaatgtaatggaaaacaaattcttatgactttgtggttttatagatgttctagaaactttgtatgtaggtatctacaaaattagttcattcccctgaatatttttgcattcatatttttgaggtcttgatgttttcagcctctggcgaatctttttcattgaatttgaaccatttgtaaaatctgtgatgctgaagcagagtgtgtcacaaagtgatgagaacattactaaaatccacggacgcactgcgacctaagggctcaacggctgactcggcagcgggcagccaccccacgctcccctgcggtcactcgcacaccacagcctgaagctcccccagcgcctgcacctcgcacacagctaaggtcaaagttcaaacgcactccacacggaagctcattctatacccgaagagcagtctcagaaagcaagattacttttgtgttttttaaaaaatgattctttaatgtatttttctaaacattctgattggaagtagtggattcctaaatgattccaaagtcacctgtaattcttctgtttttgttttgttctgtcttttcttcattttggctttgggtggggggaggggcaggtgacacaaaggattttttttttttttttttaatttttggaatcttttccaataaccagctaaagatttgcactgaaatacaacttgtatgccttttgcatttttaaagcctgcttcctggatttaagcagagtgatagtgttcaaagagccagttcagcctgtaacatatttgaaaaagatatgtctgcactttgaggtcccttttgaatgccattcactagacctctcaagcattttgtttcattgctacatccaagcgcctcacaagtccacaatgcgggacagcatcaaaagctcaagactttggaaaaagcttgtgggcttgcactgggggagggaagggaacaaaatttgtgtacttctttgtttaatttagaaataaggcatccaagagatgccattattttctgtgtttcaattgttgtgcctttgagttaaactgcatttttgtcttttggttgaaatctgaaatgtactgtcccaatataaaacagtaattatttgac

SEQ ID NO: 2390 - protein, 221 aa, Homo sapiens; identical to SEQ ID NO: 140

SEQ ID NO: 2391 - DNA, 5587 bp, Homo sapiens; identical to SEQ ID NO: 139

SEQ ID NO: 2392 - protein, 221 aa, Homo sapiens; identical to SEQ ID NO: 140

SEQ ID NO: 2393 - DNA, 5583 bp, Homo sapiens
gagatatgtgaagatctctgtgcttggacttcccaagtcaatacatatttgcctctatttttattctcctttggccattgcagtcgagatcaaggagggaggcccagactcttcaggacacttgctcctgcagcaagcagaagtgaggcagctgcctccctcccaaccttggaatcctttctacccctgactctcaatgatgtgaacaggaaataaaggaatcttttattttgcattcattggccttataaaacccttgctaattttgtaaatgtaaagaaatagtacttttagcataagcactttctgtgtttccatagaaaatggattagattttccattaattattttaatgacaaaagatgtccattttcttcaaggaagtattcagaaaagtggattttgccagatagcctctgtctgcctagtgagacatttttgagttccctattgattgtaaaaggaatatcatagtgctcttattatctgtgtttgctcacagcaattctccttctacagaggaagctaggattgaaagaataactgctaccatatacagagtactccctgtcagaccctgacccaagggcttccataccttgtctcagtcaatacccatgacagccctcccagggaggcgcttgtcaccctcattctactgatgaggaaactgaggctacacagagttaagtaatttgcccagggtcacacagggagtaagtggcagagccaggatctcaaacatttactcttttttaaatattaacttcatttttaatttttgtgggtatgtagtaggtctgtatatttatggggtacatgaggtgtttgatacaggcatgcaatgcataataatcacatcaagtaaaatgtggtgttcatcccctcaagcatttatcctttgtgttgcaaaccatccagttctactcttccagttatttaaaaatatacaattattttgactatagttaccctgttgtgctatcaaatactaggtgttatccattcttttaagctattttttttttaacccattaaccatccccacctcctgcccacccccgctacctttcccagcctctggtaaccctcctactctctatgtctgtgagttcaattgttttgatttttacatccaaaaaataagtgagaatatgcaacgtttgtctttctgtgcctggcttatttcacttaacctaatgacctccagttccatccatgttgttgcaaatgacaggatcccattctttttatggctgaatagtactccattatgtatatgtaccacatttctccagacatttactcttaatcactgcattaatatttggttgcatagtgactgagtcagaattttttaaaaaaattaaaaatcaacaaaatttgggatacttaaaacttactgaatagaatctatagttgtatctaaatttgttattactagttatgggccatacttgattcagagcatgacttattatagttcaaagattggtttctttatgccactgtagaccaaaggtatatcagcttattcagaataattaaagttatgtttctgaagagtcagaaggtgaagtttgttagtccatggcctaggtacaaagcagtgtggatcagtgctaaaggaagaggcagccgggtgccaggaagatgggaggtagctcttggcaacagagggaagactgaagaagatgtgatgggaggagagtcaacttcctgggtcacactgaggtgtcgggtggcttcctgttgaggatatatggcaaaacccctgctagttccccaaatgggagtttgacctggtttaaaatgggacagcagggcacaggagtagtcagaactgagaaaagagagctgagacgggtgtttgttctgcttgttttggatctgggagctccgtgggtactcagggctggcagagggattctagatcccaggagtttgtgtgtctgtatgtgtgtctgtgtatgtgtgtgtgtgtcagggttggagagctttggtaggagctgtacataacagaggggtctgtttgcttttttatctggttcagggattggatttcactactgtatgatagaactgagtctacttaatatatttcattgctctcctgtggttggcccgggcaccagtgtggggatgtctgcaggcagtggcatgtgggcagggggcagccatcaggctgcagcagtgaggcgccggagaaggccaaggcagacactgccaaagacagagttggctttgggtctctgcaaaaatccagaaagaattctggtcctatttttgtagaactaggccagaaaacactgaatgaacaagtattagtctcagctggaattagtcaaatggcttatttctagtttcacgactaggagtgttctttggaaacccacatttgggtagtgaaaattgcactttctgggcaagactcctataaggctagaaatgacaatgcatcaaaagatgactttattatatttttatcagtggacaaacttcctaaaaaaattcacacactcatatctgcatataaaccaacatcataaaagtactaaaatgacactgttctgaatcatgcagtctttgcaaataacaagctggctgaaaaatatctaaatataattttaatttttgaactttttcttctaattggaaaattagctcatacctcctcccaagcagctgggattacaggcacacaccacaatgcctggcaaattttcctatttttgtagagatgaggtttcaccatattggccaggctggtctcgaactcctgacctcaagtaattcacccaccttggcctcccaaagtgctgggattacaggcgtgagccaccacacccagccaaatttttgtattagtagaaacagggtttcactgtgttggcccagctggtctcaaactcctaacctcaagtgatccacccgcctttgcctcccaaagtgctgggattacaagcatgagccaccacgcctgagctttctgcagagcgctttcatcaatgtccttctctcttgtcctccctgcagaagaaatcgacgttgacgtggagagcacggactatctcacaggtgatctggactggagcagcagcagtgtgagcgactctgacgagcggggcagcatgcagagcctcggcagtgatgagggctattccagcaccagcatcaagagaataaagctgcaggacagtcacaaggcgtgtcttggtctctaagagagtgggcactgcggctgtctccttgaaggttctccctgttggttctgattaggtaacgtattggacctgcccacaactcccttgcacgtaaacttcagtgtcccaccttgaccaaaatcagctttgtaactgttttcaaggaggtgcttaggattgtgggtttctgattgcatccactagcttctctttttctcgccataaaaatttgtctctgagagactatacattccaatcaatttgaagcatccaagaattcttagaccgaataagcaatgtccacatctcagcaatccccctctttgctctcctcgtgtcctctcccagacctttcttccagttttctggcttactgtgttacttgcctaggaggaatgtccaagtgtgtcttgtacttaggaaactgaaggaaacaaacttttgaaattgagatcctgatctcagaactccaaagtaagctttgaaagcagcatttaagagcacttaaccatggacctcaccaccagtgaggaagtcaggaatacctctagaaaacacgcccttcacaccgcgcatgctcattcccccgacgcgccgcgtgtggatgggagcagtatttctcactttaaaatggacaccttgatagtgtgtctctggggttgcacagctcatcaaagttccaaattgtttgttctcacaaacaaaacggtacaatctatttttgtgcgatgttcttgggacctcgctgtgttctgctatctcgaggcacattctcccctccaactttgttaatgctacttgtctctggaacatttttttttcctacctcagagataaatgagatctccatttcccacttaacacagtgattatccttttttccccccccaaaatagtgacatttggtccaattataatctattttcctattgaactttcagcaataactgagctgtggcactagcagagctagtagccattatcagtgaaagaaaaagtccacatttctactctctgttgcaggtgaacaggagaggatggtacactgttactagaactcctctccttattgattatttttggacacacccagaaacttctttatggaggcttttgggttgatagtttaaaaggctgatttttctttttggttatgatttctcccttaagtggtctccgactttgtagcatttttatttaagctaaaacagagcacatgtatatgtacataagacacattaaatctataaatactatttattcattttatataaactaatgtaatggaaaacaaattcttatgactttgtggttttatagatgttctagaaactttgtatgtaggtatctacaaaattagttcattcccctgaatatttttgcattcatatttttgaggtcttgatgttttcagcctctggcgaatctttttcattgaatttgaaccatttgtaaaatctgtgatgctgaagcagagtgtgtcacaaagtgatgagaacattactaaaatccacggacgcactgcgacctaagggctcaacggctgactcggcagcgggcagccaccccacgctcccctgcggtcactcgcacaccacagcctgaagctcccccagcgcctgcacctcgcacacagctaaggtcaaagttcaaacgcactccacacggaagctcattctatacccgaagagcagtctcagaaagcaagattacttttgtgttttttaaaaaatgattctttaatgtatttttctaaacattctgattggaagtagtggattcctaaatgattccaaagtcacctgtaattcttctgtttttgttttgttctgtcttttcttcattttggctttgggtggggggaggggcaggtgacacaaaggattttttttttttttttttaatttttggaatcttttccaataaccagctaaagatttgcactgaaatacaacttgtatgccttttgcatttttaaagcctgcttcctggatttaagcagagtgatagtgttcaaagagccagttcagcctgtaacatatttgaaaaagatatgtctgcactttgaggtcccttttgaatgccattcactagacctctcaagcattttgtttcattgctacatccaagcgcctcacaagtccacaatgcgggacagcatcaaaagctcaagactttggaaaaagcttgtgggcttgcactgggggagggaagggaacaaaatttgtgtacttctttgtttaatttagaaataaggcatccaagagatgccattattttctgtgtttcaattgttgtgcctttgagttaaactgcatttttgtcttttggttgaaatctgaaatgtactgtcccaatataaaacagtaattatttgacc

SEQ ID NO: 2394 - protein, 93 aa, Homo sapiens
MDLTTSEEVRNTSRKHALHTAHAHSPDAPRVDGSSISHFKMDTLIVCLWGCTAHQSSKLFVLTNKTVQSIFVRCSWDLAVFCYLEAHSPLQLC

SEQ ID NO: 2395 - DNA, 1770 bp, Homo sapiens
tgcacttgtgataaactggcagcagggttagacattactttcaaagcttgaggtagaccgagtcagcatgctagacaggcttctctctctaaccaaaactgtaatcttcaggaccagcaaactcagcccaaggcagctaatccccccaaccccatcctccgcgccccgtgcggctgatcggcagccctgattcgccaatttgtcctctctcattcactgatccaccagcctgactgctaagagctatagtctttttagttgttttgtctttttaagcaagatgaaaacctttctattagggattttggggttgggaggggatgggcagagatataaaccccagcctttaagactttgacaattgtacgtaaatacagatgtgtataaatataggcacatgcatatttttatgtgaaagttgattttaaaaaactaaaaaaatctaaactgcactcttattgataccatcataacgcaagtgggaaaaataagagtacgcagtctaatttaatttcatgcagtgggaaaatatatatgtgtgcttctgtaacatcctgaaaacatagctttccatcccctgttggctttgaatggtgggccgagcacccaggtcgtctgtattttggttttcttttgctaagcagagatcttgaattcttcaaggtgctgatagcaactgctggctcctttctgtagtcacacacacacacatattattatttaggtttttataccatactgtattggcgagaataccactatcattgtcctttacagtctatttcttcccccaagtcttggtctttttttattttctattttttcatgaaccacacaggagactttaacatcctggtcttttctgtttcttctttgtttccccaagtttgtctgtccccctttgccttccctgagtgttgaacatcaggtagtaaaaggctaaacgcaatttcttgcatgtcaatctattctttttctatgtttgactctgatgcagtgtgtttagcgtgtctagtagctggctactcctatttaaaaactcttcctggtagaagacaacccaaagacccttttcgatgaggtggtttctcattctacatcctctgatctctatagactgtaggatgctttgctttcaaagataactgggttagagggtggggtgtgcaataggtgatttatcatggtttttttcattatcaatattacatggatgattttctcagattcttctgaaagaagaaattgacaggcactgctagattcagctattgaatggctgaagagattgagtatttgaccttctctcaaaatcataaagtgagaattcataaggcacccaatgttaagatttatccagatttttacattttgatttcttctctctgtggggtggcaagttgagggagcattcttcattttagcttttacctgacaaccaaacttgcctttaccccatccctagaattggtgctcttggaatattgctgttaccatcatttttggggggccatcttcctaatgctacacacagcctgacaggggagcagcagatgaaagggtatgctattctgtttccagatgtttctttatgtaaatatgacgccaatgtaaatcctgtgtcaagatcatagagaatggtgctttttactacagttagcacatgcatttttagaaactactacatgttttagagaatctttgctgtgtatatgtaaactgtattgttcaactgttaacaaataataaattatttcattattaaagaaa

SEQ ID NO: 2396 - protein, 42 aa, Homo sapiens
MAEEIEYLTFSQNHKVRIHKAPNVKIYPDFYILISSLCGVAS

SEQ ID NO: 2397 - DNA, 2352 bp, Homo sapiens
gcagcagttgagtccatgtaagatgattgtgcacgtgtgtgtgtgtgtgtgtgtgtgtgtgtgtgtcctcactcacttaaaaaagaccatttctgtgcattctttatgctggaaccctcctctgcctccctctccaggaaatcccataggatcccatacctgctttagaatgtgtgtgagacacttcccagtgcctggcatgtggtaggagctcagtacatgtaaactgttttcctttgaccactcaaagtagtcacttgttggggaggccaatggcggcttccccggtctctgagctgatgggcgtctggtccctgcctccccttccttcactggctgatgacaaatacctgaatgtcatcacatcctccgtgtcctcatctgttattctggaacacaggccagggagggtacagggtagtcccccttcaacagaggctggcctttcttgggatgtgggctggctggtgttggtccaaggatggatgcagagggtgaggcacccatcctgctagtccggccggatgctggcaggagggcggggtgaggaggggcggagcttccagaacaaaggagaatggggagcccaggggccagcctaggcatcaaaaaggctctgcagagtgaacaggccacagcactgcctgcctctgccccagcagtcagccagccgaccgcgcctgctccctcctgcttgcccaaggccgggcaagtcatccccactctgcttcgagaggccccgttttccagcgtgattgcgccgacactgctctgtgggtttctcttcttggcgtgggttgctgctgaggttccagaggagagcagcaggatggccgggagcggagccaggagtgaggaaggccgccggcagcatgccttcgtcccggaaccttttgatggggccaatgtcgtcccaaacctctggctgcacagctttgaagtcatcaatgacctcaaccattgggaccatatcaccaagctaaggttcctgaaagagtccctcagaggagaggccctgggtgtctacaataggctcagtccccaggaccagggagactatgggactgtgaaagaggccctcctgaaggcctttggggtccctggggctgcccccagccacctgcccaaagagatcgtctttgccaacagcatgggtaagggctactatctcaaggggaagattggcaaagtgcccgtgaggttcctggtggactctggggcccaggtctctgtggtccacccaaacttgtgggaggaggtcactgatggcgatctggacaccctgcagccctttgagaatgtggtaaaggtggccaatggtgctgaaatgaagatcctgggtgtctgggatacagcggtgtccctaggcaagctgaagctgaaggcacagttcctagtggccaatgcgagtgccgaggaagccatcattggcactgatgtgctccaggaccacaatgctatcctggactttgagcaccgcacatgcaccctgaaagggaagaagtttcgccttctgcctgtgggagggtccctggaagatgagtttgacctggagctcatagaggaggacccctcctcagaagaagggcggcaggagctatcccactgagaagccaccttttctttaacctcctaaatattggtgggaagacccaccgctgtggggggggttgcatatcctcatgggggtcactgggcttggccagtctgcttatcaactcttgctcttctctcccctttgcctccctctgcaggggccttaatctgcccctggtaggggaggcttccactgaacaggcacaggtgagggagagcaggctggcttagagggacagggtccccatggtcatcaagctgctgttgatgacaaagactcaaaggctggaagagctcccaaggaagctagaaatgcttgtctttgaaagaactgtgggaccccttcagattccctgaggtatggcttggtcactctcaggtcctcaaagcctgtcttagttgggctgggtcctagctgcagggtctttgtgagggtcacagttgctctgggacacctccctgaagagcctttccacctgtacaatcgtattttctttctgtcatttgctttgaagcccattgtgccttatgccaataattcaattgctgcaaacaccaataaagattgattcatggaaaaaccatgtaatgtgttgattgaggatgagaggaatgtgagagggagtcagcatcaaagacaagggagattcacatgtctactgagtgcctagctggaggtataagaacatatacacagggatgacaggtcttggattttctaagacagtctcagcataaaatattttgacttattcc

SEQ ID NO: 2398 - protein, 343 aa, Homo sapiens
MGSPGASLGIKKALQSEQATALPASAPAVSQPTAPAPSCLPKAGQVIPTLLREAPFSSVIAPTLLCGFLFLAWVAAEVPEESSRMAGSGARSEEGRRQHAFVPEPFDGANVVPNLWLHSFEVINDLNHWDHITKLRFLKESLRGEALGVYNRLSPQDQGDYGTVKEALLKAFGVPGAAPSHLPKEIVFANSMGKGYYLKGKIGKVPVRFLVDSGAQVSVVHPNLWEEVTDGDLDTLQPFENVVKVANGAEMKILGVWDTAVSLGKLKLKAQFLVANASAEEAIIGTDVLQDHNAILDFEHRTCTLKGKKFRLLPVGGSLEDEFDLELIEEDPSSEEGRQELSH

SEQ ID NO: 2399 - DNA, 2172 bp, Homo sapiens
gcagcagttgagtccatgtaagatgattgtgcacgtgtgtgtgtgtgtgtgtgtgtgtgtgtgtgtcctcactcacttaaaaaagaccatttctgtgcattctttatgctggaaccctcctctgcctccctctccaggaaatcccataggatcccatacctgctttagaatgtgtgtgagacacttcccagtgcctggcatgtggtaggagctcagtacatgtaaactgttttcctttgaccactcaaagtagtcacttgttggggaggccaatggcggcttccccggtctctgagctgatgggcgtctggtccctgcctccccttccttcactggctgatgacaaatacctgaatgtcatcacatcctccgtgtcctcatctgttattctggaacacaggccagggagggtacagggtagtcccccttcaacagaggctggcctttcttgggatgtgggctggctggtgttggtccaaggatggatgcagagggtgaggcacccatcctgctagtccggccggatgctggcaggagggcggggtgaggaggggcggagcttccagaacaaaggagaatggggagcccaggggccagcctaggcatcaaaaaggctctgcagagtgaacaggccacagcactgcctgcctctgccccagcagtcagccagccgaccgcgcctgctccctcctgcttgcccaaggccgggcaagtcatccccactctgcttcgagaggccccgttttccagcgtgattgcgccgacactgctctgtgggtttctcttcttggcgtgggttgctgctgaggttccagaggagagcagcaggatggccgggagcggagccaggagtgaggaaggccgccggcagcatgccttcgtcccggaaccttttgatggggccaatgtcgtcccaaacctctggctgcacagctttgaagtcatcaatgacctcaaccattgggaccatatcaccaagctaaggttcctgaaagagtccctcagaggagaggccctgggtgtctacaataggctcagtccccaggaccagggagactatgggactgtgaaagaggccctcctgaaggcctttggggtccctggggctgcccccagccacctgcccaaagagatcgtctttgccaacagcatgggtaagggctactatctcaaggggaagattggcaaagtgcccgtgaggttcctggtggactctggggcccaggtctctgtggtccacccaaacttgtgggaggaggtcactgatggcgatctggacaccctgcagccctttgagaatgtggtaaaggtggccaatggtgctgaaatgaagatcctgggtgtctgggatacagcggtgtccctaggcaagctgaagctgaaggcacagttcctagtggccaatgcgagtgccgaggaagccatcattggcactgatgtgctccaggaccacaatgctatcctggactttgagcaccgcacatgcaccctgaaagggaagaagtttcgccttctgcctgtgggagggtccctggaagatgagtttgacctggagctcatagaggaggacccctcctcagaagaagggcggcaggagctatcccactgagaagccaccttttctttaacctcctaaatattggtgggaagacccaccgctgtggggggggttgcatatcctcatgggggtcactgggcttggccagtctgcttatcaactcttgctcttctctcccctttgcctccctctgcaggggccttaatctgcccctggtaggggaggcttccactgaacaggcacaggtgagggagagcaggctggcttagagggacagggtccccatggtcatcaagctgctgttgatgacaaagactcaaaggctggaagagctcccaaggaagctagaaatgcttgtctttgaaagaactgtgggaccccttcagattccctgaggtatggcttggtcactctcaggtcctcaaagcctgtcttagttgggctgggtcctagctgcagggtctttgtgagggtcacagttgctctgggacacctccctgaagagcctttccacctgtacaatcgtattttctttctgtcatttgctttgaagcccattgtgccttatgccaataattcaattgctgcaaacaccaataaagattgattcatgg

SEQ ID NO: 2400 - protein, 343 aa, Homo sapiens; identical to SEQ ID NO: 2398

SEQ ID NO: 2401 - DNA, 2388 bp, Homo sapiens
cgggggggaggggcggcgaggcgaggcctgcggagcggaggaagacaaacataaagatgaagtgcttaattcaaggtcacacaatgtcggggatggacctccagatttccttactgacctgcattatcttgtggatacctgagtgaattccacaccacccattttatagatgaaaccactgagacatggagcaattgactgagtagtcactgccccacccctgcctggagcctcacacatgactcgcctcctctcagtgaccacagatggagtcttgctgtgtcaccaggatggagtgcagtggcgcaatctcggctcactgcaacctctgcttcccgggttcaagtgattctcctgcctcagcaacccgagtagctggcactacaggcgaaaacaagctcagggctcccactgattgtacattatggtgagacgtggtcttgtaacacagtggttaagaatgtgactttggagccagcctgctaggggctgaattctgactcagccatttactaactgtgtgaccttagggaggaggacctggttgatagaagaatttatctcgtagtcttaacatccactgtaattccaaactttgaggacgatagagatcagtgggctttgactgcccagcatgcagtctccattcttaggtcacagaattttccacactccttgacagaggtgcttaacccttatccatcagcattctcagacagcacctccggttagggacagtatctgaccgtccgacatccctgcagcccccatgtgtcacacagactcagcctcaggtagatggtttccgtagatggtggctttctttggacccttgacatcaaccagttactatttgactcttctgcagaaccccatgttgacccctgctttgaggtggcagagttaacactactcttcgttataagctctcgtctggggcaactcagaagaacccagagacagactcccagactcggccagaggctgatgccaactccttccagctctcacggtaaccatgaggcccctgcgtgtttctgttgtggaggtcccagagggaactgtatggacagacacagcccgaagggccatctgcctcaagccacagcagcacagaattctaaagattgtggggaaggatggggccaaggggaccagatgtgcagaggtaatgaataccagggaatcaggaaaccactggatcagttctttgagccacagaacaacactcatcccagcagctgggaagctatctgcaaaagtccatctgcagaaagggcttcctggtcttgcgtgtggctgggccatttctctggatgcaggtttttcattatacagtcttctcaaagaaccacctgctctcaacaccttctcggtgactccatttcccctcctctgggctcctggaatgccacaatggccccaccttagccaggcagctgtgatgagaggtgttgacccaactgcctctctgctggctcactgaatcaggtggaaggggctggggacagcacagtcttgcattgtggttggggacctgggccatccagaggcaggactgtccaaaggcagggtactgctgggattccgccaggcactgggtgatgcatggcatagggagctgaagagggacaggctcttggccaggaaaaacagccccagagccacaggtgtgccatcgagtcttcctcctctcccatccttaatcactcctgtttggtgacagcacacagctaggcctggagcccagcaaagagcccctgggtcccagaggaagttgttctgggggctggagacaatcacaaatgccaggtttgtgagccccagactctggttcatagcaagaggcagacttgtgaacaaaccaccagatcacaccgtaaaacacgctcaacgaggagtgggtgccctttctagggacaggcagaaggctccatggagtgacctttgaatggggacataaaagtggatcccttcaacagcccctgcacagccccaagtcaggcctccagcccttggactcacagatgtcctctgtagacgactggatgtcctcccgtgctaccctttacccctgcagcgaggggcacagagccagagccctccaggtcctcaccactggcatcaccaacatagtggacattttccctctcagaatgaaaagggagtgaaatttcccgtgatctttccacaaatgaccagcttggggagtgggagaggaagtgctgcagtgcctggggaaggggccctggaacagttcctggaaatggagaggggtggatagggtggagacaatgctcatggagtgcagtatggggcctacccagagttgcttggccacccctctgcctctgaatcaggggtgatcaatgaaggaaaattactgca

SEQ ID NO: 2402 - protein, 210 aa, Homo sapiens
MVSVDGGFLWTLDINQLLFDSSAEPHVDPCFEVAELTLLFVISSRLGQLRRTQRQTPRLGQRLMPTPSSSHGNHEAPACFCCGGPRGNCMDRHSPKGHLPQATAAQNSKDCGEGWGQGDQMCRGNEYQGIRKPLDQFFEPQNNTHPSSWEAICKSPSAERASWSCVWLGHFSGCRFFIIQSSQRTTCSQHLLGDSISPPLGSWNATMAPP

SEQ ID NO: 2403 - DNA, 1131 bp, Homo sapiens
gcatttctctggtgattagtgcagttcagcaccttttcagattcctgttggccatttgtcacagaattttccacactccttgacagaggtgcttaacccttatccatcagcattctcagacagcacctccggttagggacagtatctgaccgtccgacatccctgcagcccccatgtgtcacacagactcagcctcaggtagatggtttccgtagatggtggctttctttggacccttgacatcaaccagttactatttggtctaggggtctcaccaacgctgctcatctagcagggccacacataacaaatagaagcagagcaagccctggaactcctgcctgacagtgacacgacgacagaaacatcttaccagtcagaggaccatgagaaatagattcaaggagcattccacgtgcaagtgagtcttggccccatctgcctttggattttagccgtgaactggaaggtattggaaagaagaccctcagaaatagcttaatcaaaatccctgcgtctgaaccaagtgccttatttctctgtgggcctcaagcttcgctgacatctgtggagcacactgtcctaacaggagtgctgtctgatttcccaacgctctgcaaaacaaacagcctggaagggtggctggtggaaggtggtttttagagagagacttgtagataacaggaaagtgaaggctgtaaggaaggttgtaattaaacagcacatggaaacacaatcacattattgtcccattccatagggataatgatgaccacttcagtgggaaaaggagaggttttaagtcattagggactatgggccaccttttaggaagatttattttcaaaggttaaaatagtgttttggcaattcaagtttcattttcagaaaatgtaattgatgggaacctcagtgactctggatgaataagatgctgttgagtggctctgacttgggccagccgtgcttctcacaggaccttggagaccaaggtcactgtgatctcaggttcagggggcaagtcctctccacacagccctagttggcctcacagctgaaaatgtctcccttactgttggactcctttgttcacccacatgagtttgtgaataaatcctttccagtctgaaa

SEQ ID NO: 2404 - protein, 39 aa, Homo sapiens
MNKMLLSGSDLGQPCFSQDLGDQGHCDLRFRGQVLSTQP

SEQ ID NO: 2405 - DNA, 1623 bp, Homo sapiens
cgtggggccctttcgtccccggcgtccgggcgccctgcatggatcccccaccccagctcctgctccccggcggcggccggtgggcagaaagaccgaaacccactcacggccgcctgccgaatcgcggctctgctgtttgtggggcgtgctagaaacgtggtcctaaaaagaatggcgtccatttacataatgctttgtttgcgtttcgcaagtttctttcggttaaagccacagaaaccccacctcctgcccttgtgtcgtttccaccgcggcacccttttccgacattagaaacaatagtgtacgcctgtggaggcctcgtttgttcaggggctgccggccagggcttcaggacgtttctgcggctttccccgcgcggcctgggctcccgcggctgcttttcgggcccatgggcgcagccactgcgccaggctcaaggggggcggccccgtcagggcccgccatcttggaaggccttttttgccggttcttcccgctgaggaagtgtcgctcaagacgctggcctatgagttgtgatttctgccttttccccttcctccttgggctaagccagaccagaaagggccccgtgcgcaacgtgcttcacaatctctcagggaaagcggctaacgtggcgctactccgcctcccctgttccttacccttggggcggccgccatgtttcctgaacacaaaatggcgacacgtggttagcattcgtcgccaacgagaaattggggtcggcccgaaagctctagaatgcacccctcttcctccccggggccttccacctccgcgagttttatgacttaaaaaagcccacaggctggtctgaaggtcggaggcctaattttaacgcgttttcctccctttaatttgaaacgggaacgcgaatgactgtaaaatgtgggcacaatatttaatctctcgcctttttaaagcttaatagtggataataggggggcagtatcaagggataatttgggtccccacagtaccaaagcatttagaaacctctgtttaatttaaggaatgagataagttactgcttttctagacttcctagcatgggctgttgtgctggagagaacgagagctacgaagagactacagtgcctctgactttttcataggacagttggccgaggaagacaaacataaagatgaagtgcttaattcaaggtcacacaatgtcggggatggacctccagatttccttactggaaaacaagctcagggctcccactgattgtacattatggtgagacgtggtcttgtaacacagtggttaagaatgtgactttggagccagcctgctaggggctgaattctgactcagccatttactaactgtgtgaccttaggtcacagaattttccacactccttgacagaggtgcttaacccttatccatcagcattctcagacagcacctccggttagggacagtatctgaccgtccgacatccctgcagcccccatgtgtcacacagactcagcctcaggtagatggtttccgtagatggtggctttctttggacccttgacatcaaccagttactatttggtaagaacttaagtcattccagtgcctctctcagaagcatttgcatttagaatttc

SEQ ID NO: 2406 - protein, 33 aa, Homo sapiens; identical to SEQ ID NO: 144

SEQ ID NO: 2407 - DNA, 2196 bp, Homo sapiens
gtgagccaccacacttggtcttaagcaaatattaactccaatcactatcctaagccaaggtgtctgagcagctgagggaggaccagagtgaatgcagctagtgccacactgaacaaaccactcttgctcattccttagggaggaggacctggttgatagaagaatttatctcgtagtcttaacatccactgtaattccaaactttgaggacgatagagatcagtgggctttgactgcccagcatgcagtctccattcttaggtgggttcccaagcctgtaaaatgtaagccttatgctgctgagggccatcttgccaccctgagggaaacgctgcctgagaatgaaacaagcataagtaaaagctgagctgtgagatggagcaagatgaaggccacatgacatctttggagcacctggatctaactgtgccttaagctagtctaaccctgaacatttcatcatttcattgacatgagcccaggttttctttttttttggatggagtcttgctctgtcgcccaggctggagtgcagtagctcaatctcggctcactgcaagctccacctcccgggttcacgccattctcctgccttagcctcccaagtagctgggacaacaggcgcccaccaccactcccagctaattttttgtatttttagtagagacggggttttaccatgttagccgggatggtcttgatctcctgacctcatgatccgcccgcctcggcctcccaaagtgctgggattacaggtgtgagccactgcacccagccctcaggttttccctttttttacccctccttttgaaaatttgatgtggaattttgccacctgcagccagaagagttttaactaatcagtgccataaattttatatagttctccttgcaaaatgtggatcagcctttctcagcaaatcctttgtcataaagtgctgaattgtaagtttgtcatgagaatcacatgagatcatgcatgtgaagaacctggcattatcctcctcatagaaaaaaaccagtaaatattaactacaggaagcaaggaaggagtggggtgaggggaagaagaaggggtactgatttaaaagaaccctggagtcctaaggataatctaggaaccctcagacccaatccgatacccctattctaaatgctcctagtgccctgtaccttcccctcataagccttcattatcattgtaatgatatgtttatgtaatattttgattaatgtctctccttcactgacctagcagttctagcagggcagtgattttgctgtgttgcatccccagcacctagtctggtatgtggcattcagcatatgtttattgaatgaatggccatgtggttattcagatcctccttgattattggggttaggattgtggcagaagtggcaaaatcagggagagtagtccctgtcccctctgtatcttatacactgcccacactcccaacacacatacacatacagagaattttgtctcaattagataattaacttctgcttggttgtaaaccaaaccactggttcttaaactttcattggatcattttattgaagaattaaatagtgtggttctggcctaatgtctggaaagccttgcagaggagtggattaggtctttgtgataaacaggcagccttccctgctcctgtgtctttataaaatctatttaactggagtagtccaccctccctcaggctcttacaggaatatgttggaggctgtaggaaggtgggaaaccgagagggaaaggactgggccgctggagacttcactcattccctagcaagaaacaaaagcagtaaaaggtggcccgaggacaacctgaagctcactccttcagcacttttggctggaggtcacttgttggagccccactcagagctcagcacaccaccccaccagcagcctcctcctcccagctgaggctgcatttcatcccttcccccagcctgctttccctgagataggggagtgtttcccagggcccatgtgacttccactggcaagtgacgattaccaatggtttactagtcagtgaaactaccaaaggcttttgtgctgtagtaatccttttcctgtttaaaactctggggattttctaatgttgccaatagtttttcaagtcagcaattactgtgtggattatgtaatggctcggtattaaaaatagaaaagactgga

SEQ ID NO: 2408 - protein, 54 aa, Homo sapiens
MAMWLFRSSLIIGVRIVAEVAKSGRVVPVPSVSYTLPTLPTHIHIQRILSQLDN

SEQ ID NO: 2409 - DNA, 2452 bp, Homo sapiens
aaaatggcgacacgtggttagcattcgtcgccaacgagaaattggggtcggcccgaaagctctagaatgcacccctcttcctccccggggccttccacctccgcgagttttatgacttaaaaaagcccacaggctggtctgaaggtcggaggcctaattttaacgcgttttcctccctttaatttgaaacgggaacgcgaatgactgtaaaataggaagacaaacataaagatgaagtgcttaattcaaggtcacacaatgtcggggatggacctccagatttccttactggtgagacgtggtcttgtaacacagtggttaagaatgtgactttggagccagcctgctaggggctgaattctgactcagccatttactaactgtgtgaccttagggaggaggacctggttgatagaagaatttatctcgtagtcttaacatccactgtaattccaaactttgaggacgatagagatcagtgggctttgactgcccagcatgcagtctccattcttaggtgggttcccaagcctgtaaaatgtaagccttatgctgctgagggccatcttgccaccctgagggaaacgctgcctgagaatgaaacaagcataagtaaaagctgagctgtgagatggagcaagatgaaggccacatgacatctttggagcacctggatctaactgtgccttaagctagtctaaccctgaacatttcatcatttcattgacatgagcccaggttttctttttttttggatggagtcttgctctgtcgcccaggctggagtgcagtagctcaatctcggctcactgcaagctccacctcccgggttcacgccattctcctgccttagcctcccaagtagctgggacaacaggcgcccaccaccactcccagctaattttttgtatttttagtagagacggggttttaccatgttagccgggatggtcttgatctcctgacctcatgatccgcccgcctcggcctcccaaagtgctgggattacaggtgtgagccactgcacccagccctcaggttttccctttttttacccctccttttgaaaatttgatgtggaattttgccacctgcagccagaagagttttaactaatcagtgccataaattttatatagttctccttgcaaaatgtggatcagcctttctcagcaaatcctttgtcataaagtgctgaattgtaagtttgtcatgagaatcacatgagatcatgcatgtgaagaacctggcattatcctcctcatagaaaaaaaccagtaaatattaactacaggaagcaaggaaggagtggggtgaggggaagaagaaggggtactgatttaaaagaaccctggagtcctaaggataatctaggaaccctcagacccaatccgatacccctattctaaatgctcctagtgccctgtaccttcccctcataagccttcattatcattgtaatgatatgtttatgtaatattttgattaatgtctctccttcactgacctagcagttctagcagggcagtgattttgctgtgttgcatccccagcacctagtctggtatgtggcattcagcatatgtttattgaatgaatggccatgtggttattcagatcctccttgattattggggttaggattgtggcagaagtggcaaaatcagggagagtagtccctgtcccctctgtatcttatacactgcccacactcccaacacacatacacatacagagaattttgtctcaattagataattaacttctgcttggttgtaaaccaaaccactggttcttaaactttcattggatcattttattgaagaattaaatagtgtggttctggcctaatgtctggaaagccttgcagaggagtggattaggtctttgtgataaacaggcagccttccctgctcctgtgtctttataaaatctatttaactggagtagtccaccctccctcaggctcttacaggaatatgttggaggctgtaggaaggtgggaaaccgagagggaaaggactgggccgctggagacttcactcattccctagcaagaaacaaaagcagtaaaaggtggcccgaggacaacctgaagctcactccttcagcacttttggctggaggtcacttgttggagccccactcagagctcagcacaccaccccaccagcagcctcctcctcccagctgaggctgcatttcatcccttcccccagcctgctttccctgagataggggagtgtttcccagggcccatgtgacttccactggcaagtgacgattaccaatggtttactagtcagtgaaactaccaaaggcttttgtgctgtagtaatccttttcctgtttaaaactctggggattttctaatgttgccaatagtttttcaagtcagcaattactgtgtggattatgtaatggctcggtattaaaaatagaaaagactgga

SEQ ID NO: 2410 - protein, 32 aa, Homo sapiens
MKCLIQGHTMSGMDLQISLLVRRGLVTQWLRM

SEQ ID NO: 2411 - DNA, 2948 bp, Homo sapiens
cgtggggccctttcgtccccggcgtccgggcgccctgcatggatcccccaccccagctcctgctccccggcggcggccggtgggcagaaagaccgaaacccactcacggccgcctgccgaatcgcggctctgctgtttgtggggcgtgctagaaacgtggtcctaaaaagaatggcgtccatttacataatgctttgtttgcgtttcgcaagtttctttcggttaaagccacagaaaccccacctcctgcccttgtgtcgtttccaccgcggcacccttttccgacattagaaacaatagtgtacgcctgtggaggcctcgtttgttcaggggctgccggccagggcttcaggacgtttctgcggctttccccgcgcggcctgggctcccgcggctgcttttcgggcccatgggcgcagccactgcgccaggctcaaggggggcggccccgtcagggcccgccatcttggaaggccttttttgccggttcttcccgctgaggaagtgtcgctcaagacgctggcctatgagttgtgatttctgccttttccccttcctccttgggctaagccagaccagaaagggccccgtgcgcaacgtgcttcacaatctctcagggaaagcggctaacgtggcgctactccgcctcccctgttccttacccttggggcggccgccatgtttcctgaacacaaaatggcgacacgtgaggaagacaaacataaagatgaagtgcttaattcaaggtcacacaatgtcggggatggacctccagatttccttactggtgagacgtggtcttgtaacacagtggttaagaatgtgactttggagccagcctgctaggggctgaattctgactcagccatttactaactgtgtgaccttagggaggaggacctggttgatagaagaatttatctcgtagtcttaacatccactgtaattccaaactttgaggacgatagagatcagtgggctttgactgcccagcatgcagtctccattcttaggtgggttcccaagcctgtaaaatgtaagccttatgctgctgagggccatcttgccaccctgagggaaacgctgcctgagaatgaaacaagcataagtaaaagctgagctgtgagatggagcaagatgaaggccacatgacatctttggagcacctggatctaactgtgccttaagctagtctaaccctgaacatttcatcatttcattgacatgagcccaggttttctttttttttggatggagtcttgctctgtcgcccaggctggagtgcagtagctcaatctcggctcactgcaagctccacctcccgggttcacgccattctcctgccttagcctcccaagtagctgggacaacaggcgcccaccaccactcccagctaattttttgtatttttagtagagacggggttttaccatgttagccgggatggtcttgatctcctgacctcatgatccgcccgcctcggcctcccaaagtgctgggattacaggtgtgagccactgcacccagccctcaggttttccctttttttacccctccttttgaaaatttgatgtggaattttgccacctgcagccagaagagttttaactaatcagtgccataaattttatatagttctccttgcaaaatgtggatcagcctttctcagcaaatcctttgtcataaagtgctgaattgtaagtttgtcatgagaatcacatgagatcatgcatgtgaagaacctggcattatcctcctcatagaaaaaaaccagtaaatattaactacaggaagcaaggaaggagtggggtgaggggaagaagaaggggtactgatttaaaagaaccctggagtcctaaggataatctaggaaccctcagacccaatccgatacccctattctaaatgctcctagtgccctgtaccttcccctcataagccttcattatcattgtaatgatatgtttatgtaatattttgattaatgtctctccttcactgacctagcagttctagcagggcagtgattttgctgtgttgcatccccagcacctagtctggtatgtggcattcagcatatgtttattgaatgaatggccatgtggttattcagatcctccttgattattggggttaggattgtggcagaagtggcaaaatcagggagagtagtccctgtcccctctgtatcttatacactgcccacactcccaacacacatacacatacagagaattttgtctcaattagataattaacttctgcttggttgtaaaccaaaccactggttcttaaactttcattggatcattttattgaagaattaaatagtgtggttctggcctaatgtctggaaagccttgcagaggagtggattaggtctttgtgataaacaggcagccttccctgctcctgtgtctttataaaatctatttaactggagtagtccaccctccctcaggctcttacaggaatatgttggaggctgtaggaaggtgggaaaccgagagggaaaggactgggccgctggagacttcactcattccctagcaagaaacaaaagcagtaaaaggtggcccgaggacaacctgaagctcactccttcagcacttttggctggaggtcacttgttggagccccactcagagctcagcacaccaccccaccagcagcctcctcctcccagctgaggctgcatttcatcccttcccccagcctgctttccctgagataggggagtgtttcccagggcccatgtgacttccactggcaagtgacgattaccaatggtttactagtcagtgaaactaccaaaggcttttgtgctgtagtaatccttttcctgtttaaaactctggggattttctaatgttgccaatagtttttcaagtcagcaattactgtgtggattatgtaatggctcggtattaaaaatagaaaagactgga

SEQ ID NO: 2412 - protein, 138 aa, Homo sapiens
MGAATAPGSRGAAPSGPAILEGLFCRFFPLRKCRSRRWPMSCDFCLFPFLLGLSQTRKGPVRNVLHNLSGKAANVALLRLPCSLPLGRPPCFLNTKWRHVRKTNIKMKCLIQGHTMSGMDLQISLLVRRGLVTQWLRM

SEQ ID NO: 2413 - DNA, 2534 bp, Homo sapiens
ctgcggagcgggtgcgcgcgggcgggcacgtggggccctttcgtccccggcgtccgggcgccctgcatggatcccccaccccagctcctgctccccggcggcggccgaggaagacaaacataaagatgaagtgcttaattcaaggtcacacaatgtcggggatggacctccagatttccttactgacctgcattatcttgtggatacctgagtgaattccacaccacccattttatagatgaaaccactgagacatggagcaattgactgagtagtcactgccccacccctgcctggagcctcacacatgactcgcctcctctcagtgaccacaggaaaacaagctcagggctcccactgattgtacattatggtgagacgtggtcttgtaacacagtggttaagaatgtgactttggagccagcctgctaggggctgaattctgactcagccatttactaactgtgtgaccttagggaggaggacctggttgatagaagaatttatctcgtagtcttaacatccactgtaattccaaactttgaggacgatagagatcagtgggctttgactgcccagcatgcagtctccattcttaggtgggttcccaagcctgtaaaatgtaagccttatgctgctgagggccatcttgccaccctgagggaaacgctgcctgagaatgaaacaagcataagtaaaagctgagctgtgagatggagcaagatgaaggccacatgacatctttggagcacctggatctaactgtgccttaagctagtctaaccctgaacatttcatcatttcattgacatgagcccaggttttctttttttttggatggagtcttgctctgtcgcccaggctggagtgcagtagctcaatctcggctcactgcaagctccacctcccgggttcacgccattctcctgccttagcctcccaagtagctgggacaacaggcgcccaccaccactcccagctaattttttgtatttttagtagagacggggttttaccatgttagccgggatggtcttgatctcctgacctcatgatccgcccgcctcggcctcccaaagtgctgggattacaggtgtgagccactgcacccagccctcaggttttccctttttttacccctccttttgaaaatttgatgtggaattttgccacctgcagccagaagagttttaactaatcagtgccataaattttatatagttctccttgcaaaatgtggatcagcctttctcagcaaatcctttgtcataaagtgctgaattgtaagtttgtcatgagaatcacatgagatcatgcatgtgaagaacctggcattatcctcctcatagaaaaaaaccagtaaatattaactacaggaagcaaggaaggagtggggtgaggggaagaagaaggggtactgatttaaaagaaccctggagtcctaaggataatctaggaaccctcagacccaatccgatacccctattctaaatgctcctagtgccctgtaccttcccctcataagccttcattatcattgtaatgatatgtttatgtaatattttgattaatgtctctccttcactgacctagcagttctagcagggcagtgattttgctgtgttgcatccccagcacctagtctggtatgtggcattcagcatatgtttattgaatgaatggccatgtggttattcagatcctccttgattattggggttaggattgtggcagaagtggcaaaatcagggagagtagtccctgtcccctctgtatcttatacactgcccacactcccaacacacatacacatacagagaattttgtctcaattagataattaacttctgcttggttgtaaaccaaaccactggttcttaaactttcattggatcattttattgaagaattaaatagtgtggttctggcctaatgtctggaaagccttgcagaggagtggattaggtctttgtgataaacaggcagccttccctgctcctgtgtctttataaaatctatttaactggagtagtccaccctccctcaggctcttacaggaatatgttggaggctgtaggaaggtgggaaaccgagagggaaaggactgggccgctggagacttcactcattccctagcaagaaacaaaagcagtaaaaggtggcccgaggacaacctgaagctcactccttcagcacttttggctggaggtcacttgttggagccccactcagagctcagcacaccaccccaccagcagcctcctcctcccagctgaggctgcatttcatcccttcccccagcctgctttccctgagataggggagtgtttcccagggcccatgtgacttccactggcaagtgacgattaccaatggtttactagtcagtgaaactaccaaaggcttttgtgctgtagtaatccttttcctgtttaaaactctggggattttctaatgttgccaatagtttttcaagtcagcaattactgtgtggattatgtaatggctcggtattaaaaatagaaaagactgga

SEQ ID NO: 2414 - protein, 54 aa, Homo sapiens; identical to SEQ ID NO: 2408

SEQ ID NO: 2415 - DNA, 476 bp, Homo sapiens
agttacactctctacaagggtaaagcaaactgggaggtgctggttctggctccagagggactggggtctggggcctgtcacctggtcctgcctgtgtttcctgggaggaggacctggttgatagaagaatttatctcgtagtcttaacatccactgtaattccaaactttgaggacgatagagatcagtgggctttgactgcccagcatgcagtctccattcttaggtgggttcccaagcctgtaaaatgtaagccttatgctgctgagggccatcttgccaccctgagggaaacgctgcctgagaatgaaacaagcataagtaaaagctgagctgtgagatggagcaagatgaaggccacatgacatctttggagcacctggatctaactgtgccttaagctagtctaaccctgaacatttcatcatttcattgacatgagcccaggttttctttttttttggatggagtcttgc

SEQ ID NO: 2416 - protein, 102 aa, Homo sapiens
SKLGGAGSGSRGTGVWGLSPGPACVSWEEDLVDRRIYLVVLTSTVIPNFEDDRDQWALTAQHAVSILRWVPKPVKCKPYAAEGHLATLRETLPENETSISKS

SEQ ID NO: 2417 - DNA, 743 bp, Homo sapiens
ttgctgcgcaggaccccttgaaaaaaaatgaggacccgtcttttttaggtcacaagattgcgccaacccttacatggtccttaaaaaaaaaaccttctgacactgcagtagtgaaaatgaagcgcacgatgggcggaagctaggaagacaaacataaagatgaagtgcttaattcaaggtcacacaatgtcggggatggacctccagatttccttactgacctgcattatcttgtggatacctgagtgaattccacaccacccattttatagatgaaaccactgagacatggagcaattgactgagtagtcactgccccacccctgcctggagcctcacacatgactcgcctcctctcagtgaccacaggtgagacgtggtcttgtaacacagtggttaagaatgtgactttggagccagcctgctaggggctgaattctgactcagccatttactaactgtgtgaccttagtctgtctagtgactggtgttgtcataagaagagagggacacagagggaagatggccacatgaagatggaggcagagattgcagttatgctgctgcaaactaaggaatggctctggccctccaaggattgctgataaccaccagaaactagaagagacaaggaaggattcttccctagagccttcagagggagcatggccctactgacacctggatttcaaacttgtagcttcctaaactgcaagagaataaatttctgttgttttaagcca

SEQ ID NO: 2418 - protein, 33 aa, Homo sapiens
EDKHKDEVLNSRSHNVGDGPPDFLTDLHYLVDT

SEQ ID NO: 2419 - DNA, 2534 bp, Homo sapiens
cgtggggccctttcgtccccggcgtccgggcgccctgcatggatcccccaccccagctcctgctccccggcggcggccggtgggcagaaagaccgaaacccactcacggccgcctgccgaatcgcggctctgctgtttgtggggcgtgctagaaacgtggtcctaaaaagaatggcgtccatttacataatgctttgtttgcgtttcgcaagtttctttcggttaaagccacagaaaccccacctcctgcccttgtgtcgtttccaccgcggcacccttttccgacattagaaacaatagtgtacgcctgtggaggcctcgtttgttcaggggctgccggccagggcttcaggacgtttctgcggctttccccgcgcggcctgggctcccgcggctgcttttcgggcccatgggcgcagccactgcgccaggctcaaggggggcggccccgtcagggcccgccatcttggaaggccttttttgccggttcttcccgctgaggaagtgtcgctcaagacgctggcctatgagttgtgatttctgccttttccccttcctccttgggctaagccagaccagaaagggccccgtgcgcaacgtgcttcacaatctctcagggaaagcggctaacgtggcgctactccgcctcccctgttccttacccttggggcggccgccatgtttcctgaacacaaaatggcgacacgtggttagcattcgtcgccaacgagaaattggggtcggcccgaaagctctagaatgcacccctcttcctccccggggccttccacctccgcgagttttatgacttaaaaaagcccacaggctggtctgaaggtcggaggcctaattttaacgcgttttcctccctttaatttgaaacgggaacgcgaatgactgtaaaatgtgggcacaatatttaatctctcgcctttttaaagcttaatagtggataataggggggcagtatcaagggataatttgggtccccacagtaccaaagcatttagaaacctctgtttaatttaaggaatgagataagttactgcttttctagacttcctagcatgggctgttgtgctggagagaacgagagctacgaagagactacagtgcctctgactttttcataggacagttggccgaggaagacaaacataaagatgaagtgcttaattcaaggtcacacaatgtcggggatggacctccagatttccttactggtgagacgtggtcttgtaacacagtggttaagaatgtgactttggagccagcctgctaggggctgaattctgactcagccatttactaactgtgtgaccttaggctggagtgcaatggcatgatctcggctcatcacaacctctgcttcctgggttcaagcgattctcctgcctcagcctcccgagtacctgggactacaggcactcgccaccatgcccggctgatttttgtatttttaatagagatggtttcactatgttggccaggctggtctcgaactcctgaccttgtgatctgcccacctcagcctcgaaaagtgctgggattacaggcgtgagccactgcgcccagccttgtattttttttcagtttgggtagctgtccctaattcatttgttaaaggagaagcaagagcaagaacctttaatctgttctcctcttccctaatttgaaagtagcttgttattttgaatatcactttctctgaaatagcacatctccatctcagagaatggatttaatgtttggatacagccaaaagtcatttcattaccaaaccatggggtgaatataccatgtaaagcagtttgggatcagaactcacagtctgaattgtaagtgatgagactgctgtctctctgctacagcttcttggctggctctgaaggctctttgaaggcagatcctaacaaggggactgctttgaagggccattgttcatttggaatgataaagtctatgttgttcaaaaaacaaatgcttgtagcaggtattttttcactccagactgagaatattggtgggatattgataaggggtactgaatggtaataaacatgtgctctagctctgtgctagtcagcttatttcagaactctagtttgattcagtttcttgcctctgactcaaaatggagggagagtgatttttacataagagaacacacccacatatccttttggcagcagctacctgccagagatgttgaagaagagtagccaacctttacacagcagatattgtgtgccagtcatagtcctaagtataataccttacatgtataaacttcttataaggttggtgctctgtaccgaattgaatagtatcccccaaaattcatgttgtcccagaacctatgaaagtgatcttacttgagggaggggggaggggggagggatagcattaggagatatacctaatgctaaatgacgagttaatgggtgtagcacaccagcatggcacatgtatacatatgtaactaacctgcacattgtgcacatgtaccctaaaacttaaagtataataataat

SEQ ID NO: 2420 - protein, 32 aa, Homo sapiens; identical to SEQ ID NO: 2410

SEQ ID NO: 2421 - DNA, 482 bp, Homo sapiens
ggggaggggcggcgaggcgaggcctgcggagcggaggaagacaaacataaagatgaagtgcttaattcaaggtcacacaatgtcggggatggacctccagatttccttactggaaaacaagctcagggctcccactgattgtacattatggtgagacgtggtcttgtaacacagtggttaagaatgtgactttggagccagcctgctaggggctgaattctgactcagccatttactaactgtgtgaccttaggtaagtcatttaccttctttgtccctcagtttcatctcggttaagtagggataatgatagcacctattttatagggttattgtgaggaataaatccaagtaaaatgcttagaatagtaactgaaacatagcactcattaggaatgctttaattttcatttatttgagtattaaaggttgaattttcagaggtattttggacctttgtattttttctttaaatcacttat

SEQ ID NO: 2422 - protein, 33 aa, Homo sapiens; identical to SEQ ID NO: 144

SEQ ID NO: 2423 - DNA, 589 bp, Homo sapiens
tcgtcgccaacgagaaattggggtcggcccgaaagctctagaatgcacccctcttcctccccggggccttccacctccgcgagttttatgacttaaaaaagcccacaggctggtctgaagaggaagacaaacataaagatgaagtgcttaattcaaggtcacacaatgtcggggatggacctccagatttccttactgacctgcattatcttgtggatacctgagtgaattccacaccacccattttatagatgaaaccactgagacatggagcaattgactgagtagtcactgccccacccctgcctggagcctcacacatgactcgcctcctctcagtgaccacaggtgagacgtggtcttgtaacacagtggttaagaatgtgactttggagccagcctgctaggggctgaattctgactcagccatttactaactgtgtgaccttaggtaagtcatttaccttctttgtccctcagtttcatctcggttaagtagggataatgatagcacctattttatagggttattgtgaggaataaatccaagtaaaatgcttagaatagtaactgaaacatagcactcatt

SEQ ID NO: 2424 - protein, 60 aa, Homo sapiens
NAPLFLPGAFHLREFYDLKKPTGWSEEEDKHKDEVLNSRSHNVGDGPPDFLTDLHYLVDT

SEQ ID NO: 2425 - DNA, 2928 bp, Homo sapiens
accaggcaacaccattgaaggctcatatgtaaaaatccatgccttcctttctcccaatctccattcccaaacttagccactggcttctggctgaggccttacgcatacctcccggggcttgcacacaccttcttctacagaagacacaccttgggcatatcctacagaagaccaggcttctctctggtccttggtagagggctactttactgtaacagggccagggtggagagttctctcctgaagctccatcccctctataggaaatgtgttgacaatattcagaagagtaagaggatcaagacttctttgtgctcaaataccactgttctcttctctaccctgccctaaccaggagcttgtcaccccaaactctgaggtgatttatgccttaatcaagcaaacttccctcttcagaaaagatggctcattttccctcaaaagttgccaggagctgccaagtattctgccaattcaccctggagcacaatcaacaaattcagccagaacacaactacagctactattagaactattattattaataaattcctctccaaatctagccccttgacttcggatttcacgatttctcccttcctcctagaaacttgataagtttcccgcgcttccctttttctaagactacatgtttgtcatcttataaagcaaaggggtgaataaatgaaccaaatcaataacttctggaatatctgcaaacaacaataatatcagctatgccatctttcactattttagccagtatcgagttgaatgaacatagaaaaatacaaaactgaattcttccctgtaaattccccgttttgacgacgcacttgtagccacgtagccacgcctacttaagacaattacaaaaggcgaagaagactgactcaggcttaagctgccagccagagagggagtcatttcattggcgtttgagtcagcaaagaagtcaagatggccaaagttccagacatgtttgaagacctgaagaactgttacagtgaaaatgaagaagacagttcctccattgatcatctgtctctgaatcagaaatccttctatcatgtaagctatggcccactccatgaaggctgcatggatcaatctgtgtctctgagtatctctgaaacctctaaaacatccaagcttaccttcaaggagagcatggtggtagtagcaaccaacgggaaggttctgaagaagagacggttgagtttaagccaatccatcactgatgatgacctggaggccatcgccaatgactcagaggaagaaatcatcaagcctaggtcagcaccttttagcttcctgagcaatgtgaaatacaactttatgaggatcatcaaatacgaattcatcctgaatgacgccctcaatcaaagtataattcgagccaatgatcagtacctcacggctgctgcattacataatctggatgaagcagtgaaatttgacatgggtgcttataagtcatcaaaggatgatgctaaaattaccgtgattctaagaatctcaaaaactcaattgtatgtgactgcccaagatgaagaccaaccagtgctgctgaaggagatgcctgagatacccaaaaccatcacaggtagtgagaccaacctcctcttcttctgggaaactcacggcactaagaactatttcacatcagttgcccatccaaacttgtttattgccacaaagcaagactactgggtgtgcttggcaggggggccaccctctatcactgactttcagatactggaaaaccaggcgtaggtctggagtctcacttgtctcacttgtgcagtgttgacagttcatatgtaccatgtacatgaagaagctaaatcctttactgttagtcatttgctgagcatgtactgagccttgtaattctaaatgaatgtttacactctttgtaagagtggaaccaacactaacatataatgttgttatttaaagaacaccctatattttgcatagtaccaatcattttaattattattcttcataacaattttaggaggaccagagctactgactatggctaccaaaaagactctacccatattacagatgggcaaattaaggcataagaaaactaagaaatatgcacaatagcagttgaaacaagaagccacagacctaggatttcatgatttcatttcaactgtttgccttctacttttaagttgctgatgaactcttaatcaaatagcataagtttctgggacctcagttttatcattttcaaaatggagggaataatacctaagccttcctgccgcaacagttttttatgctaatcagggaggtcattttggtaaaatacttcttgaagccgagcctcaagatgaaggcaaagcacgaaatgttattttttaattattatttatatatgtatttataaatatatttaagataattataatatactatatttatgggaaccccttcatcctctgagtgtgaccaggcatcctccacaatagcagacagtgttttctgggataagtaagtttgatttcattaatacagggcattttggtccaagttgtgcttatcccatagccaggaaactctgcattctagtacttgggagacctgtaatcatataataaatgtacattaattaccttgagccagtaattggtccgatctttgactcttttgccattaaacttacctgggcattcttgtttcaattccacctgcaatcaagtcctacaagctaaaattagatgaactcaactttgacaaccatgagaccactgttatcaaaactttcttttctggaatgtaatcaatgtttcttctaggttctaaaaattgtgatcagaccataatgttacattattatcaacaatagtgattgatagagtgttatcagtcataactaaataaagcttgcaacaaaattctctgaca

SEQ ID NO: 2426 - protein, 271 aa, Homo sapiens; identical to SEQ ID NO: 146

SEQ ID NO: 2427 - DNA, 2644 bp, Homo sapiens
agtaaccaggcaacaccattgaaggctcatatgtaaaaatccatgccttcctttctcccaatctccattcccaaacttagccactggcttctggctgaggccttacgcatacctcccggggcttgcacacaccttcttctacagaagacacaccttgggcatatcctacagaagaccaggcttctctctggtccttggtagagggctactttactgtaacagggccagggtggagagttctctcctgaagctccatcccctctataggaaatgtgttgacaatattcagaagagtaagaggatcaagacttctttgtgctcaaataccactgttctcttctctaccctgccctaaccaggagcttgtcaccccaaactctgaggtgatttatgccttaatcaagcaaacttccctcttcagaaaagatggctcattttccctcaaaagttgccaggagctgccaagtattctgccaattcaccctggagcacaatcaacaaattcagccagaacacaactacagctactattagaactattattattaataaattcctctccaaatctagccccttgacttcggatttcacgatttctcccttcctcctagaaacttgataagtttcccgcgcttccctttttctaagactacatgtttgtcatcttataaagcaaaggggtgaataaatgaaccaaatcaataacttctggaatatctgcaaacaacaataatatcagctatgccatctttcactattttagccagtatcgagttgaatgaacatagaaaaatacaaaactgaattcttccctgtaaattccccgttttgacgacgcacttgtagccacgtagccacgcctacttaagacaattacaaaaggcgaagaagactgactcaggcttaagctgccagccagagagggagtcatttcattggcgtttgagtcagcaaagaagtcaagatggccaaagttccagacatgtttgaagacctgaagaactgttacagtgaaaatgaagaagacagttcctccattgatcatctgtctctgaatcagaaatccttctatcatgtaagctatggcccactccatgaaggctgcatggatcaatctgtgtctctgagtatctctgaaacctctaaaacatccaagcttaccttcaaggagagcatggtggtagtagcaaccaacgggaaggttctgaagaagagacggttgagtttaagccaatccatcactgatgatgacctggaggccatcgccaatgactcagaggaagaaatcatcaagcctaggtcagcaccttttagcttcctgagcaatgtgaaatacaactttatgaggatcatcaaatacgaattcatcctgaatgacgccctcaatcaaagtataattcgagccaatgatcagtacctcacggctgctgcattacataatctggatgaagcagtgaaatttgacatgggtgcttataagtcatcaaaggatgatgctaaaattaccgtgattctaagaatctcaaaaactcaattgtatgtgactgcccaagatgaagaccaaccagtgctgctgaaggagatgcctgagatacccaaaaccatcacaggtagtgagaccaacctcctcttcttctgggaaactcacggcactaagaactatttcacatcagttgcccatccaaacttgtttattgccacaaagcaagactactgggtgtgcttggcaggggggccaccctctatcactgactttcagatactggaaaaccaggcgtaggtctggagtctcacttgtctcacttgtgcagtgttgacagttcatatgtaccatgtacatgaagaagctaaatcctttactgttagtcatttgctgagcatgtactgagccttgtaattctaaatgaatgtttacactctttgtaagagtggaaccaacactaacatataatgttgttatttaaagaacaccctatattttgcatagtaccaatcattttaattattattcttcataacaattttaggaggaccagagctactgactatggctaccaaaaagactctacccatattacagatgggcaaattaaggcataagaaaactaagaaatatgcacaatagcagttgaaacaagaagccacagacctaggatttcatgatttcatttcaactgtttgccttctacttttaagttgctgatgaactcttaatcaaatagcataagtttctgggacctcagttttatcattttcaaaatggagggaataatacctaagccttcctgccgcaacagttttttatgctaatcagggaggtcattttggtaaaatacttcttgaagccgagcctcaagatgaaggcaaagcacgaaatgttattttttaattattatttatatatgtatttataaatatatttaagataattataatatactatatttatgggaaccccttcatcctctgagtgtgaccaggcatcctccacaatagcagacagtgttttctgggataagtaagtttgatttcattaatacagggcattttggtccaagttgtgcttatcccatagccaggaaactctgcattctagtacttgggagacctgtaatcatataataaatgtacattaattaccttg

SEQ ID NO: 2428 - protein, 271 aa, Homo sapiens; identical to SEQ ID NO: 146

SEQ ID NO: 2429 - DNA, 727 bp, Homo sapiens
tatagttcttatgaaaatactggcttgaaagcttcaacagggataacattttcaggtgaaggccaccattgaaagcctgaagatatttagcttctgggagcaatgcataccatctctttgctgaggacccttgaagaggttaagtgaccaacccaagatcacaagactgatgaaaccagtgcttgaactcaagcttctgattccgagtccaatcttctctttccactgcataaagatactcgagtctcttatcaccaccaacaccaagtgatggcttataaagatcatccttagggtctttccccctcaaacgtgctatcattcagtaactctaggatccttgttaaaaaaaaaaaaaaaacgggggttgcggagaagggattgaaatatctcctctccctgtcttcacctcctctgatgaaatctgattttattctgtgatatgtaagacctgaatgaaggtgactgaagtaattgggtacatggttagtggtggaatccggatgtgaacctgagtcatggtcttgccattgttccttgaagacaggaaatatttgtaaatatatttggaagcaactttaaaattgttgcatgtggttgggtctaacagaatcacttgaatgaagagaaaaacataactttttcctgtgaattttcagggaaatgcaattatttcctttcacttggtataaaagctcttcagaggaataaagcatgcatgagccaa

SEQ ID NO: 2430 - protein, 33 aa, Homo sapiens
MKPVLELKLLIPSPIFSFHCIKILESLITTNTK

SEQ ID NO: 2431 - DNA, 414 bp, Homo sapiens
gtgggggaaagttctggtcatcagccctagcattccatggttcatttcctcatcagtgatggaaaatcaccaagcaagagaacaggatggagaataaccggatgggtgcaatcggaggtgctatttcaggagctggccattcttcaagtcagaaggcctgagagaggagctgcccaggtggtcttcatggggctgtgcggccagtcatcccccacaggttgacaatccttgcgtacttcatccttgttggatcctctgtatccctgacgatgagcaactgtgaggcccgtttcagcactgagttccagtcaggaaaacatccacccacccaccacacgctcacacttacacacacattcacacatgcacacacgttctggctccgaaaaagaaaaaaaaaaagcaatttaaaat

SEQ ID NO: 2432 - protein, 61 aa, Homo sapiens
MVHFLISDGKSPSKRTGWRITGWVQSEVLFQELAILQVRRPERGAAQVVFMGLCGQSSPTG

SEQ ID NO: 2433 - DNA, 1573 bp, Homo sapiens
aaatttctcagcctcctacttctgcttttgaaagccataaaaacagcgagggagaaactggcagataccaaacctcttcgaggcacaaggcacaacaggctgctctgggattctcttcagccaatcttcattgctcaagtgtctgaagcagccatggcagaagtacctgagctcgccagtgaaatgatggcttattacagtggcaatgaggatgacttgttctttgaagctgatggccctaaacagatgaagtgctccttccaggacctggacctctgccctctggatggcggcatccagctacgaatctccgaccaccactacagcaagggcttcaggcaggccgcgtcagttgttgtggccatggacaagctgaggaagatgctggttccctgcccacagaccttccaggagaatgacctgagcaccttctttcccttcatctttgaagaagaacctatcttcttcgacacatgggataacgaggcttatgtgcacgatgcacctgtacgatcactgaactgcacgctccgggactcacagcaaaaaagcttggtgatgtctggtccatatgaactgaaagctctccacctccagggacaggatatggagcaacaagtggtgttctccatgtcctttgtacaaggagaagaaagtaatgacaaaatacctgtggccttgggcctcaaggaaaagaatctgtacctgtcctgcgtgttgaaagatgataagcccactctacagctggagagtgtagatcccaaaaattacccaaagaagaagatggaaaagcgatttgtcttcaacaagatagaaatcaataacaagctggaatttgagtctgcccagttccccaactggtacatcagcacctctcaagcagaaaacatgcccgtcttcctgggagggaccaaaggcggccaggatataactgacttcaccatgcaatttgtgtcttcctaaagagagctgtacccagagagtcctgtgctgaatgtggactcaatccctagggctggcagaaagggaacagaaaggtttttgagtacggctatagcctggactttcctgttgtctacaccaatgcccaactgcctgccttagggtagtgctaagaggatctcctgtccatcagccaggacagtcagctctctcctttcagggccaatccccagcccttttgttgagccaggcctctctcacctctcctactcacttaaagcccgcctgacagaaaccacggccacatttggttctaagaaaccctctgtcattcgctcccacattctgatgagcaaccgcttccctatttatttatttatttgtttgtttgttttattcattggtctaatttattcaaagggggcaagaagtagcagtgtctgtaaaagagcctagtttttaatagctatggaatcaattcaatttggactggtgtgctctctttaaatcaagtcctttaattaagactgaaaatatataagctcagattatttaaatgggaatatttataaatgagcaaatatcatactgttcaatggttctgaaataaacttcactgaagaaaaaaaaa

SEQ ID NO: 2434 - protein, 269 aa, Homo sapiens; identical to SEQ ID NO: 148

SEQ ID NO: 2435 - DNA, 1205 bp, Homo sapiens
ggctgctctgggattctcttcagccaatcttcattgctcaagtgtctgaagcagccatggcagaagtacctgagctcgccagtgaaatgatggcttattacagtggcaatgaggatgacttgttctttgaagctgatggccctaaacagatgaagtgctccttccaggacctggacctctgccctctggatggcggcatccagctacgaatctccgaccaccactacagcaagggcttcaggcaggccgcgtcagttgttgtggccatggacaagctgaggaagatgctggttccctgcccacagaccttccaggagaatgacctgagcaccttctttcccttcatctttgaagaaggtagttagccaagagcaggcagtagatctccacttgtgtcctcttggaagtcatcaagccccagccaactcaattcccccagagccaaagccctttaaaggtagaaggcccagcggggagacaaaacaaagaaggctggaaaccaaagcaatcatctctttagtggaaactattcttaaagaagatcttgatggctactgacatttgcaactccctcactctttctcaggggcctttcacttacattgtcaccagaggttcgtaacctccctgtgggctagtgttatgaccatcaccattttacctaagtagctctgttgctcggccacagtgagcagtaatagacctgaagctggaacccatgtctaatagtgtcaggtccagtgttcttagccaccccactcccagcttcatccctactggtgttgtcatcagactttgaccgtatatgctcaggtgtcctccaagaaatcaaattttgccgcctcgcctcacgaggcctgcccttctgattttatacctaaacaacatgtgctccacatttcagaacctatcttcttcgacacatgggataacgaggcttatgtgcacgatgcacctgtacgatcactgaactgcacgctccgggactcacagcaaaaaagcttggtgatgtctggtccatatgaactgaaagctctccacctccagggacaggatatggagcaacaaggtaaatggaaacatcctggtttccctgcctggcctcctggcagcttgctaattctccatgttttaaacaaagtagaaagttaatttaaggcaaatgatcaacacaagtgaaaaaaaatattaaaaaggaatataca

SEQ ID NO: 2436 - protein, 102 aa, Homo sapiens
MAEVPELASEMMAYYSGNEDDLFFEADGPKQMKCSFQDLDLCPLDGGIQLRISDHHYSKGFRQAASVVVAMDKLRKMLVPCPQTFQENDLSTFFPFIFEEGS

SEQ ID NO: 2437 - DNA, 769 bp, Homo sapiens
cttcattccattttctgttgagtaataaactcaacgttgaaaatgtcctttgtgggggagaactcaggagtgaaaatgggctctgaggactgggaaaaagatgaaccccagtgctgcttagaagacccggctggaagccccctggaaccaggcccaagcctccccaccatgaattttgttcacacaagtccaaaggtgaagaacttaaacccgaagaaattcagcattcatgaccaggatcacaaagtactggtcctggactctgggaatctcatagcagttccagataaaaactacatacgcccagagatcttctttgcattagcctcatccttgagctcagcctctgcggagaaaggaagtccgattctcctgggggtctctaaaggggagttttgtctctactgtgacaaggataaaggacaaagtcatccatcccttcagctgaagaaggagaaactgatgaagctggctgcccaaaaggaatcagcacgccggcccttcatcttttatagggctcaggtgggctcctggaacatgctggagtcggcggctcaccccggatggttcatctgcacctcctgcaattgtaatgagcctgttggggtgacagataaatttgagaacaggaaacacattgaattttcatttcaaccagtttgcaaagctgaaatgagccccagtgaggtcagcgattaggaaactgccccattgaacgccttcctcgctaatttgaactaattgtataaaaacaccaaacctgctcact

SEQ ID NO: 2438 - protein, 218 aa, Homo sapiens; identical to SEQ ID NO: 150

SEQ ID NO: 2439 - DNA, 706 bp, Homo sapiens
cttcattccattttctgttgagtaataaactcaacgttgaaaatgtcctttgtgggggagaactcaggagtgaaaatgggctctgaggactgggaaaaagatgaaccccagtgctgcttagaaggtccaaaggtgaagaacttaaacccgaagaaattcagcattcatgaccaggatcacaaagtactggtcctggactctgggaatctcatagcagttccagataaaaactacatacgcccagagatcttctttgcattagcctcatccttgagctcagcctctgcggagaaaggaagtccgattctcctgggggtctctaaaggggagttttgtctctactgtgacaaggataaaggacaaagtcatccatcccttcagctgaagaaggagaaactgatgaagctggctgcccaaaaggaatcagcacgccggcccttcatcttttatagggctcaggtgggctcctggaacatgctggagtcggcggctcaccccggatggttcatctgcacctcctgcaattgtaatgagcctgttggggtgacagataaatttgagaacaggaaacacattgaattttcatttcaaccagtttgcaaagctgaaatgagccccagtgaggtcagcgattaggaaactgccccattgaacgccttcctcgctaatttgaactaattgtataaaaacaccaaacctgctcact

SEQ ID NO: 2440 - protein, 197 aa, Homo sapiens; identical to SEQ ID NO: 152

SEQ ID NO: 2441 - DNA, 586 bp, Homo sapiens
cttcattccattttctgttgagtaataaactcaacgttgaaaatgtcctttgtgggggagaactcaggagtgaaaatgggctctgaggactgggaaaaagatgaaccccagtgctgcttagaagagatcttctttgcattagcctcatccttgagctcagcctctgcggagaaaggaagtccgattctcctgggggtctctaaaggggagttttgtctctactgtgacaaggataaaggacaaagtcatccatcccttcagctgaagaaggagaaactgatgaagctggctgcccaaaaggaatcagcacgccggcccttcatcttttatagggctcaggtgggctcctggaacatgctggagtcggcggctcaccccggatggttcatctgcacctcctgcaattgtaatgagcctgttggggtgacagataaatttgagaacaggaaacacattgaattttcatttcaaccagtttgcaaagctgaaatgagccccagtgaggtcagcgattaggaaactgccccattgaacgccttcctcgctaatttgaactaattgtataaaaacaccaaacctgctcact

SEQ ID NO: 2442 - protein, 157 aa, Homo sapiens; identical to SEQ ID NO: 154

SEQ ID NO: 2443 - DNA, 649 bp, Homo sapiens
cttcattccattttctgttgagtaataaactcaacgttgaaaatgtcctttgtgggggagaactcaggagtgaaaatgggctctgaggactgggaaaaagatgaaccccagtgctgcttagaagacccggctggaagccccctggaaccaggcccaagcctccccaccatgaattttgttcacacaaagatcttctttgcattagcctcatccttgagctcagcctctgcggagaaaggaagtccgattctcctgggggtctctaaaggggagttttgtctctactgtgacaaggataaaggacaaagtcatccatcccttcagctgaagaaggagaaactgatgaagctggctgcccaaaaggaatcagcacgccggcccttcatcttttatagggctcaggtgggctcctggaacatgctggagtcggcggctcaccccggatggttcatctgcacctcctgcaattgtaatgagcctgttggggtgacagataaatttgagaacaggaaacacattgaattttcatttcaaccagtttgcaaagctgaaatgagccccagtgaggtcagcgattaggaaactgccccattgaacgccttcctcgctaatttgaactaattgtataaaaacaccaaacctgctcact

SEQ ID NO: 2444 - protein, 178 aa, Homo sapiens; identical to SEQ ID NO: 156

SEQ ID NO: 2445 - DNA, 649 bp, Homo sapiens
atgtcaggctgtgataggagggaaacagaaaccaaaggaaagaacagctttaagaagcgcttaagaggtccaaaggtgaagaacttaaacccgaagaaattcagcattcatgaccaggatcacaaagtactggtcctggactctgggaatctcatagcagttccagataaaaactacatacgcccagagatcttctttgcattagcctcatccttgagctcagcctctgcggagaaaggaagtccgattctcctgggggtctctaaaggggagttttgtctctactgtgacaaggataaaggacaaagtcatccatcccttcagctgaagaaggagaaactgatgaagctggctgcccaaaaggaatcagcacgccggcccttcatcttttatagggctcaggtgggctcctggaacatgctggagtcggcggctcaccccggatggttcatctgcacctcctgcaattgtaatgagcctgttggggtgacagataaatttgagaacaggaaacacattgaattttcatttcaaccagtttgcaaagctgaaatgagccccagtgaggtcagcgattaggaaactgccccattgaacgccttcctcgctaatttgaactaattgtataaaaacaccaaacctgctcact

SEQ ID NO: 2446 - protein, 192 aa, Homo sapiens; identical to SEQ ID NO: 158

SEQ ID NO: 2447 - DNA, 1085 bp, Homo sapiens
gaagctgctggagccacgattcagtcccctggactgtagataaagaccctttcttgccaggtgctgagacaaccacactatgagaggcactccaggagacgctgatggtggaggaagggccgtctatcaatcaatcactgttgctgttatcacatgcaagtatccagaggctcttgagcaaggcagaggggatcccatttatttgggaatccagaatccagaaatgtgtttgtattgtgagaaggttggagaacagcccacattgcagctaaaagagcagaagatcatggatctgtatggccaacccgagcccgtgaaacccttccttttctaccgtgccaagactggtaggacctccacccttgagtctgtggccttcccggactggttcattgcctcctccaagagagaccagcccatcattctgacttcagaacttgggaagtcatacaacactgcctttgaattaaatataaatgactgaactcagcctagaggtggcagcttggtctttgtcttaaagtttctggttcccaatgtgttttcgtctacattttcttagtgtcattttcacgctggtgctgagacaggggcaaggctgctgttatcatctcattttataatgaagaagaagcaattacttcatagcaactgaagaacaggatgtggcctcagaagcaggagagctgggtggtataaggctgtcctctcaagctggtgctgtgtaggccacaaggcatctgcatgagtgactttaagactcaaagaccaaacactgagctttcttctaggggtgggtatgaagatgcttcagagctcatgcgcgttacccacgatggcatgactagcacagagctgatctctgtttctgttttgctttattccctcttgggatgatatcatccagtctttatatgttgccaatatacctcattgtgtgtaatagaaccttcttagcattaagaccttgtaaacaaaaataattcttgtgttaagttaaatcatttttgtcctaattgtaatgtgtaatcttaaagttaaataaactttgtgtatttatataataataaagctaaaactgatat

SEQ ID NO: 2448 - protein, 134 aa, Homo sapiens
MRGTPGDADGGGRAVYQSITVAVITCKYPEALEQGRGDPIYLGIQNPEMCLYCEKVGEQPTLQLKEQKIMDLYGQPEPVKPFLFYRAKTGRTSTLESVAFPDWFIASSKRDQPIILTSELGKSYNTAFELNIND

SEQ ID NO: 2449 - DNA, 1108 bp, Homo sapiens
gaagctgctggagccacgattcagtcccctggactgtagataaagaccctttcttgccaggtgctgagacaaccacactatgagaggcactccaggagacgctgatggtggaggaagggccgtctatcaatcaatcactgttgctgttatcacatgcaagtatccagaggctcttgagcaaggcagaggggatcccatttatttgggaatccagaatccagaaatgtgtttgtattgtgagaaggttggagaacagcccacattgcagctaaaagagcagaagatcatggatctgtatggccaacccgagcccgtgaaacccttccttttctaccgtgccaagactggtaggacctccacccttgagtctgtggccttcccggactggttcattgcctcctccaagagagaccagcccatcattctgacttcagaacttgggaagtcatacaacactgcctttgaattaaatataaatgactgaactcagcctagaggtggcagcttggtctttgtcttaaagtttctggttcccaatgtgttttcgtctacattttcttagtgtcattttcacgctggtgctgagacaggggcaaggctgctgttatcatctcattttataatgaagaagaagcaattacttcatagcaactgaagaacaggatgtggcctcagaagcaggagagctgggtggtataaggctgtcctctcaagctggtgctgtgtaggccacaaggcatctgcatgagtgactttaagactcaaagaccaaacactgagctttcttctaggggtgggtatgaagatgcttcagagctcatgcgcgttacccacgatggcatgactagcacagagctgatctctgtttctgttttgctttattccctcttgggatgatatcatccagtctttatatgttgccaatatacctcattgtgtgtaatagaaccttcttagcattaagaccttgtaaacaaaaataattcttgtgttaagttaaatcatttttgtcctaattgtaatgtgtaatcttaaagttaaataaactttgtgtatttatataataataaagctaaaactgatataaaataaagaaagagtaaactga

SEQ ID NO: 2450 - protein, 134 aa, Homo sapiens; identical to SEQ ID NO: 2448

SEQ ID NO: 2451 - DNA, 1180 bp, Homo sapiens; identical to SEQ ID NO: 159

SEQ ID NO: 2452 - protein, 169 aa, Homo sapiens; identical to SEQ ID NO: 160

SEQ ID NO: 2453 - DNA, 1203 bp, Homo sapiens
gagccacgattcagtcccctggactgtagataaagaccctttcttgccaggtgctgagacaaccacactatgagaggcactccaggagacgctgatggtggaggaagggccgtctatcaatcaatgtgtaaacctattactgggactattaatgatttgaatcagcaagtgtggacccttcagggtcagaaccttgtggcagttccacgaagtgacagtgtgaccccagtcactgttgctgttatcacatgcaagtatccagaggctcttgagcaaggcagaggggatcccatttatttgggaatccagaatccagaaatgtgtttgtattgtgagaaggttggagaacagcccacattgcagctaaaagagcagaagatcatggatctgtatggccaacccgagcccgtgaaacccttccttttctaccgtgccaagactggtaggacctccacccttgagtctgtggccttcccggactggttcattgcctcctccaagagagaccagcccatcattctgacttcagaacttgggaagtcatacaacactgcctttgaattaaatataaatgactgaactcagcctagaggtggcagcttggtctttgtcttaaagtttctggttcccaatgtgttttcgtctacattttcttagtgtcattttcacgctggtgctgagacaggggcaaggctgctgttatcatctcattttataatgaagaagaagcaattacttcatagcaactgaagaacaggatgtggcctcagaagcaggagagctgggtggtataaggctgtcctctcaagctggtgctgtgtaggccacaaggcatctgcatgagtgactttaagactcaaagaccaaacactgagctttcttctaggggtgggtatgaagatgcttcagagctcatgcgcgttacccacgatggcatgactagcacagagctgatctctgtttctgttttgctttattccctcttgggatgatatcatccagtctttatatgttgccaatatacctcattgtgtgtaatagaaccttcttagcattaagaccttgtaaacaaaaataattcttgtgttaagttaaatcatttttgtcctaattgtaatgtgtaatcttaaagttaaataaactttgtgtatttatataataataaagctaaaactgatataaaataaagaaagagtaaactga

SEQ ID NO: 2454 - protein, 169 aa, Homo sapiens; identical to SEQ ID NO: 160

SEQ ID NO: 2455 - DNA, 477 bp, Homo sapiens; identical to SEQ ID NO: 161

SEQ ID NO: 2456 - protein, 158 aa, Homo sapiens; identical to SEQ ID NO: 162

SEQ ID NO: 2457 - DNA, 1188 bp, Homo sapiens
gacacgggttcctccccactctgtctttctcacctctccttcacttttcctagcctcctcaccaccatctgatctatcttgttctcttcacaaaaggctctgaagacatcatgaacccacaacgggaggcagcacccaaatcctatgctattcgtgattctcgacagatggtgtgggtcctgagtggaaattctttaatagcagctcctcttagccgcagcattaagcctgtcactcttcatttaatagcctgtagagacacagaattcagtgacaaggaaaagggtaatatggtttacctgggaatcaagggaaaagatctctgtctcttctgtgcagaaattcagggcaagcctactttgcagcttaagcttcagggctcccaagataacatagggaaggacacttgctggaaactagttggaattcacacatgcataaacctggatgtgagagagagctgcttcatgggaacccttgaccaatggggaataggagtgggtagaaagaagtggaagagttcctttcaacatcaccatctcaggaagaaggacaaagatttctcatccatgcggaccaacataggaatgccaggaaggatgtagaaataaggggaggaagattcccatctctacaatctttgagtgggtttgctatcaatgaaatgctacaaatggaataagttgcagaaatttttctcttttcttgggttctggagagtttgtaaaacaaggacactatgtatttttaaagagttggtaaatcttacctgtaaagctagagaaggtcggagtctttttaggagtagatttggactacataacctgtaaatgtgttttgtccagtccttagagtgttttttaaaaaattgtaaagtcaaggttttcatgaaaaatgggaagatcagacaacattgctcctgaattcccacagagcagcaagctactagagctcaatctgttatttcttttcctgatgtacaggggttaagtcctatggaagaaacagcagaattattcaaaattatttacataatgtgcaattattcactagagcatgaggagtgaaacgctctgtttagtatgtataacttaaaaggaacacatacaattaaaagtaattgaaagacatttcttcttaaaaattctataatcttacactggtaaaataaactagtttttcccatgt

SEQ ID NO: 2458 - protein, 164 aa, Homo sapiens; identical to SEQ ID NO: 164

SEQ ID NO: 2459 - DNA, 1052 bp, Homo sapiens
gacacgggttcctccccactctgtctttctcacctctccttcacttttcctagcctcctcaccaccatctgatctatcttgttctcttcacaaaaggctctgaagacatcatgaacccacaacgggaggcagcacccaaatcctatgctattcgtgattctcgacagatggtgtgggtcctgagtggaaattctttaatagcagctcctcttagccgcagcattaagcctgtcactcttcatttaatagcctgtagagacacagaattcagtgacaaggaaaagggtaatatggtttacctgggaatcaagggaaaagatctctgtctcttctgtgcagaaattcagggcaagcctactttgcagcttaaggaaaaaaatatcatggacctgtatgtggagaagaaagcacagaagccctttctctttttccacaataaagaaggctccacttctgtctttcagtcagtctcttaccctggctggttcatagccacctccaccacatcaggacagcccatctttctcaccaaggagagaggcataactaataacactaacttctacttagattctgtggaataaatccagcctaggctgtgggtggctggttccaggatagagaatcaagctgtcagagtcatcttaacagatcattatgcgactgagttcactagcagttcagcccatccatagcttacctcattcttactatccaaaagccacctcctcctccaaacatccatttctgtaccaagaccctcactcgaatgtcactatcccaagatgaaacctaaaaatcactttccattctttcttgatcttaccccaccatccactcagctgccatgcccagtttagtcaaccccccaaatgctgcttcatgcaaccttccattcctattccttttgccaacccatgatgtagagatgtggattcatgacattttgttcatacaacttcttcaataaaacattataatatgtgccccaaagataaagctgaagaatgagatgaatgtgaaattaaaggtttgcatgtctttctaatcct

SEQ ID NO: 2460 - protein, 157 aa, Homo sapiens; identical to SEQ ID NO: 166

SEQ ID NO: 2461 - DNA, 1376 bp, Homo sapiens
ggagagtcccacctctaacatctcctgtaggcctggcaatggcaggcaggaaagacagaggaaggaaggagggagaagggaaggagtgaaggaaggagtgaaaaaggggagtctacaccctgtggagctcaagatggtcctgagtggggcgctgtgcttccgaatgaaggactcggcattgaaggtgctttatctgcataataaccagcttctagctggagggctgcatgcagggaaggtcattaaaggtgaagagatcagcgtggtccccaatcggtggctggatgccagcctgtcccccgtcatcctgggtgtccagggtggaagccagtgcctgtcatgtggggtggggcaggagccgactctaacactagagccagtgaacatcatggagctctatcttggtgccaaggaatccaagagcttcaccttctaccggcgggacatggggctcacctccagcttcgagtcggctgcctacccgggctggttcctgtgcacggtgcctgaagccgatcagcctgtcagactcacccagcttcccgagaatggtggctggaatgcccccatcacagacttctacttccagcagtgtgactagggcaacgtgccccccagaactccctgggcagagccagctcgggtgaggggtgagtggaggagacccatggcggacaatcactctctctgctctcaggacccccacgtctgacttagtgggcacctgaccactttgtcttctggttcccagtttggataaattctgagatttggagctcagtccacggtcctcccccactggatggtgctactgctgtggaatcttgtaaaaaccatgtggggtaaactgggaataacatgaaaagatttctgtggaggtggggtgggggagtggtgggaatcattcctgcttaatggtaactgaccagtgttaccctgagccccgcaggccaacccatccccagttgagccttatagggtcagtagctctccacatgaagacctgtcactcaccactatgcaggagagggaggtggtcatagagtcagggatctatggcccttggcccagccccacctccttccctttaatcctgccactgtcatatgctacctttcctatctcttccctcatcatcttgttgtgggcatgaggaggtgctgatgtcagaagaaatggctcgagctcagaagataaaagataagtagggtatgctgatcctcttttaaaaacccaagatacaatcaaaatcccagatgctggtctctattcccatgaaaaagtgctcatgacatattgagaagacctacttacaaagtggcatatattgcaatttattttaattaaaagatacctatttatatatttctttatag

SEQ ID NO: 2462 - protein, 155 aa, Homo sapiens; identical to SEQ ID NO: 168

SEQ ID NO: 2463 - DNA, 2665 bp, Homo sapiens
ggagagtcccacctctaacatctcctgtaggcctggcaatggcaggcaggaaagacagaggaaggaaggagggagaagggaaggagtgaaggaaggagtgaaaaaggggagtctacaccctgtggagctcaagatggtcctgagtggggcgctgtgcttccgaatgaaggactcggcattgaaggtgctttatctgcataataaccagcttctagctggagggctgcatgcagggaaggtcattaaaggtgaagagatcagcgtggtccccaatcggtggctggatgccagcctgtcccccgtcatcctgggtgtccagggtggaagccagtgcctgtcatgtggggtggggcaggagccgactctaacactagagccagtgaacatcatggagctctatcttggtgccaaggaatccaagagcttcaccttctaccggcgggacatggggctcacctccagcttcgagtcggctgcctacccgggctggttcctgtgcacggtgcctgaagccgatcagcctgtcagactcacccagcttcccgagaatggtggctggaatgcccccatcacagacttctacttccagcagtgtgactagggcaacgtgccccccagaactccctgggcagagccagctcgggtgaggggtgagtggaggagacccatggcggacaatcactctctctgctctcaggacccccacgtctgacttagtgggcacctgaccactttgtcttctggttcccagtttggataaattctgagatttggagctcagtccacggtcctcccccactggatggtgctactgctgtggaatcttgtaaaaaccatgtggggtaaactgggaataacatgaaaagatttctgtggaggtggggtgggggagtggtgggaatcattcctgcttaatggtaactgaccagtgttaccctgagccccgcaggccaacccatccccagttgagccttatagggtcagtagctctccacatgaagacctgtcactcaccactatgcaggagagggaggtggtcatagagtcagggatctatggcccttggcccagccccacctccttccctttaatcctgccactgtcatatgctacctttcctatctcttccctcatcatcttgttgtgggcatgaggaggtgctgatgtcagaagaaatggctcgagctcagaagataaaagataagtagggtatgctgatcctcttttaaaaacccaagatacaatcaaaatcccagatgctggtctctattcccatgaaaaagtgctcatgacatattgagaagacctacttacaaagtggcatatattgcaatttattttaattaaaagatacctatttatatatttctttatagaaaaaagtctggaagagtttacttcaattgtagcaatgtcagggtggtggcagtataggtgatttttcttttaattctgttaatttacctgtatttcctaatttttctacaatgaagatgaattccttgtataaaaataagaaaagaaattaatcttgaggtaagcagagtagacatcatctctgattgtcctcagcctccacttccccagagtaaattcaaattgaatcgagctctgctgctctggttggttgtagtagtgatcaggaaacagatctcagcaaagccactgaggaggaggctgtgctgagtttgtgtggctggaatctctgggtaaggaacttaaagaacaaaaatcatctggtaattctttcctagaaggatcacagcccctgggattccaaggcattggatccagtctctaagaaggctgctgtactggttgaattgtgtccccctcaaattcacatccttcttggaatctcagtctgtgagtttatttggagataaggtctctgcagatgtagttagttaagacaaggtcatgctggatgaaggtagacctaaattcaatatgactggtttccttgtatgaaaaggagaggacacagagacagaggagatgcggggaagactatgtaaagatgaaggcagagatcggagttttgcagccacaagctaagaaacaccaaggattgtggcaaccatcagaagcttggaagaggcaaagaagaattcttccctagaggctttagagggataacggctctgctgaaaccttaatctcagacttccagcctcctgaacgaagaaagaataaatttcggctgttttaagccaccaaggataattggttacagcagctctaggaaactaatacagctgctaaaatgatccctgtctcctcgtgtttacattctgtgtgtgtcccctcccacaatgtaccaaagttgtctttgtgaccaatagaatatggcagaagtgatggcatgccacttccaagattaggttataaaagacactgcagcttctacttgagccctctctctctgccacccaccgcccccaatctatcttggctcactcgctctgggggaagctagctgccatgctatgagcaggcctataaagagacttacgtggtaaaaaatgaagtctcctgcccacagccacattagtgaacctagaagcagagactctgtgagataatcgatgtttgttgttttaagttgctcagttttggtctaacttgttatgcagcaatagataaataatatgcagagaaagag

SEQ ID NO: 2464 - protein, 155 aa, Homo sapiens; identical to SEQ ID NO: 168

SEQ ID NO: 2465 - DNA, 2693 bp, Homo sapiens
cgctgggaatcctgctcctcctcaggtcctggcagtttcagggcccctccctaggccttacttaaaaggctgaggcatccttggaggaacaggcagactccacagctcccgccaggagaaaggaacattctgaggggagtctacaccctgtggagctcaagatggtcctgagtggggcgctgtgcttccgaatgaaggactcggcattgaaggtgctttatctgcataataaccagcttctagctggagggctgcatgcagggaaggtcattaaaggtgaagagatcagcgtggtccccaatcggtggctggatgccagcctgtcccccgtcatcctgggtgtccagggtggaagccagtgcctgtcatgtggggtggggcaggagccgactctaacactagagccagtgaacatcatggagctctatcttggtgccaaggaatccaagagcttcaccttctaccggcgggacatggggctcacctccagcttcgagtcggctgcctacccgggctggttcctgtgcacggtgcctgaagccgatcagcctgtcagactcacccagcttcccgagaatggtggctggaatgcccccatcacagacttctacttccagcagtgtgactagggcaacgtgccccccagaactccctgggcagagccagctcgggtgaggggtgagtggaggagacccatggcggacaatcactctctctgctctcaggacccccacgtctgacttagtgggcacctgaccactttgtcttctggttcccagtttggataaattctgagatttggagctcagtccacggtcctcccccactggatggtgctactgctgtggaatcttgtaaaaaccatgtggggtaaactgggaataacatgaaaagatttctgtggaggtggggtgggggagtggtgggaatcattcctgcttaatggtaactgaccagtgttaccctgagccccgcaggccaacccatccccagttgagccttatagggtcagtagctctccacatgaagacctgtcactcaccactatgcaggagagggaggtggtcatagagtcagggatctatggcccttggcccagccccacctccttccctttaatcctgccactgtcatatgctacctttcctatctcttccctcatcatcttgttgtgggcatgaggaggtgctgatgtcagaagaaatggctcgagctcagaagataaaagataagtagggtatgctgatcctcttttaaaaacccaagatacaatcaaaatcccagatgctggtctctattcccatgaaaaagtgctcatgacatattgagaagacctacttacaaagtggcatatattgcaatttattttaattaaaagatacctatttatatatttctttatagaaaaaagtctggaagagtttacttcaattgtagcaatgtcagggtggtggcagtataggtgatttttcttttaattctgttaatttacctgtatttcctaatttttctacaatgaagatgaattccttgtataaaaataagaaaagaaattaatcttgaggtaagcagagtagacatcatctctgattgtcctcagcctccacttccccagagtaaattcaaattgaatcgagctctgctgctctggttggttgtagtagtgatcaggaaacagatctcagcaaagccactgaggaggaggctgtgctgagtttgtgtggctggaatctctgggtaaggaacttaaagaacaaaaatcatctggtaattctttcctagaaggatcacagcccctgggattccaaggcattggatccagtctctaagaaggctgctgtactggttgaattgtgtccccctcaaattcacatccttcttggaatctcagtctgtgagtttatttggagataaggtctctgcagatgtagttagttaagacaaggtcatgctggatgaaggtagacctaaattcaatatgactggtttccttgtatgaaaaggagaggacacagagacagaggagatgcggggaagactatgtaaagatgaaggcagagatcggagttttgcagccacaagctaagaaacaccaaggattgtggcaaccatcagaagcttggaagaggcaaagaagaattcttccctagaggctttagagggataacggctctgctgaaaccttaatctcagacttccagcctcctgaacgaagaaagaataaatttcggctgttttaagccaccaaggataattggttacagcagctctaggaaactaatacagctgctaaaatgatccctgtctcctcgtgtttacattctgtgtgtgtcccctcccacaatgtaccaaagttgtctttgtgaccaatagaatatggcagaagtgatggcatgccacttccaagattaggttataaaagacactgcagcttctacttgagccctctctctctgccacccaccgcccccaatctatcttggctcactcgctctgggggaagctagctgccatgctatgagcaggcctataaagagacttacgtggtaaaaaatgaagtctcctgcccacagccacattagtgaacctagaagcagagactctgtgagataatcgatgtttgttgttttaagttgctcagttttggtctaacttgttatgcagcaatagataaataatatgcagagaaagag

SEQ ID NO: 2466 - protein, 155 aa, Homo sapiens; identical to SEQ ID NO: 168

SEQ ID NO: 2467 - DNA, 1310 bp, Homo sapiens
agactccacagctcccgccaggagaaaggaacattctgaggggagtctacaccctgtggagctcaagatggtcctgagtggggcgctgtgcttccgaatgaaggactcggcattgaaggtgctttatctgcataataaccagcttctagctggagggctgcatgcagggaaggtcattaaaggtgaagagatcagcgtggtccccaatcggtggctggatgccagcctgtcccccgtcatcctgggtgtccagggtggaagccagtgcctgtcatgtggggtggggcaggagccgactctaacactagagccagtgaacatcatggagctctatcttggtgccaaggaatccaagagcttcaccttctaccggcgggacatggggctcacctccagcttcgagtcggctgcctacccgggctggttcctgtgcacggtgcctgaagccgatcagcctgtcagactcacccagcttcccgagaatggtggctggaatgcccccatcacagacttctacttccagcagtgtgactagggcaacgtgccccccagaactccctgggcagagccagctcgggtgaggggtgagtggaggagacccatggcggacaatcactctctctgctctcaggacccccacgtctgacttagtgggcacctgaccactttgtcttctggttcccagtttggataaattctgagatttggagctcagtccacggtcctcccccactggatggtgctactgctgtggaatcttgtaaaaaccatgtggggtaaactgggaataacatgaaaagatttctgtggaggtggggtgggggagtggtgggaatcattcctgcttaatggtaactgaccagtgttaccctgagccccgcaggccaacccatccccagttgagccttatagggtcagtagctctccacatgaagacctgtcactcaccactatgcaggagagggaggtggtcatagagtcagggatctatggcccttggcccagccccacctccttccctttaatcctgccactgtcatatgctacctttcctatctcttccctcatcatcttgttgtgggcatgaggaggtgctgatgtcagaagaaatggctcgagctcagaagataaaagataagtagggtatgctgatcctcttttaaaaacccaagatacaatcaaaatcccagatgctggtctctattcccatgaaaaagtgctcatgacatattgagaagacctacttacaaagtggcatatattgcaatttattttaattaaaagatacctatttatatatttctttatag

SEQ ID NO: 2468 - protein, 155 aa, Homo sapiens; identical to SEQ ID NO: 168

SEQ ID NO: 2469 - DNA, 674 bp, Homo sapiens
acatggggctcacctccagcttcgagtcggctgcctacccgggctggttcctgtgcacggtgcctgaagccgatcagcctgtcagactcacccagcttcccgagaatggtggctggaatgcccccatcacagacttctacttccagcagtgtgactagggcaacgtgccccccagaactccctgggcagagccagctcgggtgaggggaatgaactccagtgtccccacccaaaccctggggaatgggagcagaagccagaggaggagcccatatctgagccccaggtattccacctgcacttcacctgttggaccagcttggtggttgagagtccactgaggcactggcaaggaggtggccaggacagacaaggctgcctctatggacctcacagctccagcccagattcagctgaagtcctcaggcaacaggcagcacagctcctaccccaggcctctcagggctgccaagaacatgagctccggatgctaggctgtgtttcagaccctgttcacactctctttgtccatgggcccagacacagtcttgtgctgctccctctgcttttgggtcctccatccatcctctctgcctagataaatctctcatctttcaataccctgctaagatgtcacctcctccaagaagcttttactgagttgagacaccccc

SEQ ID NO: 2470 - protein, 51 aa, Homo sapiens
MGLTSSFESAAYPGWFLCTVPEADQPVRLTQLPENGGWNAPITDFYFQQCD

SEQ ID NO: 2471 - DNA, 1018 bp, Homo sapiens
agttggagtctccagggatcagggttccaggaactcaggatctgcagtgaggaccagacaccactgattgcaggaatgtgttccctccccatggcaagatactacataattaaatatgcagaccagaaggctctatacacaagagatggccagctgctggtgggagatcctgttgcagacaactgctgtgcagagaagatctgcatacttcctaacagaggcttggcccgcaccaaggtccccattttcctggggatccagggagggagccgctgcctggcatgtgtggagacagaagaggggccttccctacagctggaggatgtgaacattgaggaactgtacaaaggtggtgaagaggccacacgcttcaccttcttccagagcagctcaggctccgccttcaggcttgaggctgctgcctggcctggctggttcctgtgtggcccggcagagccccagcagccagtacagctcaccaaggagagtgagccctcagcccgtaccaagttttactttgaacagagctggtagggagacaggaaactgcgttttagccttgtgcccccaaaccaagctcatcctgctcagggtctatggtaggcagaataatgtcccccgaaatatgtccacatcctaatcccaagatctgtgcatatgttaccatacatgtccaaagaggttttgcaaatgtgattatgttaaggatcttgaaatgaggagacaatcctgggttatccttgtgggctcagtttaatcacaagaaggaggcaggaagggagagtcagagagagaatggaagataccatgcttctaattttgaagatggagtgaggggccttgagccaacaaatgcaggtgtttttagaaggtggaaaagccaagggaacggattctcctctagagtctccggaaggaacacagctcttgacacatggatttcagctcagtgacacccatttcagacttctgacctccacaactataaaataataaacttgtgttattgtaaacctct

SEQ ID NO: 2472 - protein, 152 aa, Homo sapiens; identical to SEQ ID NO: 172

SEQ ID NO: 2473 - DNA, 1364 bp, Homo sapiens
ggcagtgggactgggtttgagctgggcttatcctccaactgtgagggaggctacagcacactccaccccactctcagggctgggaattgttgtggctcagctatttgggggaatctgttttccagtttctcagaaccagcgcaagcacacacatcccaggctcacacccctggtggctggacttgctcccggatagcctcagtcagggagaggcagagctgcctggagcctgctgggctggtggaagccttggtggattctggcaggccaattatagacgaatggcctggggaacccgtgcagcccttggctgagtggttctaagccccagcacgtctgcctctggcttcacccagcctccttttctaactgcccttctctcctccccatcagtgaggaccagacaccactgattgcaggaatgtgttccctccccatggcaagatactacataattaaatatgcagaccagaaggctctatacacaagagatggccagctgctggtgggagatcctgttgcagacaactgctgtgcagagaagatctgcatacttcctaacagaggcttggcccgcaccaaggtccccattttcctggggatccagggagggagccgctgcctggcatgtgtggagacagaagaggggccttccctacagctggaggatgtgaacattgaggaactgtacaaaggtggtgaagaggccacacgcttcaccttcttccagagcagctcaggctccgccttcaggcttgaggctgctgcctggcctggctggttcctgtgtggcccggcagagccccagcagccagtacagctcaccaaggagagtgagccctcagcccgtaccaagttttactttgaacagagctggtagggagacaggaaactgcgttttagccttgtgcccccaaaccaagctcatcctgctcagggtctatggtaggcagaataatgtcccccgaaatatgtccacatcctaatcccaagatctgtgcatatgttaccatacatgtccaaagaggttttgcaaatgtgattatgttaaggatcttgaaatgaggagacaatcctgggttatccttgtgggctcagtttaatcacaagaaggaggcaggaagggagagtcagagagagaatggaagataccatgcttctaattttgaagatggagtgaggggccttgagccaacaaatgcaggtgtttttagaaggtggaaaagccaagggaacggattctcctctagagtctccggaaggaacacagctcttgacacatggatttcagctcagtgacacccatttcagacttctgacctccacaactataaaataataaacttgtgttattgtaaacctct

SEQ ID NO: 2474 - protein, 152 aa, Homo sapiens; identical to SEQ ID NO: 172

SEQ ID NO: 2475 - DNA, 900 bp, Homo sapiens
gctgtggcctctcctagcgaggggacatgactcctgcagaagtcctggctcaccgtccagtctgcatgcagggccaggccaggtgtgcccatgtccagttccttcctgcctgagcctttacctgccaagagcctgcaacatggggttcccttgtcccttgactcttctctctcttccctcctagagaagatctgcatacttcctaacagaggcttggcccgcaccaaggtccccattttcctggggatccagggagggagccgctgcctggcatgtgtggagacagaagaggggccttccctacagctggaggatgtgaacattgaggaactgtacaaaggtggtgaagaggccacacgcttcaccttcttccagagcagctcaggctccgccttcaggcttgaggctgctgcctggcctggctggttcctgtgtggcccggcagagccccagcagccagtacagctcaccaaggagagtgagccctcagcccgtaccaagttttactttgaacagagctggtagggagacaggaaactgcgttttagccttgtgcccccaaaccaagctcatcctgctcagggtctatggtaggcagaataatgtcccccgaaatatgtccacatcctaatcccaagatctgtgcatatgttaccatacatgtccaaagaggttttgcaaatgtgattatgttaaggatcttgaaatgaggagacaatcctgggttatccttgtgggctcagtttaatcacaagaaggaggcaggaagggagagtcagagagagaatggaagataccatgcttctaattttgaagatggagtgaggggccttgagccaacaaatgcaggtgtttttagaaggtggaaaagccaagggaacggattctcctctagagtct

SEQ ID NO: 2476 - protein, 144 aa, Homo sapiens
MSSSFLPEPLPAKSLQHGVPLSLDSSLSSLLEKICILPNRGLARTKVPIFLGIQGGSRCLACVETEEGPSLQLEDVNIEELYKGGEEATRFTFFQSSSGSAFRLEAAAWPGWFLCGPAEPQQPVQLTKESEPSARTKFYFEQSW

SEQ ID NO: 2477 - DNA, 775 bp, Homo sapiens
ggttgctgggaagtaggagaaagctggcagccacaggcctcacccagctcccatgcagcccacagccctaaaggccggtttcactcccaccatgccccaccaacagcaatgagtttacttccaggaagctggtgagcagggctgagaacttgctccaggctacaagcctcccagctgagaaaacgagcgaactcacagttcctcgactgtcccatggagcctgcagtggcaatccgcctccttcaaagggtctgtggactttctcggctttcctgatctcagaaacacagcttttacaaaggataaatgaagagaaattcaccagagatacattgtaatgaatctgtaaatcaccaaagctaaagatattatttcacaagtggaatgacagctgacttctcaacaacaacgaaagcaaggagacagttgaaagacatcttgaaaatggaattagcagttcacaaagcacattcgcatataagggcttgttttgaattgatcttggcagcaattctatgagacaagtaaaagcacaagaggaataggaactgcacctcttccttcagtttcagcttgaataatatcaggaagattcgtatcggtctgagttgggtcacgtacccgacgtgctatagctgaggatgggagcgttggggaccttgtctggcttgttcccaatgcctggaagagtgcctggcacacaggattaagccaacacatatgttttgaatgaatgtgtgcacacatgcatgagctggcggcagtcggggttggg

SEQ ID NO: 2478 - protein, 44 aa, Homo sapiens
MTADFSTTTKARRQLKDILKMELAVHKAHSHIRACFELILAAIL

SEQ ID NO: 2479 - DNA, 2137 bp, Homo sapiens
agctcccatgcagcccacagccctaaaggccggtttcactcccaccatgccccaccaacagcaatgagtttacttccaggaagctggtgagcagggctgagaacttgctccaggctacaagcctcccagctgagaaaacgagcgaactcacagttcctcgactgtcccatggagcctgcagtggcaatccgcctccttcaaagggtctgtggactttctcggctttcctggaattagcagttcacaaagcacattcgcatataagggcttgttttgaattgatcttggcagcaattctatgagacaagtaaaagcacaagaggaataggaactgcacctcttccttcagtttcagcttgaataatatcaggaagattcgtatcggtctgagttgggtcacgtacccgacgtgctatagctgaggatgggctgacttgtatgaagaaggaggtggaggaggaggagaaggtgaagacaatgctgactcaaaggggggattataaaactaatcatcaaagccaagaaggcaagagcaagcatgtaccgctgaaaacacaagataactgcataagtaatgactttcagtgcagattcatagctaacccataaactgctggggcaaaaatcatcttggaaggctctgaacctcagaaaggattcacaagacgatctgccgaccctctgggagaaaatccagcaagatgcaagccttcagaatctgggatgttaaccagaagaccttctatctgaggaacaaccaactagttgctggatacttgcaaggaccaaatgtcaatttagaagaaaagatagatgtggtacccattgagcctcatgctctgttcttgggaatccatggagggaagatgtgcctgtcctgtgtcaagtctggtgatgagaccagactccagctggaggcagttaacatcactgacctgagcgagaacagaaagcaggacaagcgcttcgccttcatccgctcagacagtggccccaccaccagttttgagtctgccgcctgccccggttggttcctctgcacagcgatggaagctgaccagcccgtcagcctcaccaatatgcctgacgaaggcgtcatggtcaccaaattctacttccaggaggacgagtagtactgcccaggcctgcctgttcccattcttgcatggcaaggactgcagggactgccagtccccctgccccagggctcccggctatgggggcactgaggaccagccattgaggggtggaccctcagaaggcgtcacaacaacctggtcacaggactctgcctcctcttcaactgaccagcctccatgctgcctccagaatggtctttctaatgtgtgaatcagagcacagcagcccctgcacaaagcccttccatgtcgcctctgcattcaggatcaaaccccgaccacctgcccaacctgctctcctcttgccactgcctcttcctccctcattccaccttcccatgccctggatccatcaggccacttgatgacccccaaccaagtggctcccacaccctgttttacaaaaaagaaaagaccagtccatgagggaggtttttaagggtttgtggaaaatgaaaattaggatttcatgatttttttttttcagtccccgtgaaggagagcccttcatttggagattatgttctttcggggagaggctgaggacttaaaatattcctgcatttgtgaaatgatggtgaaagcactgctgcccagcctccaagctccatctccactccagattttttacagctgcctgcagtactttacctcctatcagaagtttctcagctcccaaggctctgagcaaatgtggctcctgggggttctttcttcctctgctgaaggaataaattgctccttgacattgtagagcttctggcacttggagacttgtatgaaagatggctgtgcctctgcctgtctcccccaccgggctgggagctctgcagagcaggaaacatgactcgtatatgtctcaggtccctgcagggccaagcacctagcctcgctcttggcaggtactcagcgaatgaatgctgtatatgttgggtgcaaagttccctacttcctgtgacttcagctctgttttacaataaaatcttgaaaatgcctat

SEQ ID NO: 2480 - protein, 143 aa, Homo sapiens
MQAFRIWDVNQKTFYLRNNQLVAGYLQGPNVNLEEKIDVVPIEPHALFLGIHGGKMCLSCVKSGDETRLQLEAVNITDLSENRKQDKRFAFIRSDSGPTTSFESAACPGWFLCTAMEADQPVSLTNMPDEGVMVTKFYFQEDE

SEQ ID NO: 2481 - DNA, 414 bp, Homo sapiens
agcctcccagctgagaaaacgagcgaactcacagttcctcgactgtcccatggagcctgcagtggcaatccgcctccttcaaagggtctgtggactttctcggctttcctggaattagcagttcacaaagcacattcgcatataagggcttgttttgaattgatcttggcagcaattctatgagacaagtaaaagcacaagaggaataggaactgcacctcttccttcagtttcagcttgaataatatcaggaagattcgtatcggtctgagttgggtcacgtacccgacgtgctatagctgaggatggggtaagctgattggagtttgcaacactgttcacatagccaagatatggaaagaacctaaatgtcaactggtggatgaatggataaagaaattgtggtatatacat

SEQ ID NO: 2482 - protein, 60 aa, Homo sapiens
SLPAEKTSELTVPRLSHGACSGNPPPSKGLWTFSAFLELAVHKAHSHIRACFELILAAIL

SEQ ID NO: 2483 - DNA, 1880 bp, Homo sapiens
gacatttcctgttgcggggaaggaggcaaaagaacaaagatgttactctcctttgatttggctgacaattcaaagactcttcattctcataggagaatataagaattcatgaacaagattcccagaattcagaggtcgattctcaagctgaagagtctgtggtttcattgccgcatggaacaggatggagtctcggtctatagcccgggctggagtacaatggcacaatctcagctcactgcaacctctgcctcctgggttcaagtgattctcctgcctcaggctcccgagtagctgggattacaggtcagaaaaaggtgcacagcaggatgtgaagatctctctgctctgagcgcgggctggttctttcgatgtcagggaacttctcaaatgagaagagatggaagaagagatttttgagggaggagagagaaagtcactttacaccagggaagaggaagagaggagactcagaatgcaagcaaacactgctgttcttcttccgcttcgttaatacgaattactgccaacaatctgctgcattcacatcttgctgggtatttaaaaatccatcccaaatttgcctcatttctgtcactcttcttggtgtgcttgtagatgaatggttatagaagtttatttgtaaaaatggtaaatattacttctctattaagatcaaattttttctcgaaagattcaacacaactaattattatgaaaataaatataattatcgtactgttgaaatacttaatataattatatgttgtgtggcgtctcaggctacttgcccctgactgtctcacccaccccttgctaacctggctgcctttttctgtgggacaaattcctccttagcttcctgaatatttctctatgtcagacttattttatcttatttttccagattagaggtttttggtggttgggggaagaagtgctgcagatatacatggcttagcttttctctacaatatgatttttaaaagtaatgttcatctaactaaaaagcaaatgtttttctcatcattgtcaattggttttcaaatactgtccctctctctagatactatctcccacccctccagccacatcaaaagtctcactataggagtattgggactatggctgaaattttactgtcaagcgaacttttactgcttttccaaagttctatccaaataccatctcctttgtgaagtgttctttgcttctcttgagcaattaatcacttgaatcatttccttctctgtgttcccatagcacaaaggacatatctctactatgcgtagtgtatctttttgcatatccgtctccccaacattggctgtgaggtgaataaatgttttaagcacttttatttttatttttgtagacatggagctttgctatgttacccaagctgatctcagactcctggtcttaagcgatcctcccatgttggcctcccaaagtgttgggattacaggcatgagtcaccacaccaagccacaccagttttaagcacttttaatacataaggacaacttgccctctagttgagtaccttttctcctccactccaacaaacattggatagcataattctaaaactctttgctaacaacttacatctctttgattacttttgtgatgaaacattaaacaatatgatttgtatagtaatgactgtttgtgttttaaactgaccatgttttgagttcagttcaattctattattatgatgtggctgacctccccccaacctattactccttcctatttgtcactctggggattatatggtagtgtacttatcttgcaaaatattgcactgtggtaatatgattaagttatttcatcagaatatagtattaaagctataatatgttcctggaaaa

SEQ ID NO: 2484 - protein, 61 aa, Homo sapiens
MNKIPRIQRSILKLKSLWFHCRMEQDGVSVYSPGWSTMAQSQLTATSASWVQVILLPQAPE

SEQ ID NO: 2485 - DNA, 1425 bp, Homo sapiens
cagtcacatttcagccactgctctgagaatttgtgagcagcccctaacaggctgttacttcactacaactgacgatatgatcatcttaatttacttatttctcttgctatgggaagacactcaaggatggggattcaaggatggaatttttcataactccatatggcttgaacgagcagccggtgtgtaccacagagaagcacggtctggcaaatacaagctcacctacgcagaagctaaggcggtgtgtgaatttgaaggcggccatctcgcaacttacaagcagctagaggcagccagaaaaattggatttcatgtctgtgctgctggatggatggctaagggcagagttggataccccattgtgaagccagggcccaactgtggatttggaaaaactggcattattgattatggaatccgtctcaataggagtgaaagatgggatgcctattgctacaacccacacgcaaaggagtgtggtggcgtctttacagatccaaagcaaatttttaaatctccaggcttcccaaatgagtacgaagataaccaaatctgctactggcacattagactcaagtatggtcagcgtattcacctgagttttttagattttgaccttgaagatgacccaggttgcttggctgattatgttgaaatatatgacagttacgatgatgtccatggctttgtgggaagatactgtggagatgagcttccagatgacatcatcagtacaggaaatgtcatgaccttgaagtttctaagtgatgcttcagtgacagctggaggtttccaaatcaaatatgttgcaatggatcctgtatccaaatccagtcaaggaaaaaatacaagtactacttctactggaaataaaaactttttagctggaagatttagccacttataaaaaaaaaaaaaaggatgatcaaaacacacagtgtttatgttggaatcttttggaactcctttgatctcactgttattattaacatttatttattatttttctaaatgtgaaagcaatacataatttagggaaaattggaaaatataggaaactttaaacgagaaaatgaaacctctcataatcccactgcatagaaataacaagcgttaacattttcatatttttttctttcagtcatttttctatttgtggtatatgtatatatgtacctatatgtatttgcatttgaaattttggaatcctgctctatgtacagttttgtattatactttttaaatcttgaactttataaacattttctgaaatcattgattattctacaaaaacatgattttaaacagctgtaaaatattctatgatatgaatgttttatgcattatttaagcctgtctctattgttggaatttcaggtcattttcataaatattgttgcaataaatatccttgaacacaca

SEQ ID NO: 2486 - protein, 277 aa, Homo sapiens; identical to SEQ ID NO: 176

SEQ ID NO: 2487 - DNA, 8192 bp, Homo sapiens
ggtctaggagggagcgcgccgcacgcgtgagtaaacagccggagctgggaaagtcgagctctggcagcgtctgggtgctgaggggcagaggcggagagaaccctgtcctgatcttcctagggtggccgacatgacggccaggggtcagagccccctcgcgccgctgttggagactttggaagacccttctgcctcccatggagggcagactgacgcttacctgactctgaccagtcgtatgactggagaagaaggaaaagaagtaattacagaaattgagaaaaaacttcctcggctgtacaaagttttaaagactcacatttccagtcaaaactcggagctgagtagtgctgctctacaagccctggggttttgcttatataatcccaaaattacctcagaattatcagaggcaaatgctctagaattgctttcaaaattgaatgataccattaagaattcagacaaaaatgtacgtactagagcactttgggtgatatctaagcagacatttccctctgaagtggttggcaaaatggtatccagtataattgattcattagaaatactgtttaacaaaggagagacgcattctgctgttgttgattttgaagcattaaatgttatcgtaaggctaattgaacaagccccaattcaaatgggagaagaggcagtgaggtgggcaaaactggtcatacctttagtggttcattcagcacaaaaggtacatttgcggggagcaactgctctggagatgggaatgccattattgcttcagaaacagcaagaaatagcatctattacggagcagcttatgactactaaattaatctcagaacttcagaagctatttatgagtaaaaatgagacttacgtgttaaaattatggcctttgtttgtcaaactacttggaaggaccttgcatcgaagtgggagtttcatcaattctctcttgcaactagaagaacttggatttcgtagtggagcacccatgattaaaaagatagcttttattgcttggaagagtttaatagataattttgctttaaatccagatatactatgtagtgcaaaaagactcaagttgttaatgcagcctttgagttccatccatgtgagaacagaaactctagcattaacaaaactagaagtctggtggtatttactgatgagacttggacctcatcttcctgctaattttgaacaggtttgtgtgcctctgattcaaagtacaataagcattgattctaatgcctcacctcagggcaattcgtgtcatgtagctacatctccaggtttaaatcctatgactcctgtacacaaaggtgcttcctccccgtacggagccccgggaactccccgaatgaacctgagttcgaatttaggtggaatggccacaatcccatccattcaacttttgggacttgaaatgttgcttcatttcttgttgggtccagaagccttgagttttgctaagcaaaataaacttgtgctgagcttagagccattggaacatccgttaatcagcagcccttcctttttttccaaacatgcaaatacacttatcactgctgttcatgatagctttgttgcagttggaaaagatgcccccgatgtggttgtcagtgctatctggaaggagctaattagcttggtgaagtcagttactgaatcaggtaacaaaaaagagaaaccaggttctgaagttttgactctcttattaaagtctttggaaagcatagtaaagtctgaagtatttcctgtatcaaaaacgctggtcctcatggaaattacaattaaaggacttcctcagaaagtattaggttcaccagcatatcaggttgctaatatggatattcttaatggaactccagctttgttcttaattcaattaattttcaacaatttcttggaatgtggtgtatcagatgaaaggttctttctcagtttggaatcacttgtaggctgtgttctttctggtccaacttcaccactagctttcagtgactcagttttaaatgttattaatcaaaatgcaaagcagttggaaaataaggagcatctctggaaaatgtggagtgttatagtcaccccattaactgaattgattaatcagaccaatgaagtaaatcaaggtgatgccttagaacataattttagtgccatctatggtgcattgactttaccagtaaaccacattttttcagaacagagatttccagtggccaccatgaagactttgcttagaacttggtcagaattatatagagcatttgctcgttgtgctgctttggtggcaacagcagaagagaacttgtgctgtgaggaactttcttccaagataatgtccagtttggaagatgaaggcttttctaatttgttgttcgtggatagaattatttatattattactgtaatggttgattgcattgacttctcaccatataatattaaatatcagcccaaagttaaatcaccacagagaccttcagattggtccaaaaagaagaatgagcccctagggaaattgacttctttatttaaacttattgtgaaagtgatctattctttccacacactgagcttcaaggaagcacattctgataccctcttcactattggcaactcaatcaccggcattatttccagtgtacttgggcatatttctttgccttctatgatccgaaaaatatttgcaactttaacaagacctctggcattattttatgaaaactcaaagcttgatgaagttcctaaagtatatagttgtctgaacaacaagttagaaaagctactgggagaaattattgcttgtctgcaattcagctacaccggaacttatgatagtgaacttcttgaacaactctccccactattatgcataatatttctgcacaagaataaacagattcgaaaacagagtgctcagttctggaatgccacttttgccaaagtgatgatgttggtttatcctgaagagttaaaaccagtactaacacaagccaaacaaaaatttctgctcctgttgcctggtttggaaactgttgaaatgatggaggaatccagtggaccatattctgatggaacagaaaattcacaactaaatgtgaagataagtggcatggagagaaaatcaaatggaaaaagagattcatttttggcacaaacaaagaataaaaaagaaaatatgaaaccagcagccaaactgaaacttgaatcttcgtctttaaaagtaaagggtgaaattcttttggaagaggaaaagtctactgactttgtgtttatacctccagaaggaaaagatgcaaaggaaagaatattaactgatcatcaaaaagaagttctcaaaacaaagcggtgtgatattcctgccatgtataataatctggatgtttcccaagataccttatttactcagtatagtcaggaagagcctatggaaattcctactttaaccagaaaaccaaaggaggattctaagatgatgattacggaggagcaaatggacagtgacattgtcattcctcaagatgtcacggaagactgtggtatggctgaacatcttgaaaagtcctccctttcgaataatgagtgtggttctcttgacaaaaccagtccagaaatgtcaaacagtaataatgatgaaagaaaaaaagctttaatttcatcaaggaaaacatcaactgaatgtgcatctagtacagaaaattctttcgttgtcagcagtagttcagtttctaataccactgttgctggaactcccccataccctacaagtcggaggcaaacctttattactttggagaagtttgatggttcagaaaatagaccttttagtccatcccccttgaataatatttcatcaactgttacagtgaaaaataaccaggaaaccatgattaaaacagattttctaccaaaagcaaagcaaagagaagggactttttcaaaatctgattctgaaaaaatagtgaatggaactaagagatcaagccggagagctggtaaagctgaacaaacagggaataaaaggtctaagcccttaatgagatctgagccggagaaaaatactgaggaatctgttgaaggcattgtagtcttagaaaataacccacctggtttgcttaatcaaacagaatgtgtgtcagataatcaggttcatctttctgaatctacaatggagcatgacaatacaaagcttaaagcagcaacagtggaaaatgctgtattattggaaactaatactgtagaggagaaaaatgtagaaattaatttggaatccaaagagaatacacccccagtagtaatatcagcagatcaaatggtaaatgaggatagtcaggttcagataactccaaatcagaaaacccttagacggtcttcaaggcgacgttcagaagtagtagagtctaccactgaaagccaagataaggaaaatagtcatcaaaaaaaggaacgacgtaaggaagaagaaaaacctcttcagaagagtccattgcatataaaagatgatgtgttacctaaacaaaaactgattgctgaacaaactctacaggagaatttaattgagaaaggaagtaatttacatgagaagactcttggggaaactagtgctaatgcagaaactgaacaaaataaaaaaaaggcagaccctgagaacattaagtctgagggggatggtacccaggacattgtagataagtcctctgagaaactagtcagaggccgaacacggtatcaaactagaagagcatctcagggtttgctttccagcattgaaaactcagaatctgatagttcggaggcaaaagaagaaggttctaggaagaagagatctggaaaatggaaaaacaaaagcaatgaaagtgttgacattcaagatcaagaagagaaagtggtgaaacaggaatgtataaaagctgaaaatcagtcacatgattataaagcaacttctgaagaagatgtaagcataaaatctccgatttgcgaaaaacaagatgaaagtaatactgtaatatgtcaggattctacagtaacttcagatttgttgcaagttcctgatgatttaccaaatgtgtgtgaggaaaaaaatgaaactagcaaatatgcagaatattcctttacaagtctacctgtgccagaatcaaatctaaggactagaaatgccattaagagattacataagcgagactcttttgataattgtagtttgggagaatcctcaaaaatagggatatcagatatttcttcgctttcagaaaaaacttttcaaacacttgaatgccaacacaagagaagtaggagggtgaggagatctaaaggttgtgattgctgtggggaaaaatcacaacctcaggaaaagtcactcattgggttaaagaatacagaaaataatgacgtagagattagtgaaacaaaaaaggcagatgtgcaagcacctgtaagcccatcagaaacttctcaagctaatccatattctgaaggacaatttttagatgaacatcatagtgtgaattttcatttgggtctcaaagaggataatgatactattaatgattcattaattgtttctgaaaccaaatcaaaagaaaacactatgcaagaatctcttccttctggaatagtaaactttagagaggaaatttgtgatatggattctagtgaagcaatgtctcttgaaagccaggagtcacctaatgaaaattttaaaactgttggcccgtgtttaggagactcgaaaaatgtttcacaggaatctttggagacaaaagaagaaaaaccagaagaaaccccaaaaatggaactgagtctagagaatgttactgttgaaggaaatgcatgtaaagtaacagaatccaatctagagaaagcaaaaactatggaattgaatgtaggaaatgaagctagctttcatggacaagagagaaccaaaactggtatttctgaagaagcagcaatagaagaaaataaaagaaatgatgactctgaagcagacacagctaaactgaatgccaaagaagtagcaactgaggaatttaattcagatattagtctttctgataatactacacctgtaaaattgaatgctcaaactgagatttctgaacaaacagcagctggggaactagatggaggaaatgatgtatctgatctacactcatctgaagaaacgaataccaaaatgaaaaataatgaagaaatgatgatcggcgaggcaatggctgaaactggccatgatggtgaaacagagaatgagggcataactaccaaaacctcaaagcctgatgaagctgaaacaaacatgttgactgcagaaatggacaactttgtttgtgacacagttgaaatgagcactgaagaaggaatcattgacgctaataaaactgaaacaaatactgagtatagtaaatctgaagaaaaattagataacaatcaaatggtaatggaaagtgatattttacaggaagatcaccatacttcacagaaagtggaggaaccatcacagtgtctggcatctggaacagctatctctgagctaataatagaagacaataatgcatctcctcaaaaactaagggaacttgatccttcacttgtgtcagcaaatgacagtcctagtggcatgcagacacgctgtgtctggtctcctttggcttctccgtctacgagcattttaaagagaggactaaaaagatcccaagaagatgaaatctcatcacctgttaataaggttcgccgtgtctcctttgcagatccaatataccaagcaggattggcagatgacattgatagacggtgctctattgttaggtcccattcttccaatagttctcccataggaaaaagtgttaaaacttctcctactacacaatctaagcataataccacttcagccaaaggatttctgtccccaggatcacgtagccctaaatttaagagctcaaagaagtgtttaatttcagaaatggccaaagaatccataccatgcccaacagaaagtgtttacccaccattggtgaactgtgtggcaccagttgacatcattttacctcagattacatcaaacatgtgggcaagaggcctgggacaactcattagagctaagaatataaaaactattggtgatttgagtactcttacagcatctgaaataaaaactcttcctatccgttctccaaaagtgtccaatgtaaaaaaggctctcagaatatatcatgagcagcaggtgaagactcgtggactagaagagattccagtttttgatatttctgaaaaaacagtaaatggaatagaaaataaatctttgtcacctgatgaagaaagacttgtctcagatataattgatcctgttgctttagaaattccattatccaaaaaccttctggcacagattagtgctcttgctcttcagctggattcagaagatcttcataattattcaggaagccaactatttgaaatgcacgagaaactaagttgtatggcaaactctgtaataaaaaatctacagtcacgttggagatcaccatcccatgaaaattctatttagtattttcagagaaaattgaaggtttttttaaacatcactggatttcttgattgaggaaacaagttctgaaataatagcacaatttcaaagaagagactctttgcaaagttgataacatttcaaaccctgaaggacagtgacttattatgtaagttcaattttgtaagttcattatgtaagatccttttttttttcataatatgtattcttggctgctatgcgtggtttttcaggaaatttaattatcttactgagatgtgaaagcaaaactagtaacagaacttacattttatttcatgctttcttaaacccgtgcatattctggtgaaacatgtaaaatactttaagtaaaattgaacatttttatttgaatttttgctgaactgataaaggtgtttatatttttgtttgttggtttgtttaattcatgtttgttgggactgaggtttaggaagtttgttactggttaaaaacctcaaatgaaatgcgaaagaatttgaatttttcctgcatatgtcaactttggacagctttcaagaaaaatgagaaaagtttcaacttctggcggttaaaatattaatgcagaatttactaagattttattcatttgcattagcaaatattcatgcagcagcagttgact

SEQ ID NO: 2488 - protein, 2472 aa, Homo sapiens; identical to SEQ ID NO: 178

SEQ ID NO: 2489 - DNA, 639 bp, Homo sapiens
gagcgcgccgcacgcgtgagtaaacagccggagctgggaaagtcgagctctggcagcgtctgggtgctgaggggcagaggcggagagaaccctgtcctgatcttcctaggtgggataaatatcggggtgacagtggtaggccgcggggaaccctcagtctgcccaccctccgccccctcgcggcgagatgcctcgttccccgggcttctcccgccctccgccgatctcctccctctgttgaaagctgcccgggaaagtggtggcgggagcgggcccaggcccgaatgtggcgtgggctcaggtgtctggtgtcgggcgccggaggaggttcgcgctggggtttggtgattcggaggcctggggtgcagacgcggcgtggctgtgaggcccgggcgggcgtgcgggtgtgagggccggactcacactgggccgccgcggggctgtttccatcggtcactggattttctcctcttccggttcgggcctcagggtggccgacatgacggccaggggtcagagccccctcgcgccgctgttggagactttggaagacccttctgcctcccatggagggcagactgacgcttacctgactctgaccagtcgtatgactggagaagaaggaaaagaagtaattac

SEQ ID NO: 2490 - protein, 45 aa, Homo sapiens
MTARGQSPLAPLLETLEDPSASHGGQTDAYLTLTSRMTGEEGKEV

SEQ ID NO: 2491 - DNA, 510 bp, Homo sapiens
cagtataattgattcattagaaatactgtttaacaaaggagagacgcattctgctgttgttgattttgaagcattaaatgttatcgtaaggctaattgaacaagccccaattcaaatgggagaagaggcagtgaggtgggcaaaactggtcatacctttagtggttcattcagcacaaaaggtacatttgcggggagcaactgctctggagatgggaatgccattattgcttcagaaacagcaagaaatagcatctattacggagcagcttatgactactgtgagtgttcttttatgtaagaattttctggatactgcatcggaaggttctgcactaagcttaaaattcagtctggtggccaggtacggtggctctcacctgtagtcccaaatgttgggatgacaggcgtgagccaccacacccagcccctaaaacctgggattttacttgcttaaaatgcagaagacttcgtggtaatgttcagtatgacacagtaactcgagtgtctc

SEQ ID NO: 2492 - protein, 89 aa, Homo sapiens [sequence omitted]

SEQ ID NO: 2493 - DNA, 776 bp, Homo sapiens
aggcagtgaggtgggcaaaactggtcatacctttagtggttcattcagcacaaaaggtacatttgcggggagcaactgctctggagatgggaatgccattattgcttcagaaacagcaagaaatagcatctattacggagcagcttatgactactaaattaatctcagaacttcagaagctatttatgagtaaaaatgagacttacgtgttaaaattatggcctttgtttgtcaaactacttggaaggacacccaaagtggcaaagaattggagtcacacaacgtgcatgtttccagctgaggtcaagcaaggttacgctctgcctttttgttttagttctcataccttaaacaggtgtcctttttataatccatgtaatgccacatttttcacttttctgtgcttttcctggtggtttcactgtttaaatttggaacctaaagcttgggtccaggtgctttctagtttgtgttcctaagcaaaggaaggctgtgatatacccaatggtgaaaataaactttgttcaggcatgatttatagagctactggctgtgagtttgatgttagtgattcatttgtataaaatatcttctaatagacgttaagcaggttatatattgaacagctgacaaaagtgttgtgtccagagaacctaaccctgtatttcccatgggagtgatcactcagtatttgccaatttagtgttcaaggctactttatataatagaaaaccataactactatgaataatgagagagaatcaactgtatgttca

SEQ ID NO: 2494 - protein, 130 aa, Homo sapiens
MGMPLLLQKQQEIASITEQLMTTKLISELQKLFMSKNETYVLKLWPLFVKLLGRTPKVAKNWSHTTCMFPAEVKQGYALPFCFSSHTLNRCPFYNPCNATFFTFLCFSWWFHCLNLEPKAWVQVLSSLCS

SEQ ID NO: 2495 - DNA, 411 bp, Homo sapiens
ttgtcagtgctatctggaaggagctaattagcttggtgaagtcagttactgaatcaggtaacaaaaaagagaaaccaggttctgaagttttgactctcttattaaagtctttggaaagcatagtaaagtctgaagtatttcctgtatcaaaaacgctggtcctcatggaaattacaattaaaggacttcctcagaaagtattaggttcaccagcatatcaggttgctaatatggatattcttaatgcaagtatcttaaatgtaatatgatgaagattggccaaaaacatttatacttcccttttttattttattttattttattttattttattttatttatttttgagacggagttttgctcttgttgcccaggctggagagcagtggcacgatctcggctcactgcaac

SEQ ID NO: 2496 - protein, 47 aa, Homo sapiens
MMKIGQKHLYFPFLFYFILFYFILFIFETEFCSCCPGWRAVARSRLT

SEQ ID NO: 2497 - DNA, 945 bp, Homo sapiens
agaccttttagtccatcccccttgaataatatttcatcaactgttacagtaaaaatgtttcacaggaatctttggagacaaaagaagaaaaaccagaagaaaccccaaaaatggaactgagtctagagaatgttactgttgaaggaaatgcatgtaaagtaacagaatccaatctagagaaagcaaaaactatggaattgaatgtaggaaatgaagctagctttcatggacaagagagaaccaaaactggtatttctgaagaagcagcaatagaagaaaataaaagaaatgatgactctgaagcagacacagctaaactgaatgccaaagaagtagcaactgaggaatttaattcagatattagtctttctgataatactacacctgtaaaattgaatgctcaaactgagatttctgaacaaacagcagctggggaactagatggaggaaatgatgtatctgatctacactcatctgaagaaacgaataccaaaatgaaaaataatgaagaaatgatgatcggcgaggcaatggctgaaactggccatgatggtgaaacagagaatgagggcataactaccaaaacctcaaagcctgatgaagctgaaacaaacatgttgactgcagaaatggacaactttgtttgtgacacagttgaaatgagcactgaagaaggaatcattgacgctaataaaactgaaacaaatactgagtatagtaaatctgaagaaaaattagataacaatcaaatggtaatggaaagtgatattttacaggaagatcaccatacttcacagaaagtggaggaaccatcacagtgtctggcatctggaacagctatctctgagctaataatagaagacaataatgcatctcctcaaaaactaagggaacttgatccttcacttgtgtcagcaaatgacagtcctagtggcatgcagacac

SEQ ID NO: 2498 - protein, 277 aa, Homo sapiens
MELSLENVTVEGNACKVTESNLEKAKTMELNVGNEASFHGQERTKTGISEEAAIEENKRNDDSEADTAKLNAKEVATEEFNSDISLSDNTTPVKLNAQTEISEQTAAGELDGGNDVSDLHSSEETNTKMKNNEEMMIGEAMAETGHDGETENEGITTKTSKPDEAETNMLTAEMDNFVCDTVEMSTEEGIIDANKTETNTEYSKSEEKLDNNQMVMESDILQEDHHTSQKVEEPSQCLASGTAISELIIEDNNASPQKLRELDPSLVSANDSPSGMQ

SEQ ID NO: 2499 - DNA, 4434 bp, Homo sapiens
agataaggaaaatagtcatcaaaaaaaggaacgacgtaaggaagaagaaaaacctcttcagaagagtccattgcatataaaagatgatgtgttacctaaacaaaaactgattgctgaacaaactctacaggagaatttaattgagaaaggaagtaatttacatgagaagactcttggggaaactagtgctaatgcagaaactgaacaaaataaaaaaaaggcagaccctgagaacattaagtctgagggggatggtacccaggacattgtagataagtcctctgagaaactagtcagaggccgaacacggtatcaaactagaagagcatctcagggtttgctttccagcattgaaaactcagaatctgatagttcggaggcaaaagaagaaggttctaggaagaagagatctggaaaatggaaaaacaaaagcaatgaaagtgttgacattcaagatcaagaagagaaagtggtgaaacaggaatgtataaaagctgaaaatcagtcacatgattataaagcaacttctgaagaagatgtaagcataaaatctccgatttgcgaaaaacaagatgaaagtaatactgtaatatgtcaggattctacagtaacttcagatttgttgcaagttcctgatgatttaccaaatgtgtgtgaggaaaaaaatgaaactagcaaatatgcagaatattcctttacaagtctacctgtgccagaatcaaatctaaggactagaaatgccattaagagattacataagcgagactcttttgataattgtagtttgggagaatcctcaaaaatagggatatcagatatttcttcgctttcagaaaaaacttttcaaacacttgaatgccaacacaagagaagtaggagggtgaggagatctaaaggttgtgattgctgtggggaaaaatcacaacctcaggaaaagtcactcattgggttaaagaatacagaaaataatgacgtagagattagtgaaacaaaaaaggcagatgtgcaagcacctgtaagcccatcagaaacttctcaagctaatccatattctgaaggacaatttttagatgaacatcatagtgtgaattttcatttgggtctcaaagaggataatgatactattaatgattcattaattgtttctgaaaccaaatcaaaagaaaacactatgcaagaatctcttccttctggaatagtaaactttagagaggaaatttgtgatatggattctagtgaagcaatgtctcttgaaagccaggagtcacctaatgaaaattttaaaactgttggcccgtgtttaggagactcgaaaaatgtttcacaggaatctttggagacaaaagaagaaaaaccagaagaaaccccaaaaatggaactgagtctagagaatgttactgttgaaggaaatgcatgtaaagtaacagaatccaatctagagaaagcaaaaactatggaattgaatgtaggaaatgaagctagctttcatggacaagagagaaccaaaactggtatttctgaagaagcagcaatagaagaaaataaaagaaatgatgactctgaagcagacacagctaaactgaatgccaaagaagtagcaactgaggaatttaattcagatattagtctttctgataatactacacctgtaaaattgaatgctcaaactgagatttctgaacaaacagcagctggggaactagatggaggaaatgatgtatctgatctacactcatctgaagaaacgaataccaaaatgaaaaataatgaagaaatgatgatcggcgaggcaatggctgaaactggccatgatggtgaaacagagaatgagggcataactaccaaaacctcaaagcctgatgaagctgaaacaaacatgttgactgcagaaatggacaactttgtttgtgacacagttgaaatgagcactgaagaaggaatcattgacgctaataaaactgaaacaaatactgagtatagtaaatctgaagaaaaattagataacaatcaaatggtaatggaaagtgatattttacaggaagatcaccatacttcacagaaagtggaggaaccatcacagtgtctggcatctggaacagctatctctgagctaataatagaagacaataatgcatctcctcaaaaactaagggaacttgatccttcacttgtgtcagcaaatgacagtcctagtggcatgcagacacgctgtgtctggtctcctttggcttctccgtctacgagcattttaaagagaggactaaaaagatcccaagaagatgaaatctcatcacctgttaataaggttcgccgtgtctcctttgcagatccaatataccaagcaggattggcagatgacattgatagacggtgctctattgttaggtcccattcttccaatagttctcccataggaaaaagtgttaaaacttctcctactacacaatctaagcataataccacttcagccaaaggatttctgtccccaggatcacgtagccctaaatttaagagctcaaagaagtgtttaatttcagaaatggccaaagaatccataccatgcccaacagaaagtgtttacccaccattggtgaactgtgtggcaccagttgacatcattttacctcagattacatcaaacatgtgggcaagaggcctgggacaactcattagagctaagaatataaaaactattggtgatttgagtactcttacagcatctgaaataaaaactcttcctatccgttctccaaaagtgtccaatgtaaaaaaggctctcagaatatatcatgagcagcaggtgaagactcgtggactagaagagattccagtttttgatatttctgaaaaaacagtaaatggaatagaaaataaatctttgtcacctgatgaagaaagacttgtctcagatataattgatcctgttgctttagaaattccattatccaaaaaccttctggcacagattagtgctcttgctcttcagctggattcagaagatcttcataattattcaggaagccaactatttgaaatgcacgagaaactaagttgtatggcaaactctgtaataaaaaatctacagtcacgttggagatcaccatcccatgaaaattctatttagtattttcagagaaaattgaaggtttttttaaacatcactggatttcttgattgaggaaacaagttctgaaataatagcacaatttcaaagaagagactctttgcaaagttgataacatttcaaaccctgaaggacagtgacttattatccttcctttctccaaagaacagttaaaaccaaatgtgttatggtaagctgtaaataccgttggaataaaagataaccgttcatcttacctaaaaaattgaagacaatattttccattgttgatgtcacaatttcttgaagatggctctttgcagcctacgtggtagtggagatatatacaaaggacttccctagtatcgttggaccaacaagcacaagcagatggcaggaagattagaacattggatattgattgccagtttttaagtgtcattcttggaaacgtgggagatttaggaaatgacattgaagaggaagaattctgttgaaatagtgattctcaacgtggggtccttggacagcaagtgatggggattggaatcccttttccaacgttttctttatacaacacctgtatgacacaagaaagcatccagaaaaaacaagagcagtcaaaacagccctttcatctaccttgtggggaacctggtataaaactacagacgtcagacagaaaagacagattcaacaagtcaacctctctgttcaggcacagatctggttttaatgatgaactctacaatgctaattctggaaatgaaaaagtacaatggaaagcattaagttatataacgctgaggaatcttgttaattctacttatagtatttcaaatctagtcaagtcactgaaaatgttcaagtataatcggaaatgtgtctttccgatagccgttcctggtgagacatcctctttatataaaacctgggcattcagaatcaggacagtgttaacacagaagaaaagaaaacccagcagttcctggagaaagactaggacacatggcttttgtgaaaacaagacactagacgatgttcccaggggttttcgccatgaaccttgccatgggtgaggaaaagatactatattttctccccaataccaccaacgaagtaacagatgagtctttcatgctgtgatttgggattaagatacaaggtgagcccagagatgaattgggcacacatttcctggggcaggatgggagttgtggagggctgcacaacagccccactgcaagcctgggatatccagaggcatcttcctcagcacccctaggtgcctgtgggctgtgccttacatttaataaaaacttacaaggctg

SEQ ID NO: 2500 - protein, 650 aa, Homo sapiens
MQESLPSGIVNFREEICDMDSSEAMSLESQESPNENFKTVGPCLGDSKNVSQESLETKEEKPEETPKMELSLENVTVEGNACKVTESNLEKAKTMELNVGNEASFHGQERTKTGISEEAAIEENKRNDDSEADTAKLNAKEVATEEFNSDISLSDNTTPVKLNAQTEISEQTAAGELDGGNDVSDLHSSEETNTKMKNNEEMMIGEAMAETGHDGETENEGITTKTSKPDEAETNMLTAEMDNFVCDTVEMSTEEGIIDANKTETNTEYSKSEEKLDNNQMVMESDILQEDHHTSQKVEEPSQCLASGTAISELIIEDNNASPQKLRELDPSLVSANDSPSGMQTRCVWSPLASPSTSILKRGLKRSQEDEISSPVNKVRRVSFADPIYQAGLADDIDRRCSIVRSHSSNSSPIGKSVKTSPTTQSKHNTTSAKGFLSPGSRSPKFKSSKKCLISEMAKESIPCPTESVYPPLVNCVAPVDIILPQITSNMWARGLGQLIRAKNIKTIGDLSTLTASEIKTLPIRSPKVSNVKKALRIYHEQQVKTRGLEEIPVFDISEKTVNGIENKSLSPDEERLVSDIIDPVALEIPLSKNLLAQISALALQLDSEDLHNYSGSQLFEMHEKLSCMANSVIKNLQSRWRSPSHENSI

SEQ ID NO: 2501 - DNA, 2100 bp, Homo sapiens
ttcatggacaagagagaaccaaaactggtatttctgaagaagcagcaatagaagaaaataaaagaaatgatgactctgaagcagacacagctaaactgaatgccaaagaagtagcaactgaggaatttaattcagatattagtctttctgataatactacacctgtaaaattgaatgctcaaactgagatttctgaacaaacagcagctggggaactagatggaggaaatgatgtatctgatctacactcatctgaagaaacgaataccaaaatgaaaaataatgaagaaatgatgatcggcgaggcaatggctgaaactggccatgatggtgaaacagagaatgagggcataactaccaaaacctcaaagcctgatgaagctgaaacaaacatgttgactgcagaaatggacaactttgtttgtgacacagttgaaatgagcactgaagaaggaatcattgacgctaataaaactgaaacaaatactgagtatagtaaatctgaagaaaaattagataacaatcaaatggtaatggaaagtgatattttacaggaagatcaccatacttcacagaaagtggaggaaccatcacagtgtctggcatctggaacagctatctctgagctaataatagaagacaataatgcatctcctcaaaaactaagggaacttgatccttcacttgtgtcagcaaatgacagtcctagtggcatgcagacacgctgtgtctggtctcctttggcttctccgtctacgagcattttaaagagaggactaaaaagatcccaagaagatgaaatctcatcacctgttaataaggttcgccgtgtctcctttgcagatccaatataccaagcaggattggcagatgacattgatagacggtgctctattgttaggtcccattcttccaatagttctcccataggaaaaagtgttaaaacttctcctactacacaatctaagatttcagaaatggccaaagaatccataccatgcccaacagaaagtgtttacccaccattggtgaactgtgtggcaccagttgacatcattttacctcagattacatcaaacatgtgggcaagaggcctgggacaactcattagagctaagaatataaaaactattggtgatttgagtactcttacagcatctgaaataaaaactcttcctatccgttctccaaaagtgtccaatgtaaaaaaggctctcagaatatatcatgagcagcaggtgaagactcgtggactagaagagattccagtttttgatatttctgaaaaaacagtaaatggaatagaaaataaatctttgtcacctgatgaagaaagacttgtctcagatataattgatcctgttgctttagaaattccattatccaaaaaccttctggcacagattagtgctcttgctcttcagctggattcagaagatcttcataattattcaggaagccaactatttgaaatgcacgagaaactaagttgtatggcaaactctgtaataaaaaatctacagtcacgttggagatcaccatcccatgaaaattctatttagtattttcagagaaaattgaaggtttttttaaacatcactggatttcttgattgaggaaacaagttctgaaataatagcacaatttcaaagaagagactctttgcaaagttgataacatttcaaaccctgaaggacagtgacttattatgtaagttcaattttgtaagttcattatgtaagatccttttttttttcataatatgtattcttggctgctatgcgtggtttttcaggaaatttaattatcttactgagatgtgaaagcaaaactagtaacagaacttacattttatttcatgctttcttaaacccgtgcatattctggtgaaacatgtaaaatactttaagtaaaattgaacatttttatttgaatttttgctgaactgataaaggtgtttatatttttgtttgttggtttgtttaattcatgtttgttgggactgaggtttaggaagtttgttactggttaaaaacctcaaatgaaatgcgaaagaatttgaatttttcctgcatatgtcaactttggacagctttcaag

SEQ ID NO: 2502 - protein, 429 aa, Homo sapiens
MKNNEEMMIGEAMAETGHDGETENEGITTKTSKPDEAETNMLTAEMDNFVCDTVEMSTEEGIIDANKTETNTEYSKSEEKLDNNQMVMESDILQEDHHTSQKVEEPSQCLASGTAISELIIEDNNASPQKLRELDPSLVSANDSPSGMQTRCVWSPLASPSTSILKRGLKRSQEDEISSPVNKVRRVSFADPIYQAGLADDIDRRCSIVRSHSSNSSPIGKSVKTSPTTQSKISEMAKESIPCPTESVYPPLVNCVAPVDIILPQITSNMWARGLGQLIRAKNIKTIGDLSTLTASEIKTLPIRSPKVSNVKKALRIYHEQQVKTRGLEEIPVFDISEKTVNGIENKSLSPDEERLVSDIIDPVALEIPLSKNLLAQISALALQLDSEDLHNYSGSQLFEMHEKLSCMANSVIKNLQSRWRSPSHENSI

SEQ ID NO: 2503 - DNA, 2395 bp, Homo sapiens
ttcatggacaagagagaaccaaaactggtatttctgaagaagcagcaatagaagaaaataaaagaaatgatgactctgaagcagacacagctaaactgaatgccaaagaagtagcaactgaggaatttaattcagatattagtctttctgataatactacacctgtaaaattgaatgctcaaactgagatttctgaacaaacagcagctggggaactagatggaggaaatgatgtatctgatctacactcatctgaagaaacgaataccaaaatgaaaaataatgaagaaatgatgatcggcgaggcaatggctgaaactggccatgatggtgaaacagagaatgagggcataactaccaaaacctcaaagcctgatgaagctgaaacaaacatgttgactgcagaaatggacaactttgtttgtgacacagttgaaatgagcactgaagaaggaatcattgacgctaataaaactgaaacaaatactgagtatagtaaatctgaagaaaaattagataacaatcaaatggtaatggaaagtgatattttacaggaagatcaccatacttcacagaaagtggaggaaccatcacagtgtctggcatctggaacagctatctctgagctaataatagaagacaataatgcatctcctcaaaaactaagggaacttgatccttcacttgtgtcagcaaatgacagtcctagtggcatgcagacacgctgtgtctggtctcctttggcttctccgtctacgagcattttaaagagaggactaaaaagatcccaagaagatgaaatctcatcacctgttaataaggttcgccgtgtctcctttgcagatccaatataccaagcaggattggcagatgacattgatagacggtgctctattgttaggtcccattcttccaatagttctcccataggaaaaagtgttaaaacttctcctactacacaatctaagatttcagaaatggccaaagaatccataccatgcccaacagaaagtgtttacccaccattggtgaactgtgtggcaccagttgacatcattttacctcagattacatcaaacatgtgggcaagaggcctgggacaactcattagagctaagaatataaaaactattggtgatttgagtactcttacagcatctgaaataaaaactcttcctatccgttctccaaaagtgtccaatgtaaaaaaggctctcagaatatatcatgagcagcaggtgaagactcgtggactagaagagattccagtttttgatatttctgaaaaaacagtaaatggaatagaaaataaatctttgtcacctgatgaagaaagacttgtctcagatataattgatcctgttgctttagaaattccattatccaaaaaccttctggcacagattagtgctcttgctcttcagctggattcagaagatcttcataattattcaggaagccaactatttgaaatgcacgagaaactaagttgtatggcaaactctgtaataaaaaatctacagtcacgttggagatcaccatcccatgaaaattctatttagtattttcagagaaaattgaaggtttttttaaacatcactggatttcttgattgaggaaacaagttctgaaataatagcacaatttcaaagaagagactctttgcaaagttgataacatttcaaaccctgaaggacagtgacttattatgtaagttcaattttgtaagttcattatgtaagatccttttttttttcataatatgtattcttggctgctatgcgtggtttttcaggaaatttaattatcttactgagatgtgaaagcaaaactagtaacagaacttacattttatttcatgctttcttaaacccgtgcatattctggtgaaacatgtaaaatactttaagtaaaattgaacatttttatttgaatttttgctgaactgataaaggtgtttatatttttgtttgttggtttgtttaattcatgtttgttgggactgaggtttaggaagtttgttactggttaaaaacctcaaatgaaatgcgaaagaatttgaatttttcctgcatatgtcaactttggacagctttcaagaaaaatgagaaaagtttcaacttctggcggttaaaatattaatgcagaatttactaagattttattcatttgcattagcaaatattcatgcagcagcagttgactgaaaatttattcttatgagacgtatagtattcatttttaaatgcatgattgtacattatgtatagacgacaatgtttttaatttataaatttcattctttgttaattgcatgggtttttctgcagcttattgtgaataccttggttctgttcaatagaaacattttgtatatattaaatactgaaatatc

SEQ ID NO: 2504 - protein, 429 aa, Homo sapiens; identical to SEQ ID NO: 2502

SEQ ID NO: 2505 - DNA, 4214 bp, Homo sapiens
ttcatggacaagagagaaccaaaactggtatttctgaagaagcagcaatagaagaaaataaaagaaatgatgactctgaagcagacacagctaaactgaatgccaaagaagtagcaactgaggaatttaattcagatattagtctttctgataatactacacctgtaaaattgaatgctcaaactgagatttctgaacaaacagcagctggggaactagatggaggaaatgatgtatctgatctacactcatctgaagaaacgaataccaaaatgaaaaataatgaagaaatgatgatcggcgaggcaatggctgaaactggccatgatggtgaaacagagaatgagggcataactaccaaaacctcaaagcctgatgaagctgaaacaaacatgttgactgcagaaatggacaactttgtttgtgacacagttgaaatgagcactgaagaaggaatcattgacgctaataaaactgaaacaaatactgagtatagtaaatctgaagaaaaattagataacaatcaaatggtaatggaaagtgatattttacaggaagatcaccatacttcacagaaagtggaggaaccatcacagtgtctggcatctggaacagctatctctgagctaataatagaagacaataatgcatctcctcaaaaactaagggaacttgatccttcacttgtgtcagcaaatgacagtcctagtggcatgcagacacgctgtgtctggtctcctttggcttctccgtctacgagcattttaaagagaggactaaaaagatcccaagaagatgaaatctcatcacctgttaataaggttcgccgtgtctcctttgcagatccaatataccaagcaggattggcagatgacattgatagacggtgctctattgttaggtcccattcttccaatagttctcccataggaaaaagtgttaaaacttctcctactacacaatctaagatttcagaaatggccaaagaatccataccatgcccaacagaaagtgtttacccaccattggtgaactgtgtggcaccagttgacatcattttacctcagattacatcaaacatgtgggcaagaggcctgggacaactcattagagctaagaatataaaaactattggtgatttgagtactcttacagcatctgaaataaaaactcttcctatccgttctccaaaagtgtccaatgtaaaaaaggctctcagaatatatcatgagcagcaggtgaagactcgtggactagaagagattccagtttttgatatttctgaaaaaacagtaaatggaatagaaaataaatctttgtcacctgatgaagaaagacttgtctcagatataattgatcctgttgctttagaaattccattatccaaaaaccttctggcacagattagtgctcttgctcttcagctggattcagaagatcttcataattattcaggaagccaactatttgaaatgcacgagaaactaagttgtatggcaaactctgtaataaaaaatctacagtcacgttggagatcaccatcccatgaaaattctatttagtattttcagagaaaattgaaggtttttttaaacatcactggatttcttgattgaggaaacaagttctgaaataatagcacaatttcaaagaagagactctttgcaaagttgataacatttcaaaccctgaaggacagtgacttattatgtaagttcaattttgtaagttcattatgtaagatccttttttttttcataatatgtattcttggctgctatgcgtggtttttcaggaaatttaattatcttactgagatgtgaaagcaaaactagtaacagaacttacattttatttcatgctttcttaaacccgtgcatattctggtgaaacatgtaaaatactttaagtaaaattgaacatttttatttgaatttttgctgaactgataaaggtgtttatatttttgtttgttggtttgtttaattcatgtttgttgggactgaggtttaggaagtttgttactggttaaaaacctcaaatgaaatgcgaaagaatttgaatttttcctgcatatgtcaactttggacagctttcaagaaaaatgagaaaagtttcaacttctggcggttaaaatattaatgcagaatttactaagattttattcatttgcattagcaaatattcatgcagcagcagttgactgaaaatttattcttatgagacgtatagtattcatttttaaatgcatgattgtacattatgtatagacgacaatgtttttaatttataaatttcattctttgttaattgcatgggtttttctgcagcttattgtgaataccttggttctgttcaatagaaacattttgtatatattaaatactgaaatatcagtatcgacggtggaagtgcttcatgggcttgctgcacatatttgtaggatactgtatctgcaaatgcaacaacaaatagttttgtacttggttaacagtcttagttaaaacatgagtttattttctaaaagtatccagaataagtaaaattatagaaataagaaaatgttacacaactttgctgttcatacccttaccttcttactacttttggtttggaggagggtatcaccactagaaagtgtgcctccttaagatttcttaaaggaaagttagtttcagtatttcacagcaagttggactacaaaatctagagttgatctgctttttaaaccttcatttaaaagcaaacttggaagaaatttgaaactgatgtttttaatatatgtctgtgttgcctaggttttctttttttaaagaggtatgtaattaaaacctttgtaaaatttgccaactaatattagtgcctgacttcccatatttgtttcatctttttaactgacagtatatctcacttcttctttgaatagaatgagtgagtgatctcagttttcacattttattcagaagctaatccctacttagcaaggcacacattctacagcaagtcatagaaagtttaatccttgtgcctccttagctctcgtatattcagggatctctataaaagttggtgtcttttttcatcatcataaattcatcataatcacagatatttttgggtctaagatattcatataccaaggatggttttgtaaagaattctgggatcattgaattaaggattgtggcttgaagtaactaaagaaaaatactaatttccttaaaaggaattataattatgatttacattttacatcattaatttcccaaattatatttaaccgtaaggaggtgcacatgagtttttagcaaacaggtatgaataagcagctatgtatatgtgtttggggcagaggggagcagattactttaacacacttcagaattaaaatcagttcgtttcatgactctgtgccttaacgtttgtgtgaactaaacttgctgattgaatgaaattcttgggaagccgaacagtaatagcagaaaatgtgaccaaatgagtatcatgtacttaaatcactgaattttatataagcacaagtattaattttaaaaacattatagtttaataaagctgcatttaaaaatatttgggagcaaagacaagcatgctaaatcttcattttgctatggctataagcatatatttttggcaacttatttgcaatattcttgccttaaagtttcctgcaaatttcccccttagtaattcccgaatagcaaaacattaatattccatgattagctctactgtgttgtctcactattaaaatggaattcgttttttcagatcttttctaatggttaataaaacaaatgtcagatcataataacactcaaatgtgtcttaattgtcttatgcatatttaagaagaaaaaactagtggcatacaggattgtcatgtagtatctttttttttttttgagacacagtcttgctctgttgcctatgctggagtgcaatggtgcgatctcggttcactgcaagctctgcctcccaggtttacaccattctcctgcctcagcctcccaagtagctgggactacaggtgcccgccaccatgcccggctaattttttatatttttagtagagaaggggttcactgtgttagccaggatggtcttgatctgacctcgtgatccgcctgcctcggcctcccaaagtgctgggattacaggcgtgagccaccccacctggccattttctttttttt

SEQ ID NO: 2506 - protein, 429 aa, Homo sapiens; identical to SEQ ID NO: 2502

SEQ ID NO: 2507 - DNA, 8192 bp, Homo sapiens
ggaattcacaacacaccgttggacatgatgtcaattgttcaagccaagaaatgccaggtcctggttagcgacattgattatcgcaattatctgcaccagtggacgtgtctgccagatcagaacgatgtgatccaggccaagaaagcctacgacctgcagagcgataacttgtacaagtcagacctggaatggctgaagggtattggatggttgccagagggttctgtggaagtgatgagagtgaagaatgcccagaatctcttgaatgaaaggctgtatcgtataaagcctgaggccctcaaattcaccagcattgttgacaccccggaagtaatccaggcaaagatcaatgctgtacagatcagtgagccattgtatcgcgatgcctgggagaaagagaaggctaatgtgaacgtgccagctgacactcccctgatgctgcaatccaaaatcaatgccctgcagatcagcaataaacgctatcagcaagcttgggaagatgtcaagatgactggttatgacctgcgagcagatgccattgggatccagcatgccaaggcttccagggatattgccagtgactatctgtacaaaactgcttatgagaaacagaaaggccattacattggctgtcgcagcgccaaggaagaccctaaactggtttgggcagcaaatgtgttgaagatgcagaatgacaggctgtacaaaaaggcctacaacgaccacaaagccaagatctccatccctgtggacatggtgtccatcagcgctgccaaagaaggtcaggcactggcaagtgatgtggactatcgccattacctgcaccgctggtcttgctttcccgaccagaatgatgtgatccaagccaggaaagcctacgacctacagagcgacgccctctacaaggctgacttggagtggttgcgtggcattggctggatgccccaagggtctcctgaagtgttgagagtcaaaaacgcccagaatatcttttgtgacagtgtctatcggacgcctgtggtgaaccttaagtacacaagcattgttgacacacctgaagtggtccttgctaaatcaaatgctgaaaatattagtattccaaagtacagagaggtttgggacaaggataaaacttcaatacacataatgccagatactccagaaattaatctcgctagagcaaatgctcttaatgtgagcaataaactttaccgtgagggctgggatgaaatgaaggcgggctgtgatgtccggctggatgccatccccatccaggctgccaaggcctccagggagattgccagtgactataaatataagcttgaccatgagaagcagaagggacactacgtgggcaccctcacagccagggatgacaacaagatccgctgggccctcatagctgacaagctccagaatgaacgagagtaccggctggactgggccaaatggaaggccaagatccagagccctgtggacatgctttccatcctgcactctaaaaattcccaggctctggtcagtgacatggattaccgcaattacctgcaccagtggacctgcatgcccgaccagaacgatgtgattcaggccaagaaggcctacgaactgcagagcgataatgtttacaaggctgacttggaatggttgcgtggaattgggtggatgccaaatgactccgtgtccgtcaatcatgccaaacatgccgcggacatcttcagtgagaaaaaatatcgcacaaaaatagaaactctcaactttacgcctgtggatgacagagttgattatgtgacagcgaaacaaagtggcgagatcctcgatgatattaaataccggaaagactggaatgccaccaaatcaaagtacaccctcacagaaacccccctgctgcacactgcccaggaggctgctaggatactggaccagtatctctacaaggaaggctgggagagacaaaaagccacaggttacattttgcctccagatgctgtgccatttgttcatgcccatcactgcaatgacgttcagagtgagctgaaatacaaagctgaacatgtgaagcaaaaaggtcattatgttggtgtcccgacgatgagagatgatcctaagctggtttggtttgagcatgcaggccagattcagaatgagagactatacaaagaggactatcacaaaacaaaggccaaaatcaatatacctgctgatatggtgtcagtcttggccgccaagcaggggcagacccttgtcagtgatattgattatcgtaattacttgcaccaatggatgtgtcatcctgaccagaacgatgttattcaggcaagaaaggcctatgacctacagagtgataatgtctacagagctgacctggagtggctccgaggcattggctggatcccactggattctgtggaccatgtaagggttactaagaaccaggaaatgatgagtcagatcaaatataagaaaaatgcccttgaaaactatcctaactttagaagtgtggtggatcctccagagattgttttagccaagattaattctgtcaatcaaagtgatgtaaaatataaagaaacatttaataaagcaaagggcaaatatacgttttcaccagatacaccacatatctcccactccaaagacatgggaaaactctacagtactatactgtataaaggggcgtgggagggcaccaaggcctatggctacaccctggatgagcgctacattcccattgttggagccaagcatgctgatctggtgaacagtgagcttaaatacaaagagacatatgagaagcagaaaggtcactacctggctggaaaagtgatcggtgaattccctggtgtggttcactgtctggatttccaaaagatgaggagtgcgttgaactacagaaaacattatgaggataccaaagcaaatgttcatatccccaatgacatgatgaatcacgtgctggctaaaaggtgccagtacatcctcagtgacctggagtatcgacactatttccaccagtggacgtctcttctggaagaacccaatgttatacgcgtccgaaacgcccaggagatcttgagtgataatgtgtataaagatgacctgaattggttgaaaggcattggttgctacgtttgggatacaccccaaatcctccatgccaagaaatcatacgaccttcagagtcagctacaatatacagcagcaggtaaagaaaatctacaaaactataatctggtcacagacacgcccctctatgtgactgctgttcagagtggcattaatgccagtgaggtaaaatataaagaaaattatcatcagattaaggacaaatacacaacagttctagaaacagtggattatgacagaaccagaaacctgaagaatctttacagcagtaacctgtacaaggaggcctgggatagagtgaaagccaccagctacatcctgccttccagcaccttgtccctgacacacgccaagaaccagaagcatctggccagccatatcaaatatcgggaagaatatgaaaagttcaaagctctttatacgttaccaagaagtgttgacgatgatccgaacacagcacggtgcctccgagttggcaagcttaacatcgatcgcctgtacagatcagtttatgaaaagaacaagatgaaaatccacatcgtgcccgacatggtagagatggttactgccaaggattcccagaagaaagtcagtgagattgattaccgcctgcgcctccacgaatggatttgccaccccgacttgcaagtcaatgatcacgtcaggaaagtcacagatcagatcagcgatattgtatacaaggatgacctcaactggctgaaaggcattggttgctacgtctgggacactcctgaaatcctccatgccaagcatgcttatgatctacgtgatgatatcaagtataaagctcacatgttgaaaacaaggaatgactacaagcttgtcacagatacaccagtctacgtgcaggctgtcaaaagtgggaaacagctaagtgacgctgtctaccactatgactatgtgcacagtgtcagaggcaaagtggctccaactaccaaaaccgtggatctggaccgggcccttcatgcatacaagctccagagttcgaatctatacaaaaccagcctgcgcaccctgcccactggatatagacttccaggtgacactcctcacttcaaacacatcaaggacacccgttacatgagcagttatttcaagtacaaagaagcctatgaacacaccaaggcatatgggtatacacttggccccaaagatgttccatttgtccacgtccggagagtcaacaatgttaccagcgagagactgtatcgggaattgtaccacaaactgaaagacaagatccatacaactcccgatacccctgagatccgccaagtcaagaagacacaagaggctgtcagtgagttgatctacaaatcagacttcttcaagatgcagggccacatgatctctctgccatacacaccccaagtgatccattgccgctatgtgggagacatcaccagtgatattaaatacaaagaggacttgcaggtcctgaagggatttggctgcttcctgtatgacactcctgacatggtccgctcccggcacctgcggaagctctggtctaattacctatacactgataaggcaaggaagatgcgagacaaatacaaagtggtgcttgacactccagaatacagaaaagtgcaagaactgaagacacatctgagtgagctggtctacagagctgcaggcaagaagcagaagtcaatctttacttcagttcctgatactcctgatcttttaagagccaagcgagggcagaagcttcagagtcagtatctgtatgttgaacttgccaccaaagagagaccccatcatcacgctggaaaccagaccacagccttgaagcatgctaaagacgtgaaggacatggtcagtgagaaaaagtacaagattcaatatgaaaagatgaaagacaagtacactccggttccagatacgccaatcctcatcagagccaagagggcttactggaatgccagtgatctacgctacaaagaaacatttcaaaagaccaaagggaaataccacacggtgaaagatgccctagacattgtctatcatcgcaaagtcacagatgacatcagtaaaataaaatacaaggagaactacatgagccagttgggtatctggaggtccattcctgatcgtccagagcatttccaccaccgagcagtcactgacacagtcagtgatgtaaaatataaagaagacttgacttggcttaaaggcattggttgctatgcctatgatacccctgatttcactctggctgaaaagaacaagactctctacagcaagtataagtataaagaagtatttgaaaggacaaagtcagatttcaagtatgttgccgactctccgatcaataggcatttcaagtatgcaactcaattgatgaatgagaaaaaatacagagctgattatgagcagcggaaagataaataccacctggtagtcgatgagcctagacatctgctggctaagaccgcaggcgaccagatcagtcagatcaaatacaggaaaaactatgaaaaatcaaaggacaaatttacctcaattgtggatactccagaacacctgcgtactacaaaagtcaacaaacaaatcagcgatatcctttataaattggaatacaacaaggccaaacccagaggctacaccacaatccacgacacacccatgttgctgcatgtccgcaaggttaaagatgaagtcagtgatctgaaatacaaagaagtataccaaagaaataaatccaactgcaccattgagccagatgctgttcatatcaaagcagccaaggacgcctacaaagtcaacaccaatctggactataagaaacagtacgaagccaacaaagcccactggaagtggactcctgaccgaccggacttcctccaggctgccaagtcatccctgcagcaaagcgattttgaatataagctggaccgggagttcctcaagggttgcaagctttctgtcactgatgacaaaaacacggtgctcgccctcaggaatactttaatagaaagtgatctgaaatacaaagagaaacatgtcaaggaaagaggaacctgccatgccgtacctgacacgcctcagatcctgctggcgaagactgtcagcaacctggtgtctgagaacaagtacaaggaccatgtcaagaagcacttggcacagggctcatacacaacactaccagagacccgggacactgttcacgtcaaggaagtgaccaagcatgtcagtgatacaaattacaaaaagaagtttgtcaaggagaaaggaaaatccaactactccatcatgctggagccaccagaggtgaaacatgctatggaagtggccaagaagcaaagtgatgtcgcttacagaaaagatgccaaagagaacctgcattacaccacagtggctgatcgaccagacatcaagaaggccacacaggcagccaaacaggccagtgaggtggagtacagagccaagcaccgcaaggaaggcagccatggcttaagcatgctcggtcgcccagacatagaaatggccaagaaggcagccaagctgagcagccaggttaaataccgagaaaatttcgataaagaaaagggcaagacaccaaaatacaatccaaaagacagccagctctacaaagtcatgaaagatgctaataatcttgcaagtgaggttaaatacaaggctgacctgaagaaacttcacaaacccgtgactgacatgaaggagtctctgatcatgaatcatgtcctgaatacaagccaacttgccagttcttaccagtacaagaagaagtatgagaagagtaaaggccactaccacaccatacccgataatctggagcagcttcacctaaaagaggccacagaattacagagtatagtgaaatacaaagaaaagtatgaaaaggaacgaggaaaacccatgctggactttgaaacaccaacgtacatcactgccaaagagtctcagcagatgcagagtgggaaagaatataggaaagattatgaagagtccattaaaggcagaaacctgactggcctggaggtcacgccagctttgttacatgtcaaatatgcaactaaaatagcaagcgagaaagagtacaggaaagatctagaggaaagcatccgtgggaagggcctcactgaaatggaagatacacctgacatgctaagagcaaagaatgccactcaaatcctcaatgagaaagaatataagcgagacctggaactggaagtcaaaggaagaggcctgaatgccatggccaatgaaactccggattttatgagggccaggaatgctactgatattgccagtcagattaagtataagcaatcagcagaaatggagaaagccaatttcacttctgtggttgatactccagagatcattcatgcccaacaagtcaagaatctttcaagccagaaaaagtacaaggaagatgctgagaagtccatgtcgtattatgagactgttttggacaccccagagatacagagagtccgggagaaccaaaagaacttcagccttctccaataccagtgtgaccttaaaaacagtaaaggaaaaattacagttgttcaagacacgccagaaatactgcgtgtaaaagaaaatcagaagaatttcagctcggttttatataaagaggatgtctcaccaggaacggctatcggaaagacacctgagatgatgagagtgaaacaaacacaggaccacattagctcggtgaagtataaggaagcaataggacaaggaactccaatccctgacctgcctgaagtgaaacgtgtgaaggagacgcagaagcacattagctcggttatgtacaaagaaaacttgggaacaggcattccaaccactgtgactccagagattgagagagtcaaacgcaatcaagagaactttagctcggtgttatacaaagaaaacatgggcaagggaactcctttagctgtcactcccgagatggagcgagtcaaacacaatcaagaaaatattagctcggttttgtacaaagaaaatgtggggaaagccaccgcaacccctgtcactcctgagatgcagagagtcaaacgcaa

SEQ ID NO: 2508 - protein, 2999 aa, Homo sapiens
MMSIVQAKKCQVLVSDIDYRNYLHQWTCLPDQNDVIQAKKAYDLQSDNLYKSDLEWLKGIGWLPEGSVEVMRVKNAQNLLNERLYRIKPEALKFTSIVDTPEVIQAKINAVQISEPLYRDAWEKEKANVNVPADTPLMLQSKINALQISNKRYQQAWEDVKMTGYDLRADAIGIQHAKASRDIASDYLYKTAYEKQKGHYIGCRSAKEDPKLVWAANVLKMQNDRLYKKAYNDHKAKISIPVDMVSISAAKEGQALASDVDYRHYLHRWSCFPDQNDVIQARKAYDLQSDALYKADLEWLRGIGWMPQGSPEVLRVKNAQNIFCDSVYRTPVVNLKYTSIVDTPEVVLAKSNAENISIPKYREVWDKDKTSIHIMPDTPEINLARANALNVSNKLYREGWDEMKAGCDVRLDAIPIQAAKASREIASDYKYKLDHEKQKGHYVGTLTARDDNKIRWALIADKLQNEREYRLDWAKWKAKIQSPVDMLSILHSKNSQALVSDMDYRNYLHQWTCMPDQNDVIQAKKAYELQSDNVYKADLEWLRGIGWMPNDSVSVNHAKHAADIFSEKKYRTKIETLNFTPVDDRVDYVTAKQSGEILDDIKYRKDWNATKSKYTLTETPLLHTAQEAARILDQYLYKEGWERQKATGYILPPDAVPFVHAHHCNDVQSELKYKAEHVKQKGHYVGVPTMRDDPKLVWFEHAGQIQNERLYKEDYHKTKAKINIPADMVSVLAAKQGQTLVSDIDYRNYLHQWMCHPDQNDVIQARKAYDLQSDNVYRADLEWLRGIGWIPLDSVDHVRVTKNQEMMSQIKYKKNALENYPNFRSVVDPPEIVLAKINSVNQSDVKYKETFNKAKGKYTFSPDTPHISHSKDMGKLYSTILYKGAWEGTKAYGYTLDERYIPIVGAKHADLVNSELKYKETYEKQKGHYLAGKVIGEFPGVVHCLDFQKMRSALNYRKHYEDTKANVHIPNDMMNHVLAKRCQYILSDLEYRHYFHQWTSLLEEPNVIRVRNAQEILSDNVYKDDLNWLKGIGCYVWDTPQILHAKKSYDLQSQLQYTAAGKENLQNYNLVTDTPLYVTAVQSGINASEVKYKENYHQIKDKYTTVLETVDYDRTRNLKNLYSSNLYKEAWDRVKATSYILPSSTLSLTHAKNQKHLASHIKYREEYEKFKALYTLPRSVDDDPNTARCLRVGKLNIDRLYRSVYEKNKMKIHIVPDMVEMVTAKDSQKKVSEIDYRLRLHEWICHPDLQVNDHVRKVTDQISDIVYKDDLNWLKGIGCYVWDTPEILHAKHAYDLRDDIKYKAHMLKTRNDYKLVTDTPVYVQAVKSGKQLSDAVYHYDYVHSVRGKVAPTTKTVDLDRALHAYKLQSSNLYKTSLRTLPTGYRLPGDTPHFKHIKDTRYMSSYFKYKEAYEHTKAYGYTLGPKDVPFVHVRRVNNVTSERLYRELYHKLKDKIHTTPDTPEIRQVKKTQEAVSELIYKSDFFKMQGHMISLPYTPQVIHCRYVGDITSDIKYKEDLQVLKGFGCFLYDTPDMVRSRHLRKLWSNYLYTDKARKMRDKYKVVLDTPEYRKVQELKTHLSELVYRAAGKKQKSIFTSVPDTPDLLRAKRGQKLQSQYLYVELATKERPHHHAGNQTTALKHAKDVKDMVSEKKYKIQYEKMKDKYTPVPDTPILIRAKRAYWNASDLRYKETFQKTKGKYHTVKDALDIVYHRKVTDDISKIKYKENYMSQLGIWRSIPDRPEHFHHRAVTDTVSDVKYKEDLTWLKGIGCYAYDTPDFTLAEKNKTLYSKYKYKEVFERTKSDFKYVADSPINRHFKYATQLMNEKKYRADYEQRKDKYHLVVDEPRHLLAKTAGDQISQIKYRKNYEKSKDKFTSIVDTPEHLRTTKVNKQISDILYKLEYNKAKPRGYTTIHDTPMLLHVRKVKDEVSDLKYKEVYQRNKSNCTIEPDAVHIKAAKDAYKVNTNLDYKKQYEANKAHWKWTPDRPDFLQAAKSSLQQSDFEYKLDREFLKGCKLSVTDDKNTVLALRNTLIESDLKYKEKHVKERGTCHAVPDTPQILLAKTVSNLVSENKYKDHVKKHLAQGSYTTLPETRDTVHVKEVTKHVSDTNYKKKFVKEKGKSNYSIMLEPPEVKHAMEVAKKQSDVAYRKDAKENLHYTTVADRPDIKKATQAAKQASEVEYRAKHRKEGSHGLSMLGRPDIEMAKKAAKLSSQVKYRENFDKEKGKTPKYNPKDSQLYKVMKDANNLASEVKYKADLKKLHKPVTDMKESLIMNHVLNTSQLASSYQYKKKYEKSKGHYHTIPDNLEQLHLKEATELQSIVKYKEKYEKERGKPMLDFETPTYITAKESQQMQSGKEYRKDYEESIKGRNLTGLEVTPALLHVKYATKIASEKEYRKDLEESIRGKGLTEMEDTPDMLRAKNATQILNEKEYKRDLELEVKGRGLNAMANETPDFMRARNATDIASQIKYKQSAEMEKANFTSVVDTPEIIHAQQVKNLSSQKKYKEDAEKSMSYYETVLDTPEIQRVRENQKNFSLLQYQCDLKNSKGKITVVQDTPEILRVKENQKNFSSVLYKEDVSPGTAIGKTPEMMRVKQTQDHISSVKYKEAIGQGTPIPDLPEVKRVKETQKHISSVMYKENLGTGIPTTVTPEIERVKRNQENFSSVLYKENMGKGTPLAVTPEMERVKHNQENISSVLYKENVGKATATPVTPEMQRVKRNQENISSVLYSDSFRKQIQGKAAYVLDTPEMRRVRETQRHISTVKYHEDFEKHKGCFTPVVTDPITERVKKNMQDFSDINYRGIQRKVVEMEQKRNDQDQETITGLRVWRTNPGSVFDYDPAEDNIQSRSLHMINVQAQRRSREQSRSASALSISGGEEKSEHSEAPDHHLSTYSDGGVFAVSTAYKHAKTTELPQQRSSSVATQQTTVSSIPSHPSTAGKIFRAMYDYMAADADEVSFKDGDAIINVQAIDEGWMYGTVQRTGRTGMLPANYVEAI

SEQ ID NO: 2509 - DNA, 8192 bp, Homo sapiens
aggcatcacgctggcttttgcctggggttctcaggaggggagagttgggagaggctttgctgctgaggaaatttatttggtagattgaaggtttgaacgagagctacagaaacgaaagaaaaagtctgtataagccaatggtgttcgggaagaaaataaccccattgccttgagtttgtaggtgccactactactctggaaaaatggcagatgacgaagactatgaggaggtggtggagtactacacagaagaagtggtttacgaagaggtgccgggagagacaataacaaaaatttatgagactacgacaacaaggacatctgactatgagcaatcagaaacttccaaaccagctctggcacagccagcactggcacagccagcatcagcaaagccggtggagaggaggaaggtcatccggaagaaagtggatccttcaaagttcatgaccccctacattgcacacagtcagaaaatgcaggatctttttagcccaaataaatacaaggagaagtttgagaaaacaaaaggacagccatacgccagcacaacagatactccagaacttcgcagaatcaaaaaagtacaagatcaactcagtgaggttaagtatcgaatggatggtgatgttgctaagactatatgtcacgtagatgaaaaagcaaaggatattgaacatgcaaagaaagtgtcgcagcaagtcagtaaggttttatacaagcagaactgggaagacaccaaggataagtacctgcttcctcctgatgcccctgaacttgtccaggccgttaagaacaccgccatgttcagcaagaaactgtacactgaagactgggaagcagacaaaagtttgttttacccctataatgatagcccggaactgaggagagttgcccaggcccagaaagctctcagtgatgttgcctacaaaaaaggtctcgctgaacagcaagctcaattcacgcctctggctgatcctccagatatagaatttgccaagaaagtaaccaatcaagtgagcaagcaaaaatacaaagaagactatgaaaataaaatcaaaggcaaatggagtgagacaccttgctttgaagttgcaaatgccagaatgaatgctgataacattagcacaaggaaataccaggaagattttgaaaacatgaaagaccagatctacttcatgcagaccgaaacaccagagtataaaatgaataaaaaagctggtgtggcagctagcaaggtaaaatacaaagaagactatgaaaagaataaaggaaaagcagattataatgtgcttcctgcttcagagaacccacagcttaggcagctgaaggcagcaggagatgccctaagtgacaaactatacaaggaaaactatgaaaagacaaaagcaaagagcataaattactgcgagacccccaaattcaagctcgatactgttctgcagaacttcagtagtgataaaaaatataaagattcctacttaaaagatattttgggacattatgtaggcagcttcgaggatccataccattcacactgcatgaaagtcacagctcaaaacagtgataaaaactacaaagcagaatacgaagaagacagaggcaaaggcttcttccctcagaccataactcaagaatatgaagcaattaagaaactagatcagtgtaaagaccacacctacaaagtccatccagataagacaaaattcacccaagttacagactctcctgttctgctacaagcccaagtcaattccaaacaactgagtgacttaaattacaaagcaaaacatgaaagtgaaaagttcaagtgccatatcccccctgatactcctgcttttatccagcacaaagtcaatgcctataacttgagtgataatctttataagcaagactgggagaagagcaaagccaaaaagtttgacattaaagtggatgccattcccctgctggcagccaaagccaacaccaagaacaccagcgatgtgatgtacaagaaagactatgaaaaaaacaaagggaaaatgattggagtcctcagcattaatgacgatcccaagatgctgcactccttgaaggtggccaaaaaccagagtgatagattatacaaggaaaactatgagaagacaaaggcaaagagtatgaattactgtgagaccccaaaatatcaacttgatactcagctgaagaacttcagtgaggctagatataaagacttatatgtaaaggatgttttgggacattatgtaggcagcatggaggacccatatcacacacactgcatgaaagttgcagctcaaaacagtgataaaagttacaaagcagaatatgaagaagataaaggaaaatgctatttccctcagacaataacacaagaatatgaagcaatcaagaagctggaccagtgtaaagatcatacctacaaagttcatccagataagaccaaattcacggcagtcactgattctcctgtactgttgcaagcccagctcaacacgaaacagcttagtgatctgaattacaaagcaaaacatgaaggtgagaagttcaagtgccatataccagcagatgctccacagtttatccaacacagagtcaatgcctataatctgagtgataatgtttataagcaagactgggagaagagcaaagccaagaagtttgacattaaagtggacgccattcccctgttggcagccaaagccaacaccaagaacaccagcgatgtgatgtacaagaaagactatgaaaagagcaaagggaaaatgattggagccctcagcattaatgacgatccaaagatgctgcactccttgaagacagccaaaaaccagagtgatcgcgaatatcgaaaagattatgaaaagtcaaaaactatctacacggcacctcttgatatgctccaagtcactcaagctaagaaatctcaggcaattgccagcgacgttgattataagcacatcttacacagttacagctacccccctgatagcatcaatgtggaccttgccaagaaggcatatgcgctgcagagcgatgttgaatacaaagctgactacaatagctggatgaaaggttgtggctgggtgccttttgggtccttagaaatggaaaaggcaaagcgagcttcagacatcctcaatgagaaaaaatatcgccaacatccagacaccctcaagtttacctcgattgaagatgctccaattacagtacagtctaaaattaaccaggcccagaggagtgatatcgcttacaaagccaaaggagaggaaattattcacaaatacaacctgccaccagacctgccccagttcatccaggctaaagttaatgcctacaatatcagtgagaatatgtacaaagcagacttgaaagacttgagcaagaagggatatgacctgagaactgatgcgattcccatcagagctgccaaagctgccaggcaggcggcgagtgacgttcagtacaaaaaagactatgaaaaggctaaagggaaaatggttggcttccaaagtcttcaagatgaccctaaactggttcattatatgaacgtggccaagatacaatcagatcgggagtataaaaaagactatgagaagacaaagtccaaatacaacacgccccatgatatgttcaatgtcgtggcggctaagaaagcccaggatgtggtcagcaatgtcaactataagcattctctccatcattacacctacttgcctgacgccatggacctggagctgtctaagaacatgatgcagatacagagtgataacgtctacaaggaagactacaacaactggatgaaaggcattggctggattcctattggcagtctcgacgtcgaaaaagttaaaaaggccggtgatgctctgaatgaaaagaagtacaggcaacatccagacaccctcaaatttaccagcattgtggactccccagttatggtccaggcaaaacagaacacgaagcaagtcagtgatatcttatacaaggctaaaggagaagatgtgaaacataaatacaccatgagtcctgatcttcctcagtttctccaggccaagtgcaatgcttacaatataagtgacgtctgttataaacgggattggtatgacttaatagccaagggcaacaatgtgctgggcgatgctattcccatcactgcagccaaggcatcgagaaacattgccagtgattataaatacaaggaagcttatgagaagtcaaagggaaagcatgtgggtttcagaagcctccaggatgatcccaagctggtccactatatgaatgtggcaaagctgcagtctgatcgtgaatacaagaagaactatgagaacaccaaaaccagctaccatacccctggggacatggttagcatcacagctgcaaagatggcccaggatgtcgctaccaatgtcaactacaaacagccattgcatcattacacatacctacctgacgccatgagtcttgagcatacgaggaatgtcaatcaaattcagagtgataatgtgtataaagacgagtataacagcttcttgaagggcatcggatggatccctattggttccctggaggtggagaaggtcaagaaagcaggcgatgcattaaatgagaggaagtatcgacagcacccagataccgtcaagttcacaagtgtgcctgattccatgggcatggtgttggctcagcataacacaaagcagctaagtgatttgaactacaaggtagagggagagaaactgaagcacaagtatactattgaccctgaattgcctcagtttattcaagccaaagtcaacgccctcaacatgagtgatgctcattataaagcagattggaagaaaaccattgccaagggctatgatttgagaccagatgccatcccaattgttgctgcaaaaagttcaaggaatattgctagtgattgcaaatataaggaggcctacgagaaagccaaaggcaagcaagttggatttctcagtcttcaggatgatcctaaactggttcactacatgaatgtggccaaaatccagtctgatcgtgagtacaaaaagggctatgaagccagcaagaccaagtaccacacacctctggatatggtcagtgtgacagctgcaaagaaatctcaggaggttgccaccaacgccaactacagacagtcataccaccactacactctcctgcccgatgccttgaatgtggagcactccaggaatgccatgcagattcagagtgataatctgtacaaatctgacttcaccaattggatgaaagggatcggctgggtgcccatagagtccctggaggtggagaaggcaaagaaagcaggagagattcttagtgagaagaagtatcgccagcaccccgagaagctgaagttcacttacgccatggacacaatggaacaggcacttaacaagagtaacaaactgaacatggacaagaggctctacactgaaaaatggaacaaggacaagaccaccattcatgtcatgcctgacacaccggatattttactctccagagtaaaccaaatcaccatgagtgataaactgtacaaagctggctgggaagaggaaaagaagaaaggatatgacctgaggcctgatgccattgcaataaaggctgcaagagcctctagagacattgccagtgattacaaatacaagaaagcctatgaacaagccaaagggaaacacattggcttccggagcctggaagatgaccccaagctggtgcacttcatgcaagtggccaagatgcagtcagaccgggaatacaagaagggatatgagaaatccaagacctccttccacaccccggtggacatgctcagtgtggtggcagccaagaagtctcaggaagtggccaccaatgccaactacaggaacgtgatccatacctacaacatgcttcctgatgccatgagctttgaattggccaaaaatatgatgcagattcaaagtgataatcagtacaaggctgactatgctgacttcatgaagggcattggatggctccctctgggctccctggaagcagagaaaaacaagaaagccatggagattattagtgaaaagaagtaccgccagcacccagacactttgaagtattccacactcatggactcgatgaacatggttttggcccagaataatgcaaaaattatgaacgaacatctctacaaacaagcatgggaggctgacaaaaccaaagtccacatcatgcctgatatcccccagattattttggcaaaggcaaatgcaattaatatgagtgataaactctacaaactttccttggaagagtctaaaaagaaaggctatgatctcagacctgatgcaattcctatcaaagctgccaaggcttccagagatattgcaagtgattataaatacaagtacaattatgaaaaagggaaggggaaaatggttggtttccgcagtctcgaggatgatcccaaattagtccattccatgcaagtggctaagatgcaatctgatcgggagtacaagaaaaactatgagaacacaaagaccagctaccacacccctgccgacatgctcagtgtcacggctgcaaaggatgcccaagccaacatcaccaacactaactacaagcacctgattcacaagtacatcctccttccagatgcaatgaacattgagctgaccaggaatatgaatcgcatacagagtgataatgaatataagcaagattacaatgaatggtacaaagggcttggctggagtccagcaggttctctggaagtggagaaggccaagaaagcaactgaatatgccagtgatcagaaataccgccagcacccgagcaacttccagtttaagaagctgactgattccatggacatggtgcttgccaagcagaatgcacataccatgaacaagcatttatacaccattgattggaataaagataagaccaagattcatgtgatgcctgatacaccagatattttacaagccaagcagaatcaaacactgtatagtcagaaactctataaacttggatgggaagaagctttgaagaaaggctatgatctcccagttgatgcaatttctgtacagctagctaaagcttcaagagacattgctagtgattataaatacaaacaaggctaccgaaagcaacttggccaccatgttggattccggagtctgcaagatgacccaaaacttgtgttgtccatgaatgtagccaaaatgcagagtgaaagagaatacaagaaggactttgagaagtggaaaactaagttctccagcccagtggacatgttgggagtggtactggccaagaagtgtcaggagttggttagtgacgtggactacaagaactacctgcatcagtggacatgtctgcctgatcagaacgatgttgtgcaagctaagaaagtttatgaactgcaaagtgagaatctatataaatctgaccttgagtggctgagaggcataggatggagtcccttgggttctttagaggcagaaaagaacaagcgggcttcggaaatcatcagtgagaagaaatatcgtcagcctccagacagaaacaagttcaccagcattcctgatgccatggatatagttctggcaaagacaaatgccaaaaataggagtgatagactttatagagaagcttgggacaaagacaagactcagatccacatcatgcctgatacacctgacattgttctggctaaagcaaacttaatcaacacaagtgataaactctaccgaatgggttatgaggagctgaagagaaaaggttacgatcttcctgttgatgccataccaatcaaagcagcaaaagcctcccgggaaattgccagtgaatacaagtacaaggaaggctttcgcaagcagctcggccaccacattggtgcccggaacattgaagatgaccccaagatgatgtggtccatgcatgtggccaagatccagagtgacagggagtacaagaaggactttgagaagtggaagaccaagttcagcagcccagtggacatgctgggggtggtgttggccaagaagtgccagaccttagtcagcgacgtggactacaagaactacctgcaccagtggacatgcctgcccgaccagagcgatgtcatccatgctcggcaggcctatgacctccagagcgataatttgtacaagtcagaccttcagtggctaaaa

SEQ ID NO: 2510 - protein, 4000 aa, Homo sapiens
MADDEDYEEVVEYYTEEVVYEEVPGETITKIYETTTTRTSDYEQSETSKPALAQPALAQPASAKPVERRKVIRKKVDPSKFMTPYIAHSQKMQDLFSPNKYKEKFEKTKGQPYASTTDTPELRRIKKVQDQLSEVKYRMDGDVAKTICHVDEKAKDIEHAKKVSQQVSKVLYKQNWEDTKDKYLLPPDAPELVQAVKNTAMFSKKLYTEDWEADKSLFYPYNDSPELRRVAQAQKALSDVAYKKGLAEQQAQFTPLADPPDIEFAKKVTNQVSKQKYKEDYENKIKGKWSETPCFEVANARMNADNISTRKYQEDFENMKDQIYFMQTETPEYKMNKKAGVAASKVKYKEDYEKNKGKADYNVLPASENPQLRQLKAAGDALSDKLYKENYEKTKAKSINYCETPKFKLDTVLQNFSSDKKYKDSYLKDILGHYVGSFEDPYHSHCMKVTAQNSDKNYKAEYEEDRGKGFFPQTITQEYEAIKKLDQCKDHTYKVHPDKTKFTQVTDSPVLLQAQVNSKQLSDLNYKAKHESEKFKCHIPPDTPAFIQHKVNAYNLSDNLYKQDWEKSKAKKFDIKVDAIPLLAAKANTKNTSDVMYKKDYEKNKGKMIGVLSINDDPKMLHSLKVAKNQSDRLYKENYEKTKAKSMNYCETPKYQLDTQLKNFSEARYKDLYVKDVLGHYVGSMEDPYHTHCMKVAAQNSDKSYKAEYEEDKGKCYFPQTITQEYEAIKKLDQCKDHTYKVHPDKTKFTAVTDSPVLLQAQLNTKQLSDLNYKAKHEGEKFKCHIPADAPQFIQHRVNAYNLSDNVYKQDWEKSKAKKFDIKVDAIPLLAAKANTKNTSDVMYKKDYEKSKGKMIGALSINDDPKMLHSLKTAKNQSDREYRKDYEKSKTIYTAPLDMLQVTQAKKSQAIASDVDYKHILHSYSYPPDSINVDLAKKAYALQSDVEYKADYNSWMKGCGWVPFGSLEMEKAKRASDILNEKKYRQHPDTLKFTSIEDAPITVQSKINQAQRSDIAYKAKGEEIIHKYNLPPDLPQFIQAKVNAYNISENMYKADLKDLSKKGYDLRTDAIPIRAAKAARQAASDVQYKKDYEKAKGKMVGFQSLQDDPKLVHYMNVAKIQSDREYKKDYEKTKSKYNTPHDMFNVVAAKKAQDVVSNVNYKHSLHHYTYLPDAMDLELSKNMMQIQSDNVYKEDYNNWMKGIGWIPIGSLDVEKVKKAGDALNEKKYRQHPDTLKFTSIVDSPVMVQAKQNTKQVSDILYKAKGEDVKHKYTMSPDLPQFLQAKCNAYNISDVCYKRDWYDLIAKGNNVLGDAIPITAAKASRNIASDYKYKEAYEKSKGKHVGFRSLQDDPKLVHYMNVAKLQSDREYKKNYENTKTSYHTPGDMVSITAAKMAQDVATNVNYKQPLHHYTYLPDAMSLEHTRNVNQIQSDNVYKDEYNSFLKGIGWIPIGSLEVEKVKKAGDALNERKYRQHPDTVKFTSVPDSMGMVLAQHNTKQLSDLNYKVEGEKLKHKYTIDPELPQFIQAKVNALNMSDAHYKADWKKTIAKGYDLRPDAIPIVAAKSSRNIASDCKYKEAYEKAKGKQVGFLSLQDDPKLVHYMNVAKIQSDREYKKGYEASKTKYHTPLDMVSVTAAKKSQEVATNANYRQSYHHYTLLPDALNVEHSRNAMQIQSDNLYKSDFTNWMKGIGWVPIESLEVEKAKKAGEILSEKKYRQHPEKLKFTYAMDTMEQALNKSNKLNMDKRLYTEKWNKDKTTIHVMPDTPDILLSRVNQITMSDKLYKAGWEEEKKKGYDLRPDAIAIKAARASRDIASDYKYKKAYEQAKGKHIGFRSLEDDPKLVHFMQVAKMQSDREYKKGYEKSKTSFHTPVDMLSVVAAKKSQEVATNANYRNVIHTYNMLPDAMSFELAKNMMQIQSDNQYKADYADFMKGIGWLPLGSLEAEKNKKAMEIISEKKYRQHPDTLKYSTLMDSMNMVLAQNNAKIMNEHLYKQAWEADKTKVHIMPDIPQIILAKANAINMSDKLYKLSLEESKKKGYDLRPDAIPIKAAKASRDIASDYKYKYNYEKGKGKMVGFRSLEDDPKLVHSMQVAKMQSDREYKKNYENTKTSYHTPADMLSVTAAKDAQANITNTNYKHLIHKYILLPDAMNIELTRNMNRIQSDNEYKQDYNEWYKGLGWSPAGSLEVEKAKKATEYASDQKYRQHPSNFQFKKLTDSMDMVLAKQNAHTMNKHLYTIDWNKDKTKIHVMPDTPDILQAKQNQTLYSQKLYKLGWEEALKKGYDLPVDAISVQLAKASRDIASDYKYKQGYRKQLGHHVGFRSLQDDPKLVLSMNVAKMQSEREYKKDFEKWKTKFSSPVDMLGVVLAKKCQELVSDVDYKNYLHQWTCLPDQNDVVQAKKVYELQSENLYKSDLEWLRGIGWSPLGSLEAEKNKRASEIISEKKYRQPPDRNKFTSIPDAMDIVLAKTNAKNRSDRLYREAWDKDKTQIHIMPDTPDIVLAKANLINTSDKLYRMGYEELKRKGYDLPVDAIPIKAAKASREIASEYKYKEGFRKQLGHHIGARNIEDDPKMMWSMHVAKIQSDREYKKDFEKWKTKFSSPVDMLGVVLAKKCQTLVSDVDYKNYLHQWTCLPDQSDVIHARQAYDLQSDNLYKSDLQWLKGIGWMTSGSLEDEKNKRATQILSDHVYRQHPDQFKFSSLMDSIPMVLAKNNAITMNHRLYTEAWDKDKTTVHIMPDTPEVLLAKQNKVNYSEKLYKLGLEEAKRKGYDMRVDAIPIKAAKASRDIASEFKYKEGYRKQLGHHIGARAIRDDPKMMWSMHVAKIQSDREYKKDFEKWKTKFSSPVDMLGVVLAKKCQTLVSDVDYKNYLHQWTCLPDQSDVIHARQAYDLQSDNMYKSDLQWMRGIGWVSIGSLDVEKCKRATEILSDKIYRQPPDRFKFTSVTDSLEQVLAKNNAITMNKRLYTEAWDKDKTQIHIMPDTPEIMLARQNKINYSETLYKLANEEAKKKGYDLRSDAIPIVAAKASRDVISDYKYKDGYRKQLGHHIGARNIEDDPKMMWSMHVAKIQSDREYKKDFEKWKTKFSSPVDMLGVVLAKKCQTLVSDVDYKNYLHEWTCLPDQNDVIHARQAYDLQSDNIYKSDLQWLRGIGWVPIGSMDVVKCKRAAEILSDNIYRQPPDKLKFTSVTDSLEQVLAKNNALNMNKRLYTEAWDKDKTQVHIMPDTPEIMLARQNKINYSESLYRQAMEEAKKEGYDLRSDAIPIVAAKASRDIASDYKYKEAYRKQLGHHIGARAVHDDPKIMWSLHIAKVQSDREYKKDFEKYKTRYSSPVDMLGIVLAKKCQTLVSDVDYKHPLHEWICLPDQNDIIHARKAYDLQSDNLYKSDLEWMKGIGWVPIDSLEVVRAKRAGELLSDTIYRQRPETLKFTSITDTPEQVLAKNNALNMNKRLYTEAWDNDKKTIHVMPDTPEIMLAKLNRINYSDKLYKLALEESKKEGYDLRLDAIPIQAAKASRDIASDYKYKEGYRKQLGHHIGARNIKDDPKMMWSIHVAKIQSDREYKKEFEKWKTKFSSPVDMLGVVLAKKCQILVSDIDYKHPLHEWTCLPDQNDVIQARKAYDLQSDAIYKSDLEWLRGIGWVPIGSVEVEKVKRAGEILSDRKYRQPADQLKFTCITDTPEIVLAKNNALTMSKHLYTEAWDADKTSIHVMPDTPDILLAKSNSANISQKLYTKGWDESKMKDYDLRADAISIKSAKASRDIASDYKYKEAYEKQKGHHIGAQSIEDDPKIMCAIHAGKIQSEREYKKEFQKWKTKFSSPVDMLSILLAKKCQTLVTDIDYRNYLHEWTCMPDQNDIIQAKKAYDLQSDALYKADLEWLRGIGWMPQGSPEVLRVKNAQNIFCDSVYRTPVVNLKYTSIVDTPEVVLAKSNAENISIPKYREVWDKDKTSIHIMPDTPEINLARANALNVSNKLYREGWDEMKAGCDVRLDAIPIQAAKASR

SEQ ID NO: 2511 - DNA, 1006 bp, Homo sapiens
caaattattaaaaccacaatgagataccccttcacacatgccagaatggtgatgataaaaaagacagacaataacagacattagaaaggatgtggagaaattgggtccttcataaaccactggtggaagtggaaaagagtgcagccaccttggaaaagaatttggcagttatcacatgttaaatacagcattaccctatggcccagcaaattccactcctaggtgtatacccaagaagaatgaagacataggtctgcacaataatttgtacatccatgtccgtagcagcattactcataatagccaaaaagtggaaacaacttaaatgcccaccaactgatgaatgcataagcaagatctggtatatccatacagatctattattgggtagtaacaagaatggggtagtaacaagaatgaagtactgacacatgatacaacatggatgaacttcaaaagtaaaggacgccatgcaccaagtgtcattcttggaaacgtgggagatttaggaaatgacattgaagaggaagaattctgttgaaatagtgattctcaacgtggggtccttggacagcaaggatgaggaaaaaacacagtcatccaaggagccagaagttatatgctgacaaaatgccaccgactactttagtggaagctgttgttgggatagggaatctgcaccctctagagaagcagggacttcagctgctgaggaagggctgtcagagttatccatgttattttttttcatttttgtgagtacggtgcctcctaaacaatcacatgaggatttgagactgttagaactcggtgttgttatccacacaaatggaaacattcattatttttaaaacatgtttgtttgtaaatatcagatgaagtaaaaaattgacattaactgtattatagaaatgggaaagtatatccttttgtaatataagatgtattagaagcaaagaagggaaatgggcttcaaacaaaaataaataaatgtaaagatcagttt

SEQ ID NO: 2512 - protein, 37 aa, Homo sapiens
MTLKRKNSVEIVILNVGSLDSKDEEKTQSSKEPEVIC

SEQ ID NO: 2513 - DNA, 2103 bp, Homo sapiens
atcataaaaacacgcctttctcattcaactgaaaaacacactaaaattttaaaagagaaaaatgcaacatcttggaaagtaacgttttaacaccataaaaatttgcacttattcaactgaaaatttacactaaaatagacattaactgtgcttttacattccaaaccatcatactaaacataacaagttaattgccaatgttttccttcccctatactttgaggtagttctacgtaaccaactataacaaatttacttcctaacatcctcaatcttctgctctcctttagttttaagatactttatgacatgggtaatactctgaaatggatgccttctttggatatattttggggttttagtgtctggaggactttgatttctatattagcatattggtttatgaagtctggacacaacctaaggaaaataatcacttgttttaaaggacagttctttcaaattccctacaatgtcagatttagagccaaataccatcgaatatgttgatgctgtaattcctagcaaatttcaagaggtcactctcttttcaaaattataccgtgccccttctttgaaaatgagtttcattttcgaagtcaaaacaagtcctttctcttccactggcgggcccttctggtccccagattagcctgttccaaaattggtcatgtgtctcactgggccccttcagttgacccaagcgtccctcaccagctcctatccatctctatctgctggaaaggctttgaggtttcagatttaggacagcaccactcattcacggtctctcctgcatcaggttctttattctgatagtttccggaaacaaatacaaggcaaagctgcctatgtattggatacccccgagatgagacgggtgagggagacccaacggcacatctcaacggtgaaatatcatgaagactttgagaaacacaagggttgcttcacaccagtggtgacagatcctatcactgaacgagtaaagaagaacatgcaggacttcagtgacattaactaccgaggtattcagaggaaagtggtagaaatggaacaaaaacggaatgaccaagatcaggagactattacaggtaactgagcctgggttgggggaggggattaactttaagtgagggggtagaagaacaaaagtagcattacctacatcaagtcaaaacataaaggacttcaatctgtttttctagaggtgcaagaaagctcctattatctcatagtttacaaagctgatttctaccttatctttgttctcctctgaggaaaagacatgacccagaacctaagctggaataagtgtgattcaatcctttggtggttgttaaaattcatgccttggttttcaagttattggaaaactccaagaacacttgttctgatcactggtttccctttcaggtttacgtgtctggcgtactaatcctggttcggtttttgactatgatccagcagaagacaacatccagtcccgaagcttacacatgattaatggtgtgttagctgaaaaaggcttacaacataaacatcaccatttagtatgctagagtcaatgactttcatttgggctctgaagttccttccctccagagttttccattttctgagctgcccatttggcataaaaataccttgttaactagtgagcaaaacttactttctagataagttcaagttagaaaaaattttgtttcactgcctcagtgcatgtctcccattattatcatttctaatttttcttccaaagaaaaaacagtagtaattctattggagaaataatgaaaatacataaaatacataggcaaagggaagagaaaggatttgacctgtaggaacttcctgagctctattgcatcaaggaagtttattcattacacaaagcaggctgcacaacttcattccttcttttcatgttaaaaagcagaatactagcctggaaaagagaatgagaccccttttctacaaacagtaaaaaaaaattagccgcgagtggtgttgtacacctgtagtaccagctgttcagggggctgaagtgggaggatagcttgagcctagaaagttgaagctgcagtgagccgtgattgtacc

SEQ ID NO: 2514 - protein, 76 aa, Homo sapiens [sequence omitted]

SEQ ID NO: 2515 - DNA, 806 bp, Homo sapiens
acagcagctgtttttttactggactgttttgcagcacttaaactctcatagacatatcagtaaaactgtaggccctcagacaaagcaaagggtttcccctaccctctttttctttgctatcctctatgctctgcctcttgctttagtttcatacaacattcagcttatcattaaggaataaggtttttggctcttatatcactatcatggcgaatcagtggaaaatgagaaacatagtaacacatcatgataaatcctcaacctcggtatctcccctcagtgtcattcttggaaacgtgggagatttaggaaatgacattgaagaggaagaattctgttgaaatagtgattctcaacgtggggtccttggacagcaaggatgaggaaaaaacacagtcatccaaggagccagaagttatatgctgacaaaatgccaccgactactttagtggaagctgttgttgggatagggaatctgcaccctctagagaagcagggacttcagctgctgaggaagggctgtcagagttatccatgttattttttttcatttttgtgagtacggtgcctcctaaacaatcacatgaggatttgagactgttagaactcggtgttgttatccacacaaatggaaacattcattatttttaaaacatgtttgtttgtaaatatcagatgaagtaaaaaattgacattaactgtattatagaaatgggaaagtatatccttttgtaatataagatgtattagaagcaaagaagggaaatgggcttcaaacaaaaataaataaatgtaaagatcagttt

SEQ ID NO: 2516 - protein, 37 aa, Homo sapiens; identical to SEQ ID NO: 2512

SEQ ID NO: 2517 - DNA, 6062 bp, Homo sapiens
gattgaagatagtaagtagattcaacagcatgtaaaaggtctgaatatttaatgttttcatctaatgtgtctcttgttcaattatcactacaactgttgcagggagatgaggattaccgtgcagctctatgaatattgtatatattcatggcgcctcttgactttgatgctgaattgctaggttatttccagcacatctgatcccacacacacaggttaacagtgtctctgataataatgcctttttagaaggccaactgaagcatgcactttccagcacatgctgaaaggtaaatttgatgcagcaataaacagtgataattggtaactaccagacacaatgttagtaataataccatttttcccagaccaaaaaaaaaaagttaattgagctttcctcatttctcctcctataaatatcctgtttgcctgaacttcctcctttgtccttatatgatcctcaaatagttgtgcatgaaattttatggtgctctctgtatctgtcctgcttaaaacagcttctgtgcatgaaaataattatgacttgaaaattgcaaaaacaaatgaattttttaaaatgataaatacttcatatatactcattctttattttacatccctgtttcatctttgacatggaaaaatgcctttggagattgtacatgttcaatacaatatgttatgagtaaaacaatatttgtcagactccagagaacaggttctagtcctgctctgagatttggtctaaatgtgcccttgggtcagtctcgtaacctctgggggcctccgagtacatgtgtataaaacatattggaacttgggaggctgaggcagaagaattgcttgaatctgggaggtggaggttgcagtgagccgagatcgcaccactgcactccagcctgggtgacagagtaagactccgtctcggagggaaacaaaaaaaggaaattattagtagtagtatcatctgctcactccatttcacttttgctatcagacacaaatttatagtaaacatttccagttaggaattaaagagaaagctagataccatctcccactctggtgtttcaagaggacaattagataccttaaagcccactctacaacttcttagagctctttcttctcttccacaatttagatcaaatacaggaaaaactatgaaaaatcaaaggacaaatttacctcaattgtggatactccagaacacctgcgtactacaaaagtcaacaaacaaatcagcgatatcctttataaattggaatacaacaaggccaaacccagaggctacaccacaatccacgacacacccatgttgctgcatgtccgcaaggttaaagatgaagtcagtgatctgaaatacaaagaagtataccaaagaaataaatccaactgcaccattgagccagatgctgttcatatcaaagcagccaaggacgcctacaaagtcaacaccaatctggactataagaaacagtacgaagccaacaaagcccactggaagtggactcctgaccgaccggacttcctccaggctgccaagtcatccctgcagcaaagcgattttgaatataagctggaccgggagttcctcaagggttgcaagctttctgtcactgatgacaaaaacacggtgctcgccctcaggaatactttaatagaaagtgatctgaaatacaaagagaaacatgtcaaggaaagaggaacctgccatgccgtacctgacacgcctcagatcctgctggcgaagactgtcagcaacctggtgtctgagaacaagtacaaggaccatgtcaagaagcacttggcacagggctcatacacaacactaccagagacccgggacactgttcacgtcaaggaagtgaccaagcatgtcagtgatacaaattacaaaaagaagtttgtcaaggagaaaggaaaatccaactactccatcatgctggagccaccagaggtgaaacatgctatggaagtggccaagaagcaaagtgatgtcgcttacagaaaagatgccaaagagaacctgcattacaccacagtggctgatcgaccagacatcaagaaggccacacaggcagccaaacaggccagtgaggtggagtacagagccaagcaccgcaaggaaggcagccatggcttaagcatgctcggtcgcccagacatagaaatggccaagaaggcagccaagctgagcagccaggttaaataccgagaaaatttcgataaagaaaagggcaagacaccaaaatacaatccaaaagacagccagctctacaaagtcatgaaagatgctaataatcttgcaagtgaggttaaatacaaggctgacctgaagaaacttcacaaacccgtgactgacatgaaggagtctctgatcatgaatcatgtcctgaatacaagccaacttgccagttcttaccagtacaagaagaagtatgagaagagtaaaggccactaccacaccatacccgataatctggagcagcttcacctaaaagaggccacagaattacagagtatagtgaaatacaaagaaaagtatgaaaaggaacgaggaaaacccatgctggactttgaaacaccaacgtacatcactgccaaagagtctcagcagatgcagagtgggaaagaatataggaaagattatgaagagtccattaaaggcagaaacctgactggcctggaggtcacgccagctttgttacatgtcaaatatgcaactaaaatagcaagcgagaaagagtacaggaaagatctagaggaaagcatccgtgggaagggcctcactgaaatggaagatacacctgacatgctaagagcaaagaatgccactcaaatcctcaatgagaaagaatataagcgagacctggaactggaagtcaaaggaagaggcctgaatgccatggccaatgaaactccggattttatgagggccaggaatgctactgatattgccagtcagattaagtataagcaatcagcagaaatggagaaagccaatttcacttctgtggttgatactccagagatcattcatgcccaacaagtcaagaatctttcaagccagaaaaagtacaaggaagatgctgagaagtccatgtcgtattatgagactgttttggacaccccagagatacagagagtccgggagaaccaaaagaacttcagccttctccaataccagtgtgaccttaaaaacagtaaaggaaaaattacagttgttcaagacacgccagaaatactgcgtgtaaaagaaaatcagaagaatttcagctcggttttatataaagaggatgtctcaccaggaacggctatcggaaagacacctgagatgatgagagtgaaacaaacacaggaccacattagctcggtgaagtataaggaagcaataggacaaggaactccaatccctgacctgcctgaagtgaaacgtgtgaaggagacgcagaagcacattagctcggttatgtacaaagaaaacttgggaacaggcattccaaccactgtgactccagagattgagagagtcaaacgcaatcaagagaactttagctcgatattgtacaaagagaacttgagcaaggggactcccctacctgtcactcctgagatggagcgagtcaaactcaatcaagaaaactttagctcggtgctatacaaagaaaacctggggacaggaattccaatccccatcactcctgagatgcagagagtcaaacacaatcaagaaaaccttagctcggtattttggaaagaaaggggaaaaaatgccacttaacttcagaattaaactgatctttacatttatttatttttgtttgaagcccatttcccttctttgcttctaatacatcttatattacaaaaggatatactttcccatttctataatacagttaatgtcaattttttacttcatctgatatttacaaacaaacatgttttaaaaataatgaatgtttccatttgtgtggataacaacaccgagttctaacagtctcaaatcctcatgtgattgtttaggaggcaccgtactcacaaaaatgaaaaaaaataacatggataactctgacagcccttcctcagcagctgaagtccctgcttctctagagggtgcagattccctatcccaacaacagcttccactaaagtagtcggtggcattttgtcagcatataacttctggctccttggatgactgtgttttttcctcatccttaaaaagtcccaagaaatgaaatgttactcatggttgtttttctggatgctttcttatcgcacaggtgttatacaaagaaaacatgggcaagggaacccctttacctgtcactcccgagatggaaagagtcaaacacaatcaagaaaatattagctcggtactttggcaagaaaagaaaaaaactacttatttaatgattttgaaaactttcatgatttaaaataatacgtattaatcctactttttaaagacaacttaaattttgtgaatttctttagcaaatttatccttttttcctttgggctacttctagcctaacaccattcccatttctataatacagttaatttcaattttttatttcatctggtattttcaatcttttttttaaaataatgagtttttcagtttgtgtggataacaccactgagttctaactgtctcaaatcctcatataattgtttaggaggcatggtactcacaaaaaaggaaaaaaaaaaataacatggataactctgacagcctttccccagcagctgaggtccctgcttctctagagggtgcagattccccatcccaacaacttccactaaagtaaagtagtcggtggcattttgtcagcatataacttctggctccttggacaactgtgttttgtcttaacaaggaagctgaccttacccttaaaacctttcaacaaatgaaatgttactcatggttgtttttctggttgctttcttatcgcacaggtgttatacaaagaaaacatgggcaagggaacccctctacctgtcactcctgagatggagagagtcaaacacaatcaagaaaatattagctcggtacttgggcaagaaaagaaaaaaactacttactgattttaaaaactatttcatgatttaaaataatacatattaatcctattttctaaagacaaattttgtgaacttctttctttagcaaatttatccttttttcctttgggctacttctagcctaacaccatttccataatacagttaattttgattttttatttcatctgatattttcaatcattttttaaaaatgagtttttccgtttgtgtggataacaacactgagttctaacagtctcaaatcctcatgtgattgtttaggaggcaccgtactcacaaaaatgaaaaaaaataacatggataactctgacagcctttccccagcagctgaggtccctgcttctctagagggtgcagattccccatcccaacaacagcttccactaaagtagctggtggcattttgtcagcatataacttctggctccttggacgactgtgttttcttaacaaggaagttgaccttacccttaaaacctctcaacaaatgaaatgttactcatggttgtttttctggatgctttctcatcgcacaggtgttatacaaagaaaacatgggcaagggaactcctttagctgtcactcccgagatggagcgagtcaaacacaatcaagaaaatattagctcggtacttggcgagaaaagaaaaaaactacttactgattttaaaaactacttttatgatttaaaataatacatattaatcctactttttaaagacaacttaaattttgtgaaatttctttagcaaatttacccttttttcctttgggctacttctagcctaaccccataataacaaggttgctttaatccataaagttctaatatcaagaagtaacagattttcctataaaacatccttttgcttctctctctccaaacttactctctatccactacccccaaggtctctttgttttagatatgcttgaaatttaggacgggtacgtgtggg

SEQ ID NO: 2518 - protein, 822 aa, Homo sapiens
MLLHVRKVKDEVSDLKYKEVYQRNKSNCTIEPDAVHIKAAKDAYKVNTNLDYKKQYEANKAHWKWTPDRPDFLQAAKSSLQQSDFEYKLDREFLKGCKLSVTDDKNTVLALRNTLIESDLKYKEKHVKERGTCHAVPDTPQILLAKTVSNLVSENKYKDHVKKHLAQGSYTTLPETRDTVHVKEVTKHVSDTNYKKKFVKEKGKSNYSIMLEPPEVKHAMEVAKKQSDVAYRKDAKENLHYTTVADRPDIKKATQAAKQASEVEYRAKHRKEGSHGLSMLGRPDIEMAKKAAKLSSQVKYRENFDKEKGKTPKYNPKDSQLYKVMKDANNLASEVKYKADLKKLHKPVTDMKESLIMNHVLNTSQLASSYQYKKKYEKSKGHYHTIPDNLEQLHLKEATELQSIVKYKEKYEKERGKPMLDFETPTYITAKESQQMQSGKEYRKDYEESIKGRNLTGLEVTPALLHVKYATKIASEKEYRKDLEESIRGKGLTEMEDTPDMLRAKNATQILNEKEYKRDLELEVKGRGLNAMANETPDFMRARNATDIASQIKYKQSAEMEKANFTSVVDTPEIIHAQQVKNLSSQKKYKEDAEKSMSYYETVLDTPEIQRVRENQKNFSLLQYQCDLKNSKGKITVVQDTPEILRVKENQKNFSSVLYKEDVSPGTAIGKTPEMMRVKQTQDHISSVKYKEAIGQGTPIPDLPEVKRVKETQKHISSVMYKENLGTGIPTTVTPEIERVKRNQENFSSILYKENLSKGTPLPVTPEMERVKLNQENFSSVLYKENLGTGIPIPITPEMQRVKHNQENLSSVFWKERGKNAT

SEQ ID NO: 2519 - DNA, 650 bp, Homo sapiens
ctctctccatctctggagtgataggtgttgggattcctttccccaaattttctttgtacaaaacctgtgagatacaagaaagtacccagaggacatttaaaacaggcacagagagtaaggaaggaaggaaatgggggaaggggttatatgtgaggaggcagttttttagtaagtaatatttagtaaggataatgtttttacttttttcacagttttaatgatgaactctacaatgctaattctggaaatgaaaaagtacaatggaaagcattaagttatataacgctgaggaatcttgttaattctacttatagtatttcaaatctagtcaagtcactgaaaatgttcaagtataatcggaaatgtgtctttccgatagccgttcctggtgagacatcctctttatataaaacctgggcattcagaatcaggacagtgttaacacagaagaaaagaaaacccagcagttcctggagaaagactaggacacatggcttttgtgaaaacaagacactagacgatgttcccaggtcacactggtattggagctatgaagaaagagtaaacatcttgttaagatttcaacattgctttgttttctttatttgtcctatattatgtgaagaaaattaaaatcctgtatctttaaa

SEQ ID NO: 2520 - protein, 96 aa, Homo sapiens
MFKYNRKCVFPIAVPGETSSLYKTWAFRIRTVLTQKKRKPSSSWRKTRTHGFCENKTLDDVPRSHWYWSYEERVNILLRFQHCFVFFICPILCEEN

SEQ ID NO: 2521 - DNA, 352 bp, Homo sapiens
caacaatgctggtgaatttgagggcctcaggctttatacgatacagcctttcattcaagagattctgggcattcttcactctcatcacttccacagaaccctctggcagccatccaatacccttcagccattccaggtctgacttgtacaagttatcgctctgcaggtcgtaggctttcttggcctggatcacatcgttctgatctggcagacacgtccactggtgcagataattgcgataatcaatgtcgctaaccaggacctggcatttcttggcttgaacaattgacatcatgtccaacggtgtgttgtgaattcctttagacttctcataagctttcttatattctct

SEQ ID NO: 2522 - protein, 55 aa, Homo sapiens
MLVNLRASGFIRYSLSFKRFWAFFTLITSTEPSGSHPIPFSHSRSDLYKLSLCRS

SEQ ID NO: 2523 - DNA, 353 bp, Homo sapiens
tttttttttttttgtagcgcttatatactgaagcctgggacaatgacaagaaaactattcatgtcatgcctgatacaccagaaatcatgttagccaaactcaaccgaataaactacagtgataaactctataaacttgctttggaagagtccaagaaggaaggctatgacttgcgtctggatgccattccaatccaagcagccaaggcttcaagagatattgctagtgatgtaagtggatgttttggaaaagccatttcttattcaaagatgttgacaaatagaagcttttagagtttttcttgctagaaatttagttacccctataagtctcaattccctttagtgattttc

SEQ ID NO: 2524 - protein, 75 aa, Homo sapiens
MPDTPEIMLAKLNRINYSDKLYKLALEESKKEGYDLRLDAIPIQAAKASRDIASDVSGCFGKAISYSKMLTNRSF

SEQ ID NO: 2525 - DNA, 392 bp, Homo sapiens
caggcaaagcctttctttttggaaagaattgcaaaacacagggttctgtatgtcagaagctacagaacagacgtgggagttttctcagggagcccagagggagccatccaatgcccttcatgaagtcagcatagtcagccttgtactgattctgcaaaagaggaaaaattaaattatgagaagaaactggaacttcccaagaatcctaagtgtgtgtttaacattctgtaacttccatttcatttgtaaattttctgtaacttttccacttcaatatttgcttgaatattggtatttaaccaatagcatgttgaacttcaaccatttcttccctaaacttttatcctttttatatttccttgcatgataaattaaaaataagcagaaatgtc

SEQ ID NO: 2526 - protein, 40 aa, Homo sapiens
MSEATEQTWEFSQGAQREPSNALHEVSIVSLVLILQKRKN

SEQ ID NO: 2527 - DNA, 428 bp, Homo sapiens
atgaagctctcagttcagagatcaagatgattgggggataagaagaagaaaaacattcctgcaggactggtctgggcagaagaggagttgtggtaactagatatgaggagaaagagaggaaggaggcacagagcagttggagcttgctgcctggaagaatgacgttttagagacaaggtctgactgtgttgcccaggctggacttcaactcctcagtacaagtgatcctcctgcctgagcctcctgaatagctgggactacaggcctgcaccaccataccctgctctagttacacaaatcttaaaatgatgctgttatgttaattcaattaagaaagtaaactagttctatgatccaagcacatagttgtgactcaattcatgttgttgtttttaatcctgaaatgatattgtaaaataagagctttg

SEQ ID NO: 2528 - protein, 43 aa, Homo sapiens
GEREEGGTEQLELAAWKNDVLETRSDCVAQAGLQLLSTSDPPA

SEQ ID NO: 2529 - DNA, 577 bp, Homo sapiens
cttgagcccaggagttcaaggctgcggcgagctgtgtttgcactccagcctaggtgtcagagtgagactatgtctttaaaaaaaaaaaaaagaagaaagaaatgtattataacattaggagttgtaggcggcaacattacaaccagtatttttctgattacgattttgtatgttacagatattctatattgagcgcattataccaataatcagaaaacattgctgaatcattttgtctttaaagaatcatctaatagggatgggaaggaatacaaaagttgtattaagtaaatgggatgaagctctcagttcagagatcaagatgattgggggataagaagaagaaaaacattcctgcaggactggtctgggcagaagaggagttgtggtaactagatatgaggagaaagagaggaaggaggcacagagcagttggagcttgctgcctggaagaatgacggtatgataaagagatgggatgatgtgaaataattcacattgttaattatgaagtgtgttttgaatcacctcagtgttacccagaaacgacactcggttatcatgttcagatagggga

SEQ ID NO: 2530 - protein, 40 aa, Homo sapiens
MSLKKKKRRKKCIITLGVVGGNITTSIFLITILYVTDILY

SEQ ID NO: 2531 - DNA, 2729 bp, Homo sapiens
ggagctgggggaggacggtggcccgcgaggctcgtcgcagacaacgcggcggcgatgtccgcgagccagagcacaaagttatcattgttgggctggataatgcagggaaaactaccattctttaccaattttctatgaatgaagttgtacatacatctcctacaataggaagtaatgtagaagagatagtgattaataatacacgtttcctaatgtgggatattggtggccaagaatctcttcgttcttcctggaacacttactatactaacacagagtttgtaatagttgttgtggacagtacagacagagagaggatttctgtaactagagaagaactctataaaatgttagcgcatgaggacctaagaaaagctggattgctgatttttgctaataaacaagatgttaaagaatgcatgactgtagcagaaatctcccagtttttgaagaccacttatttgaaaacaaagatgaagtctcaccttccagtttgctttctcattagttttttccaaagtaagttattgaagctgtgattgacatttttctcataatgaatcctctcaggacattgtgtagcctatggtaagtacaaagggagaggaagacattttgaattttaagagctttattatcagtttaaccctccctagttgaatgttattttcttcttgttccattaagtcagaatacaaatcagcacagatattcgaatgtttccaatattttaaaatgtaatgttacttatgaaaagtattttgcttaaggttgtgtgtgtattgtgtatatacctcaagttcaagttaatggcattgatttatgttccagacaaaaataacacaaataataatatccttcgttataaccacaatgagataagtattggcattagtgttcagtgccattttatactttctctctgtgttctctgtattgtactaaccaacctcccaaatcgctgagctgcttgtttaaaaaaaaaaaaaaggaaaaggaaaaagcatgacattgtgtatcgattttttgttgttgaccaaaatcacacacatggaaacatgtaattcaacagagtgggaaagctagcagattcttggcttagtattactaataggcaggattgtacaatgagcaactatcagattattcctttcagtggttcttatggcatctaaattactgaataaattattaatccattaatcagtgaatcaaattatgattacaattatcaaatgaatgctcagcattaattgaaaactgttttgtgaaacatgtctacccagaaaagtagcattctataaatactattaaacaacttagctatattatttttaagtattaaattatatgtcaagcagttaaagtgaatttcagagtaaaagtaaggcatgtttctgagcaacattgataatttcttaatttgcaaatttcttcttattttggtacttggaatatagtgtgagattttttatttctaaattttgttgtatcttctattacataaatgcattgacaattataaaatgcaagtgttttttgaatgattttaagaatttggcttaaaaattgattgatacaacgtattatttgtactaagaagtaacttgacccaaaacaccttttatgtttgcttagggtatattttttcagtgtctgaaagtcaaaggtattcctgtcacaactgtaaacaaacttatcctaaatgtgttaaaacatattcttgggtactctatttatgtatctttcatgccttgaaaatctgaaggttaatccaaactcacatgttttagcatatttgagaaaaaaaaactaccttcaatatcagccttttaaatttcatgaagattttggtgaggaataatagtatatagtttaagtattgacaaaactttgaaagtttctttctttaaaatgggaaatactcaatatctaaatccaggtcaggcatgggatatcagtatttaacattggatgttttatgttttatatttataatgttcaaaatgcaagcataacatttaatatttgtccacatggttttacaaaagtaaatcttaaattactaagcttttcccatatgttctcgtactttctcaaatccctataaagaattacttgttatctattaaaaatctcctttacccaaatctgtattatggtttcgccagacaaatattatgtgatgtagcccagaaaatccacaccttttgtcctttttatgttttaatttgaataatcatgtgcttagtcccttggattactgccacatcagtttaacacgatatcagcacattcccttgtcatcatcaaggtgttggctcagatttattcttaattggatgtttaaagcatgtactaccttgttacagttggtttagtgtagtggattattgacatgacatcatgagaagatgtgtaattttataccacatttataaaacatgattttgttttctacccttcaaggtaaacattaaaaataaggtggtacttgtgtacttgtacataaaaccaaaattatagttgggaaaaaaataaatttatatatgaaaatgtcaaaatcattttaaaagtattattttcaaataaaatggagaagctggtgaaaagtcatattggcaatttttatgtagtttaagtggaattaagcagagggagatgcttttgggtttttaatatgccacttctgagtgaaaacatctcgtggagtcattgtgttcagctct

SEQ ID NO: 2532 - protein, 134 aa, Homo sapiens
MNEVVHTSPTIGSNVEEIVINNTRFLMWDIGGQESLRSSWNTYYTNTEFVIVVVDSTDRERISVTREELYKMLAHEDLRKAGLLIFANKQDVKECMTVAEISQFLKTTYLKTKMKSHLPVCFLISFFQSKLLKL

SEQ ID NO: 2533 - DNA, 2989 bp, Homo sapiens
ccgcagccgcccgagaggagctgggggaggacggtggcccgcgaggctcgtcgcagacaacgcggcggcgatgtccgcgagccagagcacaaagttatcattgttgggctggataatgcagggaaaactaccattctttaccaattttctatgaatgaagttgtacatacatctcctacaataggaagtaatgtagaagagatagtgattaataatacacgtttcctaatgtgggatattggtggccaagaatctcttcgttcttcctggaacacttactatactaacacagagtttgtaatagttgttgtggacagtacagacagagagaggatttctgtaactagagaagaactctataaaatgttagcgcatgaggacctaagaaaagctggattgctgatttttgctaataaacaagatgttaaagaatgcatgactgtagcagaaatctcccagtttttgaagctaacttctattaaagatcaccagtggcatatccaggcatgctgtgctctaactggcgagggattgtgccaaggacttgaatggatgatgtcacgacttaagattagatgatctctactgacctcttctcatagattttgtataaatgaagtgctggactttacctgaaagctgcaaaaattaatggtttagatatatttataataaactgatttaaactttttctataagaagaaaaattaagaccacttatttgaaaacaaagatgaagtctcaccttccagtttgctttctcattagttttttccaaagtaagttattgaagctgtgattgacatttttctcataatgaatcctctcaggacattgtgtagcctatggtaagtacaaagggagaggaagacattttgaattttaagagctttattatcagtttaaccctccctagttgaatgttattttcttcttgttccattaagtcagaatacaaatcagcacagatattcgaatgtttccaatattttaaaatgtaatgttacttatgaaaagtattttgcttaaggttgtgtgtgtattgtgtatatacctcaagttcaagttaatggcattgatttatgttccagacaaaaataacacaaataataatatccttcgttataaccacaatgagataagtattggcattagtgttcagtgccattttatactttctctctgtgttctctgtattgtactaaccaacctcccaaatcgctgagctgcttgtttaaaaaaaaaaaaaaggaaaaggaaaaagcatgacattgtgtatcgattttttgttgttgaccaaaatcacacacatggaaacatgtaattcaacagagtgggaaagctagcagattcttggcttagtattactaataggcaggattgtacaatgagcaactatcagattattcctttcagtggttcttatggcatctaaattactgaataaattattaatccattaatcagtgaatcaaattatgattacaattatcaaatgaatgctcagcattaattgaaaactgttttgtgaaacatgtctacccagaaaagtagcattctataaatactattaaacaacttagctatattatttttaagtattaaattatatgtcaagcagttaaagtgaatttcagagtaaaagtaaggcatgtttctgagcaacattgataatttcttaatttgcaaatttcttcttattttggtacttggaatatagtgtgagattttttatttctaaattttgttgtatcttctattacataaatgcattgacaattataaaatgcaagtgttttttgaatgattttaagaatttggcttaaaaattgattgatacaacgtattatttgtactaagaagtaacttgacccaaaacaccttttatgtttgcttagggtatattttttcagtgtctgaaagtcaaaggtattcctgtcacaactgtaaacaaacttatcctaaatgtgttaaaacatattcttgggtactctatttatgtatctttcatgccttgaaaatctgaaggttaatccaaactcacatgttttagcatatttgagaaaaaaaaactaccttcaatatcagccttttaaatttcatgaagattttggtgaggaataatagtatatagtttaagtattgacaaaactttgaaagtttctttctttaaaatgggaaatactcaatatctaaatccaggtcaggcatgggatatcagtatttaacattggatgttttatgttttatatttataatgttcaaaatgcaagcataacatttaatatttgtccacatggttttacaaaagtaaatcttaaattactaagcttttcccatatgttctcgtactttctcaaatccctataaagaattacttgttatctattaaaaatctcctttacccaaatctgtattatggtttcgccagacaaatattatgtgatgtagcccagaaaatccacaccttttgtcctttttatgttttaatttgaataatcatgtgcttagtcccttggattactgccacatcagtttaacacgatatcagcacattcccttgtcatcatcaaggtgttggctcagatttattcttaattggatgtttaaagcatgtactaccttgttacagttggtttagtgtagtggattattgacatgacatcatgagaagatgtgtaattttataccacatttataaaacatgattttgttttctacccttcaaggtaaacattaaaaataaggtggtacttgtgtacttgtacataaaaccaaaattatagttgggaaaaaaataaatttatatatgaaaatgtcaaaatcattttaaaagtattattttcaaataaaatggagaagctggtgaaaagtcatattggcaatttttatgtagtttaagtggaattaagcagagggagatgcttttgggtttttaatatgccacttctgagtgaaaacatctcgtggagtcattgtgttcagctct

SEQ ID NO: 2534 - protein, 142 aa, Homo sapiens; identical to SEQ ID NO: 184

SEQ ID NO: 2535 - DNA, 3269 bp, Homo sapiens
cccgcccgcgtggtcgtcgccaccgcagccgcccgagaggagctgggggaggacggtggcccgcgaggctcgtcgcagacaacgcggcggcgatgtccgcgagccaggcgagtgccgcggcggcagcggcggggccttgcgcgcggcagggcggcctgggcttcggcctccctccggttccctggaagcgggcccgcgaccagcgcgggagcagcagcagaggcggaggctccagcgcgtctctctcctccccctcagcctgagccgggggaagccaggcggcccgggtgtctggagggggggggtccgctgcccgagaatgggaattctcttcactagaatatggagactgttcaatcaccaggagcacaaagttatcattgttgggctggataatgcagggaaaactaccattctttaccaattttctatgaatgaagttgtacatacatctcctacaataggaagtaatgtagaagagatagtgattaataatacacgtttcctaatgtgggatattggtggccaagaatctcttcgttcttcctggaacacttactatactaacacagagtttgtaatagttgttgtggacagtacagacagagagaggatttctgtaactagagaagaactctataaaatgttagcgcatgaggacctaagaaaagctggattgctgatttttgctaataaacaagatgttaaagaatgcatgactgtagcagaaatctcccagtttttgaagctaacttctattaaagatcaccagtggcatatccaggcatgctgtgctctaactggcgagggattgtgccaaggacttgaatggatgatgtcacgacttaagattagatgatctctactgacctcttctcatagattttgtataaatgaagtgctggactttacctgaaagctgcaaaaattaatggtttagatatatttataataaactgatttaaactttttctataagaagaaaaattaagaccacttatttgaaaacaaagatgaagtctcaccttccagtttgctttctcattagttttttccaaagtaagttattgaagctgtgattgacatttttctcataatgaatcctctcaggacattgtgtagcctatggtaagtacaaagggagaggaagacattttgaattttaagagctttattatcagtttaaccctccctagttgaatgttattttcttcttgttccattaagtcagaatacaaatcagcacagatattcgaatgtttccaatattttaaaatgtaatgttacttatgaaaagtattttgcttaaggttgtgtgtgtattgtgtatatacctcaagttcaagttaatggcattgatttatgttccagacaaaaataacacaaataataatatccttcgttataaccacaatgagataagtattggcattagtgttcagtgccattttatactttctctctgtgttctctgtattgtactaaccaacctcccaaatcgctgagctgcttgtttaaaaaaaaaaaaaaggaaaaggaaaaagcatgacattgtgtatcgattttttgttgttgaccaaaatcacacacatggaaacatgtaattcaacagagtgggaaagctagcagattcttggcttagtattactaataggcaggattgtacaatgagcaactatcagattattcctttcagtggttcttatggcatctaaattactgaataaattattaatccattaatcagtgaatcaaattatgattacaattatcaaatgaatgctcagcattaattgaaaactgttttgtgaaacatgtctacccagaaaagtagcattctataaatactattaaacaacttagctatattatttttaagtattaaattatatgtcaagcagttaaagtgaatttcagagtaaaagtaaggcatgtttctgagcaacattgataatttcttaatttgcaaatttcttcttattttggtacttggaatatagtgtgagattttttatttctaaattttgttgtatcttctattacataaatgcattgacaattataaaatgcaagtgttttttgaatgattttaagaatttggcttaaaaattgattgatacaacgtattatttgtactaagaagtaacttgacccaaaacaccttttatgtttgcttagggtatattttttcagtgtctgaaagtcaaaggtattcctgtcacaactgtaaacaaacttatcctaaatgtgttaaaacatattcttgggtactctatttatgtatctttcatgccttgaaaatctgaaggttaatccaaactcacatgttttagcatatttgagaaaaaaaaactaccttcaatatcagccttttaaatttcatgaagattttggtgaggaataatagtatatagtttaagtattgacaaaactttgaaagtttctttctttaaaatgggaaatactcaatatctaaatccaggtcaggcatgggatatcagtatttaacattggatgttttatgttttatatttataatgttcaaaatgcaagcataacatttaatatttgtccacatggttttacaaaagtaaatcttaaattactaagcttttcccatatgttctcgtactttctcaaatccctataaagaattacttgttatctattaaaaatctcctttacccaaatctgtattatggtttcgccagacaaatattatgtgatgtagcccagaaaatccacaccttttgtcctttttatgttttaatttgaataatcatgtgcttagtcccttggattactgccacatcagtttaacacgatatcagcacattcccttgtcatcatcaaggtgttggctcagatttattcttaattggatgtttaaagcatgtactaccttgttacagttggtttagtgtagtggattattgacatgacatcatgagaagatgtgtaattttataccacatttataaaacatgattttgttttctacccttcaaggtaaacattaaaaataaggtggtacttgtgtacttgtacataaaaccaaaattatagttgggaaaaaaataaatttatatatgaaaatgtcaaaatcattttaaaagtattattttcaaataaaatggagaagctggtgaaaagtcatattggcaatttttatgtagtttaagtggaattaagcagagggagatgcttttgggtttttaatatgccacttctgagtgaaaacatctcgtggagtcattgtgttcagctct

SEQ ID NO: 2536 - protein, 179 aa, Homo sapiens; identical to SEQ ID NO: 182

SEQ ID NO: 2537 - DNA, 2629 bp, Homo sapiens
ggagctgggggaggacggtggcccgcgaggctcgtcgcagacaacgcggcggcgatgtccgcgagccagagcacaaagttatcattgttgggctggataatgcagggaaaactaccattctttaccaattttctatgaatgaagttgtacatacatctcctacaataggaagtaatgtagaagagatagtgattaataatacacgtttcctaatgtgggatattggtggccaagaatctcttcgttcttcctggaacacttactatactaacacagagtttgtaatagttgttgtggacagtacagacagagagaggatttctgtaactagagaagaactctataaaatgttagcgcatgaggacctaagaaaagctggattgctgatttttgctaataaacaagatgttaaagaatgcatgactgtagcagaaatctcccagtttttgaagaccacttatttgaaaacaaagatgaagtctcaccttccagtttgctttctcattagttttttccaaagtaagttattgaagctgtgattgacatttttctcataatgaatcctctcaggacattgtgtagcctatggtaagtacaaagggagaggaagacattttgaattttaagagctttattatcagtttaaccctccctagttgaatgttattttcttcttgttccattaagtcagaatacaaatcagcacagatattcgaatgtttccaatattttaaaatgtaatgttacttatgaaaagtattttgcttaaggttgtgtgtgtattgtgtatatacctcaagttcaagttaatggcattgatttatgttccagacaaaaataacacaaataataatatccttcgttataaccacaatgagataagtattggcattagtgttcagtgccattttatactttctctctgtgttctctgtattgtactaaccaacctcccaaatcgctgagctgcttgtttaaaaaaaaaaaaaaggaaaaggaaaaagcatgacattgtgtatcgattttttgttgttgaccaaaatcacacacatggaaacatgtaattcaacagagtgggaaagctagcagattcttggcttagtattactaataggcaggattgtacaatgagcaactatcagattattcctttcagtggttcttatggcatctaaattactgaataaattattaatccattaatcagtgaatcaaattatgattacaattatcaaatgaatgctcagcattaattgaaaactgttttgtgaaacatgtctacccagaaaagtagcattctataaatactattaaacaacttagctatattatttttaagtattaaattatatgtcaagcagttaaagtgaatttcagagtaaaagtaaggcatgtttctgagcaacattgataatttcttaatttgcaaatttcttcttattttggtacttggaatatagtgtgagattttttatttctaaattttgttgtatcttctattacataaatgcattgacaattataaaatgcaagtgttttttgaatgattttaagaatttggcttaaaaattgattgatacaacgtattatttgtactaagaagtaacttgacccaaaacaccttttatgtttgcttagggtatattttttcagtgtctgaaagtcaaaggtattcctgtcacaactgtaaacaaacttatcctaaatgtgttaaaacatattcttgggtactctatttatgtatctttcatgccttgaaaatctgaaggttaatccaaactcacatgttttagcatatttgagaaaaaaaaactaccttcaatatcagccttttaaatttcatgaagattttggtgaggaataatagtatatagtttaagtattgacaaaactttgaaagtttctttctttaaaatgggaaatactcaatatctaaatccaggtcaggcatgggatatcagtatttaacattggatgttttatgttttatatttataatgttcaaaatgcaagcataacatttaatatttgtccacatggttttacaaaagtaaatcttaaattactaagcttttcccatatgttctcgtactttctcaaatccctataaagaattacttgttatctattaaaaatctcctttacccaaatctgtattatggtttcgccagacaaatattatgtgatgtagcccagaaaatccacaccttttgtcctttttatgttttaatttgaataatcatgtgcttagtcccttggattactgccacatcagtttaacacgatatcagcacattcccttgtcatcatcaaggtgttggctcagatttattcttaattggatgtttaaagcatgtactaccttgttacagttggtttagtgtagtggattattgacatgacatcatgagaagatgtgtaattttataccacatttataaaacatgattttgttttctacccttcaaggtaaacattaaaaataaggtggtacttgtgtacttgtacataaaaccaaaattatagttgggaaaaaaataaatttatatatgaaaatgtcaaaatcattttaaaagtattattttcaaataaaatggagaagctggtgaaaagtcatattggcaatttt

SEQ ID NO: 2538 - protein, 134 aa, Homo sapiens; identical to SEQ ID NO: 2532

SEQ ID NO: 2539 - DNA, 2889 bp, Homo sapiens
ccgcagccgcccgagaggagctgggggaggacggtggcccgcgaggctcgtcgcagacaacgcggcggcgatgtccgcgagccagagcacaaagttatcattgttgggctggataatgcagggaaaactaccattctttaccaattttctatgaatgaagttgtacatacatctcctacaataggaagtaatgtagaagagatagtgattaataatacacgtttcctaatgtgggatattggtggccaagaatctcttcgttcttcctggaacacttactatactaacacagagtttgtaatagttgttgtggacagtacagacagagagaggatttctgtaactagagaagaactctataaaatgttagcgcatgaggacctaagaaaagctggattgctgatttttgctaataaacaagatgttaaagaatgcatgactgtagcagaaatctcccagtttttgaagctaacttctattaaagatcaccagtggcatatccaggcatgctgtgctctaactggcgagggattgtgccaaggacttgaatggatgatgtcacgacttaagattagatgatctctactgacctcttctcatagattttgtataaatgaagtgctggactttacctgaaagctgcaaaaattaatggtttagatatatttataataaactgatttaaactttttctataagaagaaaaattaagaccacttatttgaaaacaaagatgaagtctcaccttccagtttgctttctcattagttttttccaaagtaagttattgaagctgtgattgacatttttctcataatgaatcctctcaggacattgtgtagcctatggtaagtacaaagggagaggaagacattttgaattttaagagctttattatcagtttaaccctccctagttgaatgttattttcttcttgttccattaagtcagaatacaaatcagcacagatattcgaatgtttccaatattttaaaatgtaatgttacttatgaaaagtattttgcttaaggttgtgtgtgtattgtgtatatacctcaagttcaagttaatggcattgatttatgttccagacaaaaataacacaaataataatatccttcgttataaccacaatgagataagtattggcattagtgttcagtgccattttatactttctctctgtgttctctgtattgtactaaccaacctcccaaatcgctgagctgcttgtttaaaaaaaaaaaaaaggaaaaggaaaaagcatgacattgtgtatcgattttttgttgttgaccaaaatcacacacatggaaacatgtaattcaacagagtgggaaagctagcagattcttggcttagtattactaataggcaggattgtacaatgagcaactatcagattattcctttcagtggttcttatggcatctaaattactgaataaattattaatccattaatcagtgaatcaaattatgattacaattatcaaatgaatgctcagcattaattgaaaactgttttgtgaaacatgtctacccagaaaagtagcattctataaatactattaaacaacttagctatattatttttaagtattaaattatatgtcaagcagttaaagtgaatttcagagtaaaagtaaggcatgtttctgagcaacattgataatttcttaatttgcaaatttcttcttattttggtacttggaatatagtgtgagattttttatttctaaattttgttgtatcttctattacataaatgcattgacaattataaaatgcaagtgttttttgaatgattttaagaatttggcttaaaaattgattgatacaacgtattatttgtactaagaagtaacttgacccaaaacaccttttatgtttgcttagggtatattttttcagtgtctgaaagtcaaaggtattcctgtcacaactgtaaacaaacttatcctaaatgtgttaaaacatattcttgggtactctatttatgtatctttcatgccttgaaaatctgaaggttaatccaaactcacatgttttagcatatttgagaaaaaaaaactaccttcaatatcagccttttaaatttcatgaagattttggtgaggaataatagtatatagtttaagtattgacaaaactttgaaagtttctttctttaaaatgggaaatactcaatatctaaatccaggtcaggcatgggatatcagtatttaacattggatgttttatgttttatatttataatgttcaaaatgcaagcataacatttaatatttgtccacatggttttacaaaagtaaatcttaaattactaagcttttcccatatgttctcgtactttctcaaatccctataaagaattacttgttatctattaaaaatctcctttacccaaatctgtattatggtttcgccagacaaatattatgtgatgtagcccagaaaatccacaccttttgtcctttttatgttttaatttgaataatcatgtgcttagtcccttggattactgccacatcagtttaacacgatatcagcacattcccttgtcatcatcaaggtgttggctcagatttattcttaattggatgtttaaagcatgtactaccttgttacagttggtttagtgtagtggattattgacatgacatcatgagaagatgtgtaattttataccacatttataaaacatgattttgttttctacccttcaaggtaaacattaaaaataaggtggtacttgtgtacttgtacataaaaccaaaattatagttgggaaaaaaataaatttatatatgaaaatgtcaaaatcattttaaaagtattattttcaaataaaatggagaagctggtgaaaagtcatattggcaatttt

SEQ ID NO: 2540 - protein, 142 aa, Homo sapiens; identical to SEQ ID NO: 184

SEQ ID NO: 2541 - DNA, 3169 bp, Homo sapiens; identical to SEQ ID NO: 181

SEQ ID NO: 2542 - protein, 179 aa, Homo sapiens; identical to SEQ ID NO: 182

SEQ ID NO: 2543 - DNA, 1008 bp, Homo sapiens
ggagctgggggaggacggtggcccgcgaggctcgtcgcagacaacgcggcggcgatgtccgcgagccagagcacaaagttatcattgttgggctggataatgcagggaaaactaccattctttaccaattttctatgaatgaagttgtacatacatctcctacaataggaagtaatgtagaagagatagtgattaataatacacgtttcctaatgtgggatattggtggccaagaatctcttcgttcttcctggaacacttactatactaacacagagtttgtaatagttgttgtggacagtacagacagagagaggatttctgtaactagagaagaactctataaaatgttagcgcatgaggacctaagaaaagctggattgctgatttttgctaataaacaagatgttaaagaatgcatgactgtagcagaaatctcccagtttttgaagaccacttatttgaaaacaaagatgaagtctcaccttccagtttgctttctcattagttttttccaaagtaagttattgaagctgtgattgacatttttctcataatgaatcctctcaggacattgtgtagcctatggtaagtacaaagggagaggaagacattttgaattttaagagctttattatcagtttaaccctccctagttgaatgttattttcttcttgttccattaagtcagaatacaaatcagcacagatattcgaatgtttccaatattttaaaatgtaatgttacttatgaaaagtattttgcttaaggttgtgtgtgtattgtgtatatacctcaagttcaagttaatggcattgatttatgttccagacaaaaataacacaaataataatatccttcgttataaccacaatgagataagtattggcattagtgttcagtgccattttatactttctctctgtgttctctgtattgtactaaccaacctcccaaatcgctgagctgcttgtttaaaaaaaaaaaaaaggaaaaggaaaaagcatg

SEQ ID NO: 2544 - protein, 134 aa, Homo sapiens; identical to SEQ ID NO: 2532

SEQ ID NO: 2545 - DNA, 1276 bp, Homo sapiens
cgtcgccaccgcagccgcccgagaggagctgggggaggacggtggcccgcgaggctcgtcgcagacaacgcggcggcgatgtccgcgagccagagcacaaagttatcattgttgggctggataatgcagggaaaactaccattctttaccaattttctatgaatgaagttgtacatacatctcctacaataggaagtaatgtagaagagatagtgattaataatacacgtttcctaatgtgggatattggtggccaagaatctcttcgttcttcctggaacacttactatactaacacagagtttgtaatagttgttgtggacagtacagacagagagaggatttctgtaactagagaagaactctataaaatgttagcgcatgaggacctaagaaaagctggattgctgatttttgctaataaacaagatgttaaagaatgcatgactgtagcagaaatctcccagtttttgaagctaacttctattaaagatcaccagtggcatatccaggcatgctgtgctctaactggcgagggattgtgccaaggacttgaatggatgatgtcacgacttaagattagatgatctctactgacctcttctcatagattttgtataaatgaagtgctggactttacctgaaagctgcaaaaattaatggtttagatatatttataataaactgatttaaactttttctataagaagaaaaattaagaccacttatttgaaaacaaagatgaagtctcaccttccagtttgctttctcattagttttttccaaagtaagttattgaagctgtgattgacatttttctcataatgaatcctctcaggacattgtgtagcctatggtaagtacaaagggagaggaagacattttgaattttaagagctttattatcagtttaaccctccctagttgaatgttattttcttcttgttccattaagtcagaatacaaatcagcacagatattcgaatgtttccaatattttaaaatgtaatgttacttatgaaaagtattttgcttaaggttgtgtgtgtattgtgtatatacctcaagttcaagttaatggcattgatttatgttccagacaaaaataacacaaataataatatccttcgttataaccacaatgagataagtattggcattagtgttcagtgccattttatactttctctctgtgttctctgtattgtactaaccaacctcccaaatcgctgagctgcttgtttaaaaaaaaaaaaaaggaaaaggaaaaagcatg

SEQ ID NO: 2546 - protein, 142 aa, Homo sapiens; identical to SEQ ID NO: 184

SEQ ID NO: 2547 - DNA, 1548 bp, Homo sapiens
cccgcccgcgtggtcgtcgccaccgcagccgcccgagaggagctgggggaggacggtggcccgcgaggctcgtcgcagacaacgcggcggcgatgtccgcgagccaggcgagtgccgcggcggcagcggcggggccttgcgcgcggcagggcggcctgggcttcggcctccctccggttccctggaagcgggcccgcgaccagcgcgggagcagcagcagaggcggaggctccagcgcgtctctctcctccccctcagcctgagccgggggaagccaggcggcccgggtgtctggagggggggggtccgctgcccgagaatgggaattctcttcactagaatatggagactgttcaatcaccaggagcacaaagttatcattgttgggctggataatgcagggaaaactaccattctttaccaattttctatgaatgaagttgtacatacatctcctacaataggaagtaatgtagaagagatagtgattaataatacacgtttcctaatgtgggatattggtggccaagaatctcttcgttcttcctggaacacttactatactaacacagagtttgtaatagttgttgtggacagtacagacagagagaggatttctgtaactagagaagaactctataaaatgttagcgcatgaggacctaagaaaagctggattgctgatttttgctaataaacaagatgttaaagaatgcatgactgtagcagaaatctcccagtttttgaagctaacttctattaaagatcaccagtggcatatccaggcatgctgtgctctaactggcgagggattgtgccaaggacttgaatggatgatgtcacgacttaagattagatgatctctactgacctcttctcatagattttgtataaatgaagtgctggactttacctgaaagctgcaaaaattaatggtttagatatatttataataaactgatttaaactttttctataagaagaaaaattaagaccacttatttgaaaacaaagatgaagtctcaccttccagtttgctttctcattagttttttccaaagtaagttattgaagctgtgattgacatttttctcataatgaatcctctcaggacattgtgtagcctatggtaagtacaaagggagaggaagacattttgaattttaagagctttattatcagtttaaccctccctagttgaatgttattttcttcttgttccattaagtcagaatacaaatcagcacagatattcgaatgtttccaatattttaaaatgtaatgttacttatgaaaagtattttgcttaaggttgtgtgtgtattgtgtatatacctcaagttcaagttaatggcattgatttatgttccagacaaaaataacacaaataataatatccttcgttataaccacaatgagataagtattggcattagtgttcagtgccattttatactttctctctgtgttctctgtattgtactaaccaacctcccaaatcgctgagctgcttgtttaaaaaaaaaaaaaaggaaaaggaaaaagcatg

SEQ ID NO: 2548 - protein, 179 aa, Homo sapiens; identical to SEQ ID NO: 182

SEQ ID NO: 2549 - DNA, 738 bp, Homo sapiens
cccgcccgcgtggtcgtcgccaccgcagccgcccgagaggagctgggggaggacggtggcccgcgaggctcgtcgcagacaacgcggcggcgatgtccgcgagccaggcgagtgccgcggcggcagcggcggggccttgcgcgcggcagggcggcctgggcttcggcctccctccggttccctggaagcgggcccgcgaccagcgcgggagcagcagcagaggcggaggctccagcgcgtctctctcctccccctcagcctgagccgggggaagccaggcggcccgggtgtctggagggggggggtccgctgcccgagaatgggaattctcttcactagaatatggagactgttcaatcaccaggagcacaaagttatcattgttgggctggataatgcagggaaaactaccattctttaccaattttctatgaatgaagttgtacatacatctcctacaataggaagtaatgtagaagagatagtgattaataatacacgtttcctaatgtgggatattggtggccaagaatctcttcgttcttcctggaacacttactatactaacacagagtttgtaatagttgttgtggacagtacagacagagagaggatttctgtaactagagaagaactctataaaatgttagcgcatgaggacctaagaaaagctggattgctgatttttgctaataaacaagatgttaaagaatgcatgactgtagcagaaatctccca

SEQ ID NO: 2550 - protein, 138 aa, Homo sapiens
MGILFTRIWRLFNHQEHKVIIVGLDNAGKTTILYQFSMNEVVHTSPTIGSNVEEIVINNTRFLMWDIGGQESLRSSWNTYYTNTEFVIVVVDSTDRERISVTREELYKMLAHEDLRKAGLLIFANKQDVKECMTVAEI

SEQ ID NO: 2551 - DNA, 582 bp, Homo sapiens
gcccgcgtggtcgtcgccaccgcagccgcccgagaggagctgggggaggacggtggcccgcgaggctcgtcgcagacaacgcggcggcgatgtccgcgagccagagcacaaagttatcattgttgggctggataatgcagggaaaactaccattctttaccaattttctatgaatgaagttgtacatacatctcctacaataggaagtaatgtagaagagatagtgattaataatacacgtttcctaatgtgggatattggtggccaagaatctcttcgttcttcctggaacacttactatactaacacagagtttgtaatagttgttgtggacagtacagacagagagaggatttctgtaactagagaagaactctataaaatgttagcgcatgagaagtaaaaagaagacctaagtagggcctagttggaaagtgaaaggagactgaatgaggagatgaccagagaagaaaggaattacagatgaagttgggagtttgagcaaggtactcagtagggtcaagaagagccaaacaggcaaaattctgcagagagacaaatggatcaaagagtgagaatgtg

SEQ ID NO: 2552 - protein, 77 aa, Homo sapiens
MNEVVHTSPTIGSNVEEIVINNTRFLMWDIGGQESLRSSWNTYYTNTEFVIVVVDSTDRERISVTREELYKMLAHEK

SEQ ID NO: 2553 - DNA, 620 bp, Homo sapiens
aggctcgtcgcagacaacgcggcggcgatgtccgcgagccaggcgagtgccgcggcggcagcggcggggccttgcgcgcggcagggcggcctgggcttcggcctccctccggttccctggaagcgggcccgcgaccagcgcgggagcagcagcagaggcggaggctccagcgcgtctctctcctccccctcagcctgagccgggggaagccaggcggcccgggtgtctggagggggggggtccgctgcccgagaatgggaattctcttcactagaatatggagactgttcaatcaccaggccctttctttgctcaccagttgtgtttggacaccacatagaagtgctggggtcttctggaatgaaggttatagattgctgccctaaccgcaccactgagcgaccgagggttgcagaatgcggaaaacgggaggaatcgctcgacttgtccattacacctctggtttatgagcctgccctccactgccacccgtctttgtgtgtgttgggggcagggggggttcttctgcctcctgaatagagatggacttctctccatttgttttacttattatatctgtgtttaaggttaagcttaaggtcatttttctactcgtgtgg

SEQ ID NO: 2554 - protein, 43 aa, Homo sapiens
MGILFTRIWRLFNHQALSLLTSCVWTPHRSAGVFWNEGYRLLP

SEQ ID NO: 2555 - DNA, 582 bp, Homo sapiens
gcccgagaggagctgggggaggacggtggcccgcgaggctcgtcgcagacaacgcggcggcgatgtccgcgagccaggcgagtgccgcggcggcagcggcggggccttgcgcgcggcagggcggcctgggcttcggcctccctccggttccctggaagcgggcccgcgaccagcgcgggagcagcagcagaggcggaggctccagcgcgtctctctcctccccctcagcctgagccgggggaagccaggcggcccgggtgtctggagggggggggtccgctgcccgagaatgggaattctcttcactagaatatggagactgttcaatcaccagggtccgacgtccctgagtagcacggcctggcctgtctttcagccctttctttgctcaccagttgtgtttggacaccacatagaagtgctggggtcttctggaatgaaggttatagattgctgccctaaccgcaccactgagcgaccgagggttgcagaatgcggaaaacgggaggaatcgctcgacttgtccattacacctctggtttatgagcctgccctccactgccacccgtctttgtgtgtgtt

SEQ ID NO: 2556 - protein, 96 aa, Homo sapiens
MGILFTRIWRLFNHQGPTSLSSTAWPVFQPFLCSPVVFGHHIEVLGSSGMKVIDCCPNRTTERPRVAECGKREESLDLSITPLVYEPALHCHPSLC

SEQ ID NO: 2557 - DNA, 3121 bp, Homo sapiens
agcccagcctcgggggccagccccctccgcccaccgcacacgggctggccatgcggcggctctgaacgatgtcctcctcctcctacgccaagaacgggaccgcggacgggccgcactcccccacctcgcaggtggcccgaggcaccacaacccggaggagcaggttgaaaagatccgatggcagcaccacttcgaccagcttcatcctcagacagggttcagcggattcctacacaagcaggccgtctgactccgatgtctctttggaagaggaccgggaagcaattcgacaggagagagaacagcaagcagctatccagcttgagagagcaaagtccaaacctgtagcatttgccgtgaagacaaatgtgagctactgcggcgccctggacgaggatgtgcctgttccaagcacagctatctcctttgatgctaaagactttctacatattaaagagaaatataacaatgattggtggataggaaggctggtgaaagagggctgtgaaattggcttcattccaagtccactcagattggagaacatacggatccagcaagaacaaaaaagaggacgttttcacggagggaaatcaagtggaaattcttcttcaagtcttggagaaatggtatctgggacattccgagcaactcccacatcaacagcaaaacagaagcaaaaagtgacggagcacattcctccttacgatgttgtaccgtcaatgcgtccggtggtgttagtggggccgtcactgaaaggttacgaggtaacagacatgatgcagaaagccctctttgatttcctgaagcacaggtttgatgggaggatttcaataacgagagtgacagctgacatttctcttgctaagaggtctgtcctaaataatcccagcaagagagcaataattgaacgttcgaacacccggtccagcttagcggaagtacaaagtgaaattgaaagaatctttgagttggcaagatctttgcaactggttgttcttgatgcagacaccatcaatcacccagcacaacttataaagacttccttagcaccaattattgttcatgtaaaagtctcatctccaaaggttttacagcggttgattaaatctagaggaaagtcacaaagtaaacacttgaatgttcaactggtggcagctgataaacttgcacaatgccccccagaaatgtttgatgttatattggatgaaaatcagcttgaggatgcatgtgaacatctaggggagtacctggaggcgtactggcgtgccacccacacaaccagtagcacacccatgaccccgctgctgggaaggaatttgggctccacggcactctcaccatatcccacagcaatttctgggttacagagtcagcgaatgaggcacagcaaccactccacagagaactctccaattgaaagacgaagtctaatgacctctgatgaaaattatcacaatgaaagggctcggaagagtaggaaccgcttgtcttccagttctcagcatagccgagatcattaccctcttgtggaagaagattaccctgactcataccaggacacttacaaaccccataggaaccgaggatcacctgggggatatagccatgactcccgacataggctttgagtctaatgaaacaaaaaatattcatctgttgacaatttgccatagcagtgctaggataaaccaatcatcttaacttggctaacatagcacagtatttactgtgctaatgggctgctgtcattttatgctaagtaaggggcaaaaaaaaaaattacattatgcccttgagtctagatggatattagatgcccgatcatatagatatttttaagtgcaacatttacatgataacagtacattttgttttcttcatagatttagacacatcaatttgtaatttagggtacttacaaggcacatataaaataatttcccatgctggaaattccaaatgaccagttccagttggaaccaatttataaaccaattcctgttggaatttgggtgaattgactagaaagtctacttgagcatgttgtaatcaactgaaaaatctggggggaaaaaaaaaaaactaataagaaaatcgaaataccaatagaagccaaatccagctttggtatttatttgctggaagctaaatttacacttaaagttggagtgtataaacattttaatatatgttaatgttgccagaatgacttttcagacttaccaaatgtattgatagtgccaaaaaaaaaatctcagaaatcttaatgcagaaattatatagtctcctcagattttaatatttttatttctttcctggcacagctgttgtattcaaagtgttttgctttttgtttggtcagtactgttagctcatttgaagttggcaaaaacaaatacaaacaagcaaaaaacctcaaatttttttcagcagtgagagagaatagtaaagagaggcccaagcatagctggttatgtgaaatataaaatggggtgttgttctccctttaatcaatctgagcacaactacatacatccaggaatctgaagtcagatagtaaggatgtggtaccaatcctcccgagtgcaatgctaaacacttccaggtgggaattcatctatttcacttaacacaaacgcagggtctgtatttcctgccaacaagattgagtatctttccattgcttctctcagtctctgtctttgaatatctgaatgttctggcccttcaacaaattctttaaatcatgctaaggaatttcgttttatgtggacacactcaactttgatattcaggagatgtttttacaaaatgactaattgaaaaaagttgaaacaaatgattttaaaagcttgcagtaaaaaataaactcatagattcagcaaatatttgttgactaaaattatagcatttttaatgcagaaaattataaagaatttggagattgagctgccttatttctaatgaacactcctcttcatcttattaagtcttcacagtttttccagtggctataattatggaattggtgacctatgttttatattatcaaggaagccttagattcactctgatctaagaaattattgaaattgaccctttttacacaaatgtcttt

SEQ ID NO: 2558 - protein, 520 aa, Homo sapiens; identical to SEQ ID NO: 186

SEQ ID NO: 2559 - DNA, 2032 bp, Homo sapiens
ctgtattgggaaggcagataaaatgccaggtctggactgcctctggggataacctcaccctgtgggatgtgaatgaatagcatcttgcctggtaaatccacaggaattgataaggcaggcgcagttctcccaaacaggccttttctctttaagctgtagctgtggtttctgcagcaattttgtttttgccttgaaagaggtgctctggattatcacacctccatgtatgacaatttgtacctgcatggaattgaagactcggaggctggttcagcggattcctacacaagcaggccgtctgactccgatgtctctttggaagaggaccgggaagcaattcgacaggagagagaacagcaagcagctatccagcttgagagagcaaagtccaaacctgtagcatttgccgtgaagacaaatgtgagctactgcggcgccctggacgaggatgtgcctgttccaagcacagctatctcctttgatgctaaagactttctacatattaaagagaaatataacaatgattggtggataggaaggctggtgaaagagggctgtgaaattggcttcattccaagtccactcagattggagaacatacggatccagcaagaacaaaaaagaggacgttttcacggagggaaatcaagtggaaattcttcttcaagtcttggagaaatggtatctgggacattccgagcaactcccacatcaacagcaaaacagaagcaaaaagtgacggagcacattcctccttacgatgttgtaccgtcaatgcgtccggtggtgttagtggggccgtcactgaaaggttacgaggtaacagacatgatgcagaaagccctctttgatttcctgaagcacaggtttgatgggaggatttcaataacgagagtgacagctgacatttctcttgctaagaggtctgtcctaaataatcccagcaagagagcaataattgaacgttcgaacacccggtccagcttagcggaagtacaaagtgaaattgaaagaatctttgagttggcaagatctttgcaactggttgttcttgatgcagacaccatcaatcacccagcacaacttataaagacttccttagcaccaattattgttcatgtaaaagtctcatctccaaaggttttacagcggttgattaaatctagaggaaagtcacaaagtaaacacttgaatgttcaactggtggcagctgataaacttgcacaatgccccccagaaatgtttgatgttatattggatgaaaatcagcttgaggatgcatgtgaacatctaggggagtacctggaggcgtactggcgtgccacccacacaaccagtagcacacccatgaccccgctgctgggaaggaatttgggctccacggcactctcaccatatcccacagcaatttctgggttacagagtcagcgaatgaggcacagcaaccactccacagagaactctccaattgaaagacgaagtctaatgacctctgatgaaaattatcacaatgaaagggctcggaagagtaggaaccgcttgtcttccagttctcagcatagccgagatcattaccctcttgtggaagaagattaccctgactcataccaggacacttacaaaccccataggaaccgaggatcacctgggggatatagccatgactcccgacataggctttgagtctaatgaaacaaaaaatattcatctgttgacaatttgccatagcagtgctaggataaaccaatcatcttaacttggctaacatagcacagtatttactgtgctaatgggctgctgtcattttatgctaagtaaggggcaaaaaaaaaaattacattatgcccttgagtctagatggatattagatgcccgatcatatagatatttttaagtgcaacatttacatgataacagtacattttgttttcttcatagatttagacacatcaatttgtaatttagggtacttacaaggcacatataaaataatttcccatgctggaaattccaaatgaccagttccagttgg

SEQ ID NO: 2560 - protein, 486 aa, Homo sapiens; identical to SEQ ID NO: 190

SEQ ID NO: 2561 - DNA, 5335 bp, Homo sapiens
cacctccatgtatgacaatttgtacctgcatggaattgaagactcggaggctggttcagcggattcctacacaagcaggccgtctgactccgatgtctctttggaagaggaccgggaagcaattcgacaggagagagaacagcaagcagctatccagcttgagagagcaaagtccaaacctgtagcatttgccgtgaagacaaatgtgagctactgcggcgccctggacgaggatgtgcctgttccaagcacagctatctcctttgatgctaaagactttctacatattaaagagaaatataacaatgattggtggataggaaggctggtgaaagagggctgtgaaattggcttcattccaagtccactcagattggagaacatacggatccagcaagaacaaaaaagaggacgttttcacggagggaaatcaagtggaaattcttcttcaagtcttggagaaatggtatctgggacattccgagcaactcccacatcaacagcaaaacagaagcaaaaagtgacggagcacattcctccttacgatgttgtaccgtcaatgcgtccggtggtgttagtggggccgtcactgaaaggttacgaggtacaaatatcatctgttactcttcagttcttgatcgagcacccaggagacagtcatgttgacgcttgctcctcaagggtctgtttccacgtgggtcctgatggaagccagtgctcagcatgggaaggcagggggtaccgtgtggggctcatgaggccctctgccctttctttcctctcttgcacacttctcatcttttatgtattacattgtttagaaatacctccctcaaaatattcacaatgggaagatctggtcaaagatttgctgtacattaaatgcaaagaaaaggactttatctgtcttgaccattctcattattattagaagtaatagagaatgaacagcacaagaggacaaacaatcaatcttccagcaaacccaaacctttaaagcccaaacagagttcaccctgctgggtttttaagatgatggcatatgccaccaaatccttctctgcttatttattttaaagggcacatgttttaaaagaccactaaaaacattagtgaactttggagattaaacaaaaccatgtgacaaggaaaagagtagagacttcgtttcagatgtttgttttgactttgtgctagcttggattaaaaaataggtagaacgtgacattaaactctgaaggtgagcagcctccagggcaccattcccatcgagctaggacaatgtgtggcacatagtaggcactcagtacacatttgctgaatgaattaatgaatcgctttcaggcagatctaagaatcctggctctatccccctctctttctctcttgtctttctcagagttggaaatgtcagagggatgagcaggagagtggtctacaaaaatccagccatgggcatggagaatttccgccaacatacacaaactagcaggaaggctgagtccagtgctggcctcagttctctagctgctcctcactggaggcaggcacaactcaggcgtgccaaggatacccggcacctgtgtacaaagccagcctgttgtctcctggcagcagttctatcccctaacgagggaagagggaagagggaagagggtctggtgaacactgctggtttattcctcaacaccctggaggagaaccaaggggggtggaaattagcaattgcacatggttaagcatgaaaaacaccttccatggtaacctccccctaggagacgaatggctacaataaggtcttggctcatagtacccttccctccctcctctctcccttttgacttctctctctctctctgcatgtgtttgcctcattctttttttctcacctctgcaaaggtaacagacatgatgcagaaagccctctttgatttcctgaagcacaggtttgatgggaggtgagaaatatagatgtttttgtatttttattttcctttaaccaaacttgtgtgataaattgaattgtagatctatgtttccagagatttcagaagttctctagttaaaagttaactcagtattcttgggaagaatataataaaagaactctgaaaatatgaagtataacattgagtccccagtgaagaaaggaccatgagaagaaaaataagccatttgttttatttaaatgtatatatctttattttctcagttattaataatttcataccaaaatgttttttatgaaaaaatattaattaaaatatataatatttctcatgagtatagtggcttgctggtcaaactaggcagtatttgggaattgtgtatgtgtgtgtgtgtgtgtgtgtgtgtgtgtgtgtcatatgaaagcataaatgtcaagtactgaatttcctcaaaagaagagagtgagaattattttaatcataagcctcccaaagtgatcattttgtagggaatagtacttatttggatatttattatagttgtgggttgtttttattagaaatgtccttgttattttattgatctttttttaatgtattttactatgatccatcaacaatatggctcaggcattagccattaaataattttatcatttaagttttgtgaaaaattctaaagaaagtttctctgttttgcagagaaatggtaaaaagcctgtattgactcaattctaaatattaagctctttcacagtgctgaatgcagtccatgtaaaaataaccacatgaaaaaacctgagatttatcagaaatgtaggaaatttaaatggggtgcatcaaaaagtatgggcaaatgcatccagtttattactgtaggattgaagaaaaacatcacattctttatttttgaaggcagtaattaagccattcactttctctttgctaaattatgagaatccactaaatgcacaaaataattttaaaatgtaaaaaaacttcagatagattttaataaattggtatattaagaataaaaacaagcatggtattgctttaaatataaattgtatgcatttgttaaaataaaagctttctggataattgggtaaaatattcattagtttctggaacaatatagaaagttagtaaacagattttagtttaagaaataagaatgcttctaggtacattagtatataggtcaggctgccttaataaatagaccccaaaatgtgtagtgattcaaacacaatggaagcttattattgctcacttaacagtctgaagcaggtgttccttggctgggagggaggatagagttgggggaggggagaattgggcagaaagtttgttccctctgtcatttggggcccttagcccaggtacgatgtctctagtcagcttgcccggcctggaggtagcgcaactgacatttcactggttagaacttggttatgtggtcatacttaattgcagcggaggcactcttgcagtccaggaggaagaggagatagaatttgttgaatcaataatagccttcgtcacattcatctactggacaaaggcttaataagaaagatgtatttgttccatttcactctctttaaaaaagaaataggcagataatgaagtagcttcaaagaaaataagttaaaagccctgaatcctagagcattggagttggaaggatacataaaatgtcttttagactcatcatttctccaataaccacaatcagatagacaacctgcttctgtttgaaacttttggttattgggattacactttctaaaaaagcattgcaaaaaaatagctgaactctgactttgtaacttaatagggctggtcttggtcttgctgtctgatgctctggccttaaccctaaccctcatgcaggtccctgtggattgaaggcagccagcatgccttggtcgcacgtgcatagttccttcagatatgtatggagtcacatggtttcaacctgtggagctgttacctaaggcagttctgagcagtgccgaatccactggccccataacagccctatctgaacaaatcccatcccataagacagtgttagattattttggtctataacatacttatacgcaacagtgctgttaaaggtttgccctcaagaatgaagaatctgatgttcttcctcaatcctgaggcccagaaaaagggaatttatttaattgtaacagcagagatttgtctcgaatcaagtagaattgtcgcatccattactgtacacatactactgaagttggttttaatagaaattgaatgcaaatttcaatctcaagtattcatggggtctgatgacatggcagagggtctggaggaagagcccagcagtagcaaaagtaatagctgaagagagagacttagccctggagaaatctgatatatttctccagcaggagaaagataggtagatattaaaggggtgaggggtgagagaatggacttgatttcaaatattaagaggccaggcagcagaatgaacaataaggagttccttggttgagtgtatgtggagactttgataagaaagaaattcgctggtagcgtcacactgactctgacatgtcttcttcgtggggaatatcgttaggttttgagctataacatcatgctgcattatgttttaccaattgatacaaggagagaaaaaaacaaatagtctttaattgaaaccagccaagagaacaatgacaaggaaggctttagcacagtgacacggcataaacaatatgttctaatggaaacctactctgtgtttcatgggctatgaatgcagtacgttagacaaaataggagaaagtcctattatttttcagaaagtacaaagaagggatctgttggctacgaggctttcttctttaatctgcttttcagatcttagtagaaaataattcaacaaattggatgaaagtccaacagtttgactattgcagaatcataaacttgggatttttttgataccttagaaattatttgagtcagtttagagctacttattatacaattttattgctgtagctgctattgtggggcctaactgtaatacatgtaagaaaaacagaatactaggctgggcgcagtggctcatgcctataatcccagcactttgggaggcccaggtgggcagatcacctgaggtcgggagttcgagaccagcctgaccaacatggagaaacctcatctctaataaaaatacaaaattagccaggcgtggtggcgcgtgcctgtaattccagccactcgggaggctgaggcaggaaaatcacttgaacctgggaggcagaggttgcggtgagccaagatcatgccattgcactccagcctgggcaataggagcaaaactctgtctcaat

SEQ ID NO: 2562 - protein, 307 aa, Homo sapiens
MYDNLYLHGIEDSEAGSADSYTSRPSDSDVSLEEDREAIRQEREQQAAIQLERAKSKPVAFAVKTNVSYCGALDEDVPVPSTAISFDAKDFLHIKEKYNNDWWIGRLVKEGCEIGFIPSPLRLENIRIQQEQKRGRFHGGKSSGNSSSSLGEMVSGTFRATPTSTAKQKQKVTEHIPPYDVVPSMRPVVLVGPSLKGYEVQISSVTLQFLIEHPGDSHVDACSSRVCFHVGPDGSQCSAWEGRGYRVGLMRPSALSFLSCTLLIFYVLHCLEIPPSKYSQWEDLVKDLLYIKCKEKDFICLDHSHYY

SEQ ID NO: 2563 - DNA, 2095 bp, Homo sapiens
ggacaacctggacccatccatgttcccaatgcagaagggctccctcaacctcctgaggcagaaatgggaatcttgtgattatcagagaagtgagtgtcatcccagggacagccattgtacaattttccagcctcaggaaagcaaattgcttgcgcctgaaggagaggtagtatcagcacctcaatctttggatcccacaagtctgccctacagtacaggggaagagatgtggagttcgaagccggaagagaaggattctgtggacaagagtaacaacaccagggaatatggtcggccagaagtgctgaaggaggattccctgagcagtcggcgcaggattgaacgcttttccattgcccttgatgagctgaggagtgtgtttgaggctcctaagagtggaaacaaaccagctgagtacggtggaaaggaagtggaaattgagcgaagtttgtgctcgccagcttttaagagtcaccctgggagccagctggaggattctgtgaaagattcagacaagaaaggcaaggaaacatcttttgacaagatgtcacctgaaagtggtcacagccgcatctttgaagcgactgctggccctaataagcctgagagtggatttgcagaagacagtgctgctcggggcgagggtgtgtcagacctccacgaagtggtctccctgaaggagcggatggcgaggtaccaggcagctgtttccaggggtgactgccgcagcttctctgctaatatgatggaagaatcagaaatgtgcgcagtgcctggtggtttggccaaggtgaagaaacaatttgaggacgaaattacttcttcccgtaatacctttgctcaataccaatatcaacatcagaacagatctgagcaggaggcaattcatagcagccaggttggcacttcaagaagcagccaggaaatggcaagaaatgaacaagaagggtccaaagtacagaaaattgatgttcatggaacagaaatggtctctcatcttgaaaagcacaccgaggaagtaaaccaagcatctcagtttcatcaatatgttcaagaaactgtcattgatacacctgaggatgaagagattccaaaggtttcgactaagttgttaaaagagcagtttgaaaagtctgcccaggaaaagatcctttattctgacaaagagatgacaaccccagccaagcagattaagaagctgctgctccaagacaaggaaatatgtatactttgtcaaaagacagtttatccaatggagtgcctagtggcagacaagcagaattttcataagtcctgcttccgatgccaccattgcaacagtaaactaagtttgggaaattatgcatcacttcatggacaaatatactgtaaacctcactttaaacaacttttcaaatccaaaggaaattatgatgaaggttttggacataagcagcataaagatagatggaactgcaaaaaccaaagcagatcagtggactttattcctaatgaagaaccaaatatgtgtaaaaatattgcagaaaacacccttgtacctggagatcgtaatgaacatttagatgctggtaacagtgaagggcaaaggaatgatttgagaaaattaggggaaaggggaaaattaaaagtcatttggcctccttccaaggagatccctaagaaaaccttaccctttgaggaagagctcaaaatgagtaaacctaagtggccacctgaaatgacaaccctgctatcccctgaatttaaaagtgaatctctgctagaagatgttagaactccagaaaataaaggacaaagacaagatcactttccatttttgcagccttatctacagtccacccatgtttgtcagaaagaggatgttataggaatcaaagaaatgaaaatgcctgaaggaagaaaagatgaaaagaaggaaggaaggaagaatgtgcaagataggccgagtgaagctgaagacacaaagagtaacaggaaaagtgctatggatcttaatgacaacaataatgtgattttttatactgctgctgcttgtcacaattattataacttctctgtaatttcctctgaaataaaattgaatcacctgaggtgc

SEQ ID NO: 2564 - protein, 691 aa, Homo sapiens
MFPMQKGSLNLLRQKWESCDYQRSECHPRDSHCTIFQPQESKLLAPEGEVVSAPQSLDPTSLPYSTGEEMWSSKPEEKDSVDKSNNTREYGRPEVLKEDSLSSRRRIERFSIALDELRSVFEAPKSGNKPAEYGGKEVEIERSLCSPAFKSHPGSQLEDSVKDSDKKGKETSFDKMSPESGHSRIFEATAGPNKPESGFAEDSAARGEGVSDLHEVVSLKERMARYQAAVSRGDCRSFSANMMEESEMCAVPGGLAKVKKQFEDEITSSRNTFAQYQYQHQNRSEQEAIHSSQVGTSRSSQEMARNEQEGSKVQKIDVHGTEMVSHLEKHTEEVNQASQFHQYVQETVIDTPEDEEIPKVSTKLLKEQFEKSAQEKILYSDKEMTTPAKQIKKLLLQDKEICILCQKTVYPMECLVADKQNFHKSCFRCHHCNSKLSLGNYASLHGQIYCKPHFKQLFKSKGNYDEGFGHKQHKDRWNCKNQSRSVDFIPNEEPNMCKNIAENTLVPGDRNEHLDAGNSEGQRNDLRKLGERGKLKVIWPPSKEIPKKTLPFEEELKMSKPKWPPEMTTLLSPEFKSESLLEDVRTPENKGQRQDHFPFLQPYLQSTHVCQKEDVIGIKEMKMPEGRKDEKKEGRKNVQDRPSEAEDTKSNRKSAMDLNDNNNVIFYTAAACHNYYNFSVISSEIKLNHLR

SEQ ID NO: 2565 - DNA, 885 bp, Homo sapiens
gacttaactctggaatgtgttttgactcactgactgtaatagtgactaaaaggaacatgtgggagtcatcaaaaatctgcaggtggatctgactgtaagaaagagaaacacttaattgggtacttactaaatgtttgtcaaatggatttgaatattttgtgaattttatattcacataaaggattcagaagaaagcgcaactgagaaatgtccaaatatggtgaagacacttcttctagagtgaaagacataaagaaaataggctaactcctctggggagaggaggaaaaacataatttatatctctatgtataatgaactaaaactttattgccaaaactttaaaaatgtttgtttagatggaactcagcatctaaacttttctaaaaacccatgatacgtgagagaaacaaaatcagtcctaaaattacggtctgtaagcaaggagactttttttctagaatactatgaaacaatttttttaatggatcatctgttctcatgatatttctattactccttccagaatgggtttacatattaaataacaaagcagaagctaccatttccagggaagagaatgcatcaaattatttatgattttatcaatcctgattaactgcacagccacaaaatcaacaccatccttgtcactcctacaggcgcttgatgcctgagttctacatttcctgttttattcctgtgcactcagcacatccatccactttagtgaattgatttcattgaatactgttatgggttgaattgtgtacccctaaaattctaatccccagtacctgagaatatgcttgtatttggagacagggcccttaaagatataattcagttaaaatgaggccattaggatggccagtctgactagtt

SEQ ID NO: 2566 - protein, 32 aa, Homo sapiens
MIFLLLLPEWVYILNNKAEATISREENASNYL

SEQ ID NO: 2567 - DNA, 3096 bp, Homo sapiens
tttaagagtcaccctgggagccagctggaggattctgtgaaagattcagacaagaaaggcaaggaaacatcttttgacaagatgtcacctgaaagtggtcacagccgcatctttgaagcgactgctggccctaataagcctgagagtggatttgcagaagacagtgctgctcggggcgagggtgtgtcagacctccacgaagtggtctccctgaaggagcggatggcgaggtaccaggcagctgtttccaggggtgactgccgcagcttctctgctaatatgatggaagaatcagaaatgtgcgcagtgcctggtggtttggccaaggtgaagaaacaatttgaggacgaaattacttcttcccgtaatacctttgctcaataccaatatcaacatcagaacagatctgagcaggaggcaattcatagcagccaggttggcacttcaagaagcagccaggaaatggcaagaaatgaacaagaagggtccaaagtacagaaaattgatgttcatggaacagaaatggtctctcatcttgaaaagcacaccgaggaagtaaaccaagcatctcagtttcatcaatatgttcaagaaactgtcattgatacacctgaggatgaagagattccaaaggtttcgactaagttgttaaaagagcagtttgaaaagtctgcccaggaaaagatcctttattctgacaaagagatgacaaccccagccaagcagattaagaagctgctgctccaagacaaggaaatatgtatactttgtcaaaagacagtttatccaatggagtgcctagtggcagacaagcagaattttcataagtcctgcttccgatgccaccattgcaacagtaaactaagtttgggaaattatgcatcacttcatggacaaatatactgtaaacctcactttaaacaacttttcaaatccaaaggaaattatgatgaaggttttggacataagcagcataaagatagatggaactgcaaaaaccaaagcagatcagtggactttattcctaatgaagaaccaaatatgtgtaaaaatattgcagaaaacacccttgtacctggagatcgtaatgaacatttagatgctggtaacagtgaagggcaaaggaatgatttgagaaaattaggggaaaggggaaaattaaaagtcatttggcctccttccaaggagatccctaagaaaaccttaccctttgaggaagagctcaaaatgagtaaacctaagtggccacctgaaatgacaaccctgctatcccctgaatttaaaagtgaatctctgctagaagatgttagaactccagaaaataaaggacaaagacaagatcactttccatttttgcagccttatctacagtccacccatgtttgtcagaaagaggatgttataggaatcaaagaaatgaaaatgcctgaaggaagaaaagatgaaaagaaggaaggaaggaagaatgtgcaagataggccgagtgaagctgaagacacaaagagtaacaggaaaagtgctatggatcttaatgacaacaataatgtgattgtgcagagtgctgaaaaggagaaaaatgaaaaaactaaccaaactaatggtgcagaagttttacaggttactaacactgatgatgagatgatgccagaaaatcataaagaaaatttgaataagaataataataacaattatgtagcagtctcatatctgaataattgcaggcagaagacatctattttagaatttcttgatctattacccttgtcgagtgaagcaaatgacactgcaaatgaatatgaaattgagaagttagaaaatacatctagaatctcagagttacttggtatatttgaatctgaaaagacttattcgaggaatgtactagcaatggctctgaagaaacagactgacagagcagctgctggcagtcctgtgcagcctgctccaaaaccaagcctcagcagaggccttatggtaaaggggggaagttcaatcatctctcctgatacaaatctcttaaacattaaaggaagccattcaaagagcaaaaatttacactttttcttttctaacaccgtgaaaatcactgcattttccaagaaaaatgagaacattttcaattgtgatttaatagattctgtagatcaaattaaaaatatgccatgcttggatttaagggaatttggaaaggatgttaaaccttggcatgttgaaacaacagaagctgcccgcaataatgaaaacacaggttttgatgctctgagccatgaatgtacagctaagcctttgtttcccagagtggaggtgcagtcagaacaactcacggtggaagagcagattaaaagaaacaggtgctacagtgacactgagtaaaatatctatggccactgacagtccacacttaggcactgagagatattgatgttctgaaataagattttatgaatttggatacccttttgaggaacttgatgtaaacatggtgttcagaaatctcgtgtctatctcaatgggatatttcttgtattacaccttgtcatttttttcacaatttatttacatctacttttgtttgaactggaatgaagagatgaaacactatggatatgttttccattcaaatggcactttagcatattgttctgttttcctgtaaaacatcatgggtgtgatttttatactgctgctgcttgtcacaattattataacttctctgtaatttcctctgaaataaaattgaatcacctgaggtgcaaaccaaaatacttctgtaactttttttgatatatactgtcattctaagtacatatactccttgtgacttgggaagtatttgtcttgaggcaagtatttaccacccacactaaaataatgctggaaaaaataaaatactaaactgaaggcacagtattattagaaagtgtaacattttcattttctcttttactctacattttaaagatacgagggttattgttcttgaaataattacctatattaaattatcatagaatgtgtctataaacatttgacgaaaaatgttgattttcctccagaataatgtgaagtccatactcagaaattaactagaaaggt

SEQ ID NO: 2568 - protein, 763 aa, Homo sapiens
MSPESGHSRIFEATAGPNKPESGFAEDSAARGEGVSDLHEVVSLKERMARYQAAVSRGDCRSFSANMMEESEMCAVPGGLAKVKKQFEDEITSSRNTFAQYQYQHQNRSEQEAIHSSQVGTSRSSQEMARNEQEGSKVQKIDVHGTEMVSHLEKHTEEVNQASQFHQYVQETVIDTPEDEEIPKVSTKLLKEQFEKSAQEKILYSDKEMTTPAKQIKKLLLQDKEICILCQKTVYPMECLVADKQNFHKSCFRCHHCNSKLSLGNYASLHGQIYCKPHFKQLFKSKGNYDEGFGHKQHKDRWNCKNQSRSVDFIPNEEPNMCKNIAENTLVPGDRNEHLDAGNSEGQRNDLRKLGERGKLKVIWPPSKEIPKKTLPFEEELKMSKPKWPPEMTTLLSPEFKSESLLEDVRTPENKGQRQDHFPFLQPYLQSTHVCQKEDVIGIKEMKMPEGRKDEKKEGRKNVQDRPSEAEDTKSNRKSAMDLNDNNNVIVQSAEKEKNEKTNQTNGAEVLQVTNTDDEMMPENHKENLNKNNNNNYVAVSYLNNCRQKTSILEFLDLLPLSSEANDTANEYEIEKLENTSRISELLGIFESEKTYSRNVLAMALKKQTDRAAAGSPVQPAPKPSLSRGLMVKGGSSIISPDTNLLNIKGSHSKSKNLHFFFSNTVKITAFSKKNENIFNCDLIDSVDQIKNMPCLDLREFGKDVKPWHVETTEAARNNENTGFDALSHECTAKPLFPRVEVQSEQLTVEEQIKRNRCYSDTE

SEQ ID NO: 2569 - DNA, 478 bp, Homo sapiens
agccgtcccatctacttgcttgatagacccttcagtggagcgggcctccactgcacccattgctttcaggggactgggaaattggctgtacatgaaacaagggaggaagctagtctgtgaagaactataaagatatatgatatttccacaaacttggggttaaacctaaatatcataaaagcgactgctggccctaataagcctgagagtggatttgcagaagacagtgctgctcggggcgagggtgtgtcagacctccacgaagtggtctccctgaaggagcggatggcgaggtaccaggcagctgtttccaggggtgactgccgcagcttctctgctaatatgatggaagaatcagaaatgtgcgcagtgcctggtggtttggccaaggtgaagaaacaatttgaggacgaaattacttcttcccgtaatacctttgctcaataccaatatcaacatcagaacagatctgagcagg

SEQ ID NO: 2570 - protein, 63 aa, Homo sapiens
MARYQAAVSRGDCRSFSANMMEESEMCAVPGGLAKVKKQFEDEITSSRNTFAQYQYQHQNRSE

SEQ ID NO: 2571 - DNA, 2219 bp, Homo sapiens
gatagacccttcagtggagcgggcctccacttcccctgaactgcccagtcctcctagaagactaccagtccccaaagatgtatattccaagcaaagaaatttgtatgaattaaaccgtttatataaacacatccatcctgagttaagaaaaaacttagaaaaagattatatcagtgaagtttctgagattgtttctagtcaaatgaactcagggagttcagtctcagcagatgtgcaacaagcccggtatgtttttgaaaacacaaatgacagttctcaaaaagatctgaactcagaaagagaatacttggaatgggatgaaattctgaagggagaggtgcagtccattagatggatctttgagaatcaaccattggattccatcaacaatggctctcctgatgaaggtgatatttccaggggcattgctgatcaagaaatcattgctggtggtgatgtgaaatataccacatggatgtttgaaacccaacccatcgacacacttggggcttattcttctgacactgtagaaaatgcagagaaaattcctgagctagccagaggagatgtctgcacagctcggtggatgtttgaaacaaggccattggactcaatgaataaaatgcatcaaagtcaagaagaatcagcggtaactatcagtaaggacataactgggggggatgtcaagactgtgagatacatgtttgaaactcaacatctagatcaacttggacagcttcattcagtggatgaggttcatttactgcagcttaggtctgagctcaaagaaattaagggaaatgttaaaagaagtataaaatgtttcgaaactcaaccattatatgttattagagatggttcgggccaaatgctggaaattaaaactgttcacagagaagacgttgaaaagggagatgtaagaacagcacggtggatgtttgaaacacagccgttggacacaattaacaaagatatcacagaaattaaagttgtccgaggaatatccatggaagaaaatgtcaaaggtggggtgagtaaggcaaagtggttatttgaaacccaacctttggagaaaatcaaagagtcagaagaggtcatcattgaaaaggaaaaaataataggtacagatgtctccagaaagtgttggatgtttgaaacccagccattagacattctaaaagaagttcctgatgcagattctctacaacgtgaggagataataggtggtgatgtacaaactactaagcatctatttgaaacacttccaattgaagcattaaaagacagtcctgatataggaaagcttcaaaaaatcactgcctctgaagaagaaaaaggggatgttaggcatcaaaaatggatttttgaaacccaacctctggaagacattagaaaagataaaaaggagtacacacgaacagtgaaacttgaagaagttgacagaggagatgtgaagaattacacacatatctttgaatcaaacaatttaattaaatttgatgcatcacataaaatagaggtggaaggagttacaagaggtgctgtagagttaaataaatctctcttcgagacaacaccactgtatgccattcaagatccccttggaaaatatcatcaagtaaagacagtccagcaagaagaaatcgtaagaggtgatgtaagaagctgtaggtggctttttgaaacaaggcccattgaccagtttgatgaaagcattcataaatttcaaataattagaggaatatctgctcaagaaatacagactggaaatgtgaaatctgccaaatggttgtttgaaacccaacctcttgattcaattaaatattttagtgatgtggaagaaacagaaagtaaaactgaacaaactagagatattgttaaaggggatgtcaaaacctgtaaatggctttttgagacccagccaatggagtctctttatgaaaaagtttcgttaatgaccagcagtgaagaaattcataagggagatgtcaaaacttgtacttggctctttgaaactcagccacttgataccataaaagatgactctgaaacagcagtcaaattgcaaactgtaaaacaggaggagatccaaggtggggatgttcgtacagcatgttttctttttgagacagaaaatttggacagcatacaaggagaagaagtgaaggaaatcaagcctgttgaaatggatatacaagctggagatgtttccagcatga

SEQ ID NO: 2572 - protein, 671 aa, Homo sapiens
MNSGSSVSADVQQARYVFENTNDSSQKDLNSEREYLEWDEILKGEVQSIRWIFENQPLDSINNGSPDEGDISRGIADQEIIAGGDVKYTTWMFETQPIDTLGAYSSDTVENAEKIPELARGDVCTARWMFETRPLDSMNKMHQSQEESAVTISKDITGGDVKTVRYMFETQHLDQLGQLHSVDEVHLLQLRSELKEIKGNVKRSIKCFETQPLYVIRDGSGQMLEIKTVHREDVEKGDVRTARWMFETQPLDTINKDITEIKVVRGISMEENVKGGVSKAKWLFETQPLEKIKESEEVIIEKEKIIGTDVSRKCWMFETQPLDILKEVPDADSLQREEIIGGDVQTTKHLFETLPIEALKDSPDIGKLQKITASEEEKGDVRHQKWIFETQPLEDIRKDKKEYTRTVKLEEVDRGDVKNYTHIFESNNLIKFDASHKIEVEGVTRGAVELNKSLFETTPLYAIQDPLGKYHQVKTVQQEEIVRGDVRSCRWLFETRPIDQFDESIHKFQIIRGISAQEIQTGNVKSAKWLFETQPLDSIKYFSDVEETESKTEQTRDIVKGDVKTCKWLFETQPMESLYEKVSLMTSSEEIHKGDVKTCTWLFETQPLDTIKDDSETAVKLQTVKQEEIQGGDVRTACFLFETENLDSIQGEEVKEIKPVEMDIQAGDVSS

SEQ ID NO: 2573 - DNA, 7260 bp, Homo sapiens
gaaggagagaaagaaatcattggtggtgatgttgaaggtacaaaactgttactgaagaaaaggcagtctctggttgaacgtactgttagtgaaactgacatcatccctggagatgtgcataacacagttaaggtttttatgaccgagcctcagagtacatttggtaagatacccaaagaagagattataaaaggtgatttgacatcaaccctaaattccctcagccaggctgtaaatcagaaaacagtgacgaaaacagaagaaattataaaaggtaacatgctagccacactcaagtcacttaaagaatcaagccatcgatggaaagaatctaaacagcctgatgccatccctggtgatattgaaaaagctattgaatgccttgaaaaagctacaaatacaaagacagaaattctgaaaaaggagcttctcaaagatgacctggaaacatcactaaggtctttgaaagaagcacaaagaagtttcaaagaggtacataaagaaggtgtaataaaaaaagatgctaaagctgtgatggcaggatcctcgggagagcagaaaacagatattcatcaggttgctgtccagaggaacaaaaatagtcttcttcagccaaagccaggtccatttgagccagcggccaagtggcaagggggagcagatactctcagtcaaactatggggaaatcttgccatggcaatttagtagaagaaagaactgaggttaatcttccaaaagcccccaaaggcactgtaaagattgtcatagatcgtgaacaaaacaatgatgctctggagaaaagccttagaagactatctaattcacaccataaatctaatgttttggaatcaggagacaaaacgggtgtctggactgatactacaggagaacagcatcttagagatgaatatatgagcagacaattaacttcaactgtgtcagttaagaataatctaacaactaaagaatcagacagggcagtgagagagctgaagaaggatgatgtctttaattccatccaatctgctggtaaaaccgttggaaagcaacagacatatgaactgagaaatgaccaccagaaaatggagggttttcatataaagagtcctaaaaagaccaaaaatattaaaatattaactgatacacaaagctccaagcccagtcccacccagcatccagtcagcatgccagttggaggaacttacgacctttcaggggactttcagaagcaaactttgttaaagcaagaaacaaaatattctaataaggatataaagaaaaagaatataaaccttcaaccaatgtggcagcttttgcctgtagagcaagacacatccaatgtaacagaaatgaaagtctctgaaaaaagtcacaatacatttaaggcaaccaacaaaaagcgggagactgatgttcacttgaaaagccaggactttctaatgaaaacaaatacttccacaggcttaaaaatggcaatggaaaggtccttgaatccaatcaactttaaccctgagaataatgtaaaagaaagtgagtgcccccttccacctccatctccacctcctccaccaccttctaatgcatcatctgaaattgaatttcctcttcctcctccacctcctttgatgatgtttcctgaaaaaaatgggtttcttccctcactgtccacagagaagataaaggctgaatttgaaagttttccaggcctccctcttcctccacctccagtagatgagaaatctgaaagagaaagttcatcgatgtttctgccgcctcctcctcctccaactccatctcaaaagccagcacatctcctttcctcctctgctccggaaaagcacagtggagacttcatgcaacaatattcccaaaaagaagcctcgaactctcagaattctcaggctaaaatcataacaggaaaaaccggtgtgttgccacctcccacattgcccaaacccaaacttcccaagcatataaaagataataagaacgatttttcccccaaagttgaactggcaacctccctgtcagatatggaatgtaaaattactacctcaaaggatcagaaaaaagtaatggtgatgaccagcagtgaacacacggagacaaagcagaacgttattagtaagagtcttgatgaaagaaaacaattatctattgactctgcaaactgtctctcacacacagttccaggaacttcagcacccaggaaaaaacagattgcgcctcttataaaatctcattcatttccagagagttcaggacaacaaaatccaaaaccttatatgagaaaatttaagacacctttaatgattgctgaagaaaaatatagacaacaaaaagaagaaattgaaaaacagaaacaggagagttcttactacaacattgttaaaactcaaagccaaaatcaacacataacagaggtggaaaaggaaatgccattacaaaaaaccaatgaggaggtttccctatctggaattgattcagaatgcactgtggttcaacccagcccaggctctcaaagtaatgctcggatactaggagtgtgttctgataaccaactctccacaacatcgccagaaacagtcgctgccaagaggctccaccatgttttagcagcttcagaagacaaagataagatgaaaaaggaagttttacaaagctcaagggacattatgcaatccaaatcagcttgcgaaattaaacaaagtcaccaagaatgtagtacccaacaaacacaacagaagaagtatttggagcagttgcacttgccccaaagcaaaccaatttccccaaatttcaaagttaaaaccatcaaacttccaactctagatcatacattaaatgaaacagaccacagctatgaaagtcataaacagcaatctgagattgatgttcaaacctttaccaaaaaacaatatctgaaaaccaagaaaactgaagcaagcactgaatgtagtcataagcaatctctggctgaaagacattatcagttacctaagaaggagaaaagagtgacagtacaattgcctacagaatccatacagaagaaccaggaagataagctcaagatggttcccaggaagcaaagagaatttagcggatctgacagagggaaacttccaggaagtgaagaaaaaaatcagggaccatcaatgattggtcgaaaagaagagagattaataactgaaagaaaacacgaacatctgaagaataaatcagcaccaaaggtcgtcaagcaaaaggttatcgatgcacatcttgattcacagactcagaattttcagcaaacacaaatacagaccgctgaaagtaaagctgaacataaaaaattgccccagccatataatagtctgcaggaagaaaaatgtctcgaagtcaagggcatacaagagaaacaagtcttctctaatactaaagattcaaagcaagagattacacagaacaaatctttcttttcctctgtgaaagaatcccagcgggatgatggaaaaggtgccttaaatatagtggaattcttgagaaaacgtgaagaactgcaacagattttgtcgagagtgaaacagtttgaagcagagccaaataaaagtggccttaaaacatttcagacactattaaatactatcccaggatggctgataagtgaagataagagagaatatgcagttcacattgccatggagaataatttagaaaaagtaaaagaagaaataacacatattaaaactcaagcggaagatatgcttgtgtcctatgaaaatataattcagacagccatgatgtcctccaaaacaggaaaaccgggaaataaacccactagtcttgatgaaacatcatccaaagtatctaatgttcatgtcagcaataataaaaatagtgaacagaaagaaaataaaattgccaaagagaaaacagtacagcaccaagtagcagctcatcatgaagcaactgttcgtagtcacgtgaaaacccatcaggaaattaaacttgatgatagcaacattcctcctccctctttaaaaacacgcccaccgtcaccaacttttatcacaatagaatctactgcccgacgaacagaaaaccctactaagaacgagctttctcagtcccctaaaaaggacagttatgttgaacccccaccaagaaggcccatgtcgcaaaaatctgaaattcacagagcaaacacttccccttctccacccaggagtcgctctgaacaacttgtcagactcaaagacaccactgcaaagttatccaaaggggccatcccatgtccagcagcaaccccggttccaattgtagagaagaggtctgaaatcatcatgtctcctgcaacacttcgtcgtcaaattaagatagaaactcgtggtagggactctccacctacaatcacaataccagtaaatataaatcatgctgctagtggttccttcagagaatctgtggacgctcaagaggaaatcaggaaagtggagaagagagctacttatgttcataaagatggactaaattccactgatcacatggtgcccgacactgaaagttatgatgcagttgaaatcatccgcaaggttgcagtgcctcctcgcctgtcagagcacacacagagatatgaagcggccaaccgaactgttcaaatggctgaaaatttcgtgaatgaccctgaaaatgaaataaacagatggttcagggaatttgagcatggcccagtttctgaagcaaagtcaaatagaagagtttatgcaaagggagaaacaaaccataacatacaacaagaaagtcgtacattttgtaaggaggaatttggattaacatctttaggaaacacgagttttacagacttttcttgcaaacatcctagagaactgcgagaaaagattcctgttaagcagcccaggatctgctctgaaaccaggtctctaagtgaacatttctcaggcatggatgcatttgagagtcaaattgttgagtcgaagatgaaaacctcttcatcacatagctcagaagctggcaaatctggctgtgacttcaagcatgccccaccaacctatgaggatgtcattgctggacatattttagatatctctgattcacctaaagaagtaagaaaaaattttcaaaagacgtggcaagagagtggaagagtttttaaaggcctgggatatgcaaccgcagatgcttctgcaactgagatgagaaccaccttccaagaggaatctgcatttataagtgaagctgctgctccaagacaaggaaatatgtatactttgtcaaaagacagtttatccaatggagtgcctagtggcagacaagcagaattttcataagtcctgcttccgatgccaccattgcaacagtaaactaagtttgggaaattatgcatcacttcatggacaaatatactgtaaacctcactttaaacaacttttcaaatccaaaggaaattatgatgaaggttttggacataagcagcataaagatagatggaactgcaaaaaccaaagcagatcagtggactttattcctaatgaagaaccaaatatgtgtaaaaatattgcagaaaacacccttgtacctggagatcgtaatgaacatttagatgctggtaacagtgaagggcaaaggaatgatttgagaaaattaggggaaaggggaaaattaaaagtcatttggcctccttccaaggagatccctaagaaaaccttaccctttgaggaagagctcaaaatgagtaaacctaagtggccacctgaaatgacaaccctgctatcccctgaatttaaaagtgaatctctgctagaagatgttagaactccagaaaataaaggacaaagacaagatcactttccatttttgcagccttatctacagtccacccatgtttgtcagaaagaggatgttataggaatcaaagaaatgaaaatgcctgaaggaagaaaagatgaaaagaaggaaggaaggaagaatgtgcaagataggccgagtgaagctgaagacacaaagagtaacaggaaaagtgctatggatcttaatgacaacaataatgtgattgtgcagagtgctgaaaaggagaaaaatgaaaaaactaaccaaactaatggtgcagaagttttacaggttactaacactgatgatgagatgatgccagaaaatcataaagaaaatttgaataagaataataataacaattatgtagcagtctcatatctgaataattgcaggcagaagacatctattttagaatttcttgatctattacccttgtcgagtgaagcaaatgacactgcaaatgaatatgaaattgagaagttagaaaatacatctagaatctcagagttacttggtatatttgaatctgaaaagacttattcgaggaatgtactagcaatggctctgaagaaacagactgacagagcagctgctggcagtcctgtgcagcctgctccaaaaccaagcctcagcagaggccttatggtaaaggggggaagttcaatcatctctcctgatacaaatctcttaaacattaaaggaagccattcaaagagcaaaaatttacactttttcttttctaacaccgtgaaaatcactgcattttccaagaaaaatgagaacattttcaattgtgatttaatagattctgtagatcaaattaaaaatatgccatgcttggatttaagggaatttggaaaggatgttaaaccttggcatgttgaaacaacagaagctgcccgcaataatgaaaacacaggttttgatgctctgagccatgaatgtacagctaagcctttgtttcccagagtggaggtgcagtcagaacaactcacggtggaagagcagattaaaagaaacaggtgctacagtgacactgagtaaaatatctatggccactgacagtccacacttaggcactgagagatattgatgttctgaaataagattttatgaatttggatacccttttgaggaacttgatgtaaacatggtgttcagaaatctcgtgtctatctcaatgggatatttcttgtattacaccttgtcatttttttcacaatttatttacatctacttttgtttgaactggaatgaagagatgaaacactatggatatgttttccattcaaatggcactttagcatattgttctgttttcctgtaaaacatcatgggtgtgatttttatactgctgctgcttgtcacaattattataacttctctgtaatttcctctgaaataaaattgaatcacctgaggtgcaaacc

SEQ ID NO: 2574 - protein, 1729 aa, Homo sapiens
MTEPQSTFGKIPKEEIIKGDLTSTLNSLSQAVNQKTVTKTEEIIKGNMLATLKSLKESSHRWKESKQPDAIPGDIEKAIECLEKATNTKTEILKKELLKDDLETSLRSLKEAQRSFKEVHKEGVIKKDAKAVMAGSSGEQKTDIHQVAVQRNKNSLLQPKPGPFEPAAKWQGGADTLSQTMGKSCHGNLVEERTEVNLPKAPKGTVKIVIDREQNNDALEKSLRRLSNSHHKSNVLESGDKTGVWTDTTGEQHLRDEYMSRQLTSTVSVKNNLTTKESDRAVRELKKDDVFNSIQSAGKTVGKQQTYELRNDHQKMEGFHIKSPKKTKNIKILTDTQSSKPSPTQHPVSMPVGGTYDLSGDFQKQTLLKQETKYSNKDIKKKNINLQPMWQLLPVEQDTSNVTEMKVSEKSHNTFKATNKKRETDVHLKSQDFLMKTNTSTGLKMAMERSLNPINFNPENNVKESECPLPPPSPPPPPPSNASSEIEFPLPPPPPLMMFPEKNGFLPSLSTEKIKAEFESFPGLPLPPPPVDEKSERESSSMFLPPPPPPTPSQKPAHLLSSSAPEKHSGDFMQQYSQKEASNSQNSQAKIITGKTGVLPPPTLPKPKLPKHIKDNKNDFSPKVELATSLSDMECKITTSKDQKKVMVMTSSEHTETKQNVISKSLDERKQLSIDSANCLSHTVPGTSAPRKKQIAPLIKSHSFPESSGQQNPKPYMRKFKTPLMIAEEKYRQQKEEIEKQKQESSYYNIVKTQSQNQHITEVEKEMPLQKTNEEVSLSGIDSECTVVQPSPGSQSNARILGVCSDNQLSTTSPETVAAKRLHHVLAASEDKDKMKKEVLQSSRDIMQSKSACEIKQSHQECSTQQTQQKKYLEQLHLPQSKPISPNFKVKTIKLPTLDHTLNETDHSYESHKQQSEIDVQTFTKKQYLKTKKTEASTECSHKQSLAERHYQLPKKEKRVTVQLPTESIQKNQEDKLKMVPRKQREFSGSDRGKLPGSEEKNQGPSMIGRKEERLITERKHEHLKNKSAPKVVKQKVIDAHLDSQTQNFQQTQIQTAESKAEHKKLPQPYNSLQEEKCLEVKGIQEKQVFSNTKDSKQEITQNKSFFSSVKESQRDDGKGALNIVEFLRKREELQQILSRVKQFEAEPNKSGLKTFQTLLNTIPGWLISEDKREYAVHIAMENNLEKVKEEITHIKTQAEDMLVSYENIIQTAMMSSKTGKPGNKPTSLDETSSKVSNVHVSNNKNSEQKENKIAKEKTVQHQVAAHHEATVRSHVKTHQEIKLDDSNIPPPSLKTRPPSPTFITIESTARRTENPTKNELSQSPKKDSYVEPPPRRPMSQKSEIHRANTSPSPPRSRSEQLVRLKDTTAKLSKGAIPCPAATPVPIVEKRSEIIMSPATLRRQIKIETRGRDSPPTITIPVNINHAASGSFRESVDAQEEIRKVEKRATYVHKDGLNSTDHMVPDTESYDAVEIIRKVAVPPRLSEHTQRYEAANRTVQMAENFVNDPENEINRWFREFEHGPVSEAKSNRRVYAKGETNHNIQQESRTFCKEEFGLTSLGNTSFTDFSCKHPRELREKIPVKQPRICSETRSLSEHFSGMDAFESQIVESKMKTSSSHSSEAGKSGCDFKHAPPTYEDVIAGHILDISDSPKEVRKNFQKTWQESGRVFKGLGYATADASATEMRTTFQEESAFISEAAAPRQGNMYTLSKDSLSNGVPSGRQAEFS

SEQ ID NO: 2575 - DNA, 7597 bp, Homo sapiens
gaaggagagaaagaaatcattggtggtgatgttgaaggtacaaaactgttactgaagaaaaggcagtctctggttgaacgtactgttagtgaaactgacatcatccctggagatgtgcataacacagttaaggtttttatgaccgagcctcagagtacatttggtaagatacccaaagaagagattataaaaggtgatttgacatcaaccctaaattccctcagccaggctgtaaatcagaaaacagtgacgaaaacagaagaaattataaaaggtaacatgctagccacactcaagtcacttaaagaatcaagccatcgatggaaagaatctaaacagcctgatgccatccctggtgatattgaaaaagctattgaatgccttgaaaaagctacaaatacaaagacagaaattctgaaaaaggagcttctcaaagatgacctggaaacatcactaaggtctttgaaagaagcacaaagaagtttcaaagaggtacataaagaaggtgtaataaaaaaagatgctaaagctgtgatggcaggatcctcgggagagcagaaaacagatattcatcaggttgctgtccagaggaacaaaaatagtcttcttcagccaaagccaggtccatttgagccagcggccaagtggcaagggggagcagatactctcagtcaaactatggggaaatcttgccatggcaatttagtagaagaaagaactgaggttaatcttccaaaagcccccaaaggcactgtaaagattgtcatagatcgtgaacaaaacaatgatgctctggagaaaagccttagaagactatctaattcacaccataaatctaatgttttggaatcaggagacaaaacgggtgtctggactgatactacaggagaacagcatcttagagatgaatatatgagcagacaattaacttcaactgtgtcagttaagaataatctaacaactaaagaatcagacagggcagtgagagagctgaagaaggatgatgtctttaattccatccaatctgctggtaaaaccgttggaaagcaacagacatatgaactgagaaatgaccaccagaaaatggagggttttcatataaagagtcctaaaaagaccaaaaatattaaaatattaactgatacacaaagctccaagcccagtcccacccagcatccagtcagcatgccagttggaggaacttacgacctttcaggggactttcagaagcaaactttgttaaagcaagaaacaaaatattctaataaggatataaagaaaaagaatataaaccttcaaccaatgtggcagcttttgcctgtagagcaagacacatccaatgtaacagaaatgaaagtctctgaaaaaagtcacaatacatttaaggcaaccaacaaaaagcgggagactgatgttcacttgaaaagccaggactttctaatgaaaacaaatacttccacaggcttaaaaatggcaatggaaaggtccttgaatccaatcaactttaaccctgagaataatgtaaaagaaagtgagtgcccccttccacctccatctccacctcctccaccaccttctaatgcatcatctgaaattgaatttcctcttcctcctccacctcctttgatgatgtttcctgaaaaaaatgggtttcttccctcactgtccacagagaagataaaggctgaatttgaaagttttccaggcctccctcttcctccacctccagtagatgagaaatctgaaagagaaagttcatcgatgtttctgccgcctcctcctcctccaactccatctcaaaagccagcacatctcctttcctcctctgctccggaaaagcacagtggagacttcatgcaacaatattcccaaaaagaagcctcgaactctcagaattctcaggctaaaatcataacaggaaaaaccggtgtgttgccacctcccacattgcccaaacccaaacttcccaagcatataaaagataataagaacgatttttcccccaaagttgaactggcaacctccctgtcagatatggaatgtaaaattactacctcaaaggatcagaaaaaagtaatggtgatgaccagcagtgaacacacggagacaaagcagaacgttattagtaagagtcttgatgaaagaaaacaattatctattgactctgcaaactgtctctcacacacagttccaggaacttcagcacccaggaaaaaacagattgcgcctcttataaaatctcattcatttccagagagttcaggacaacaaaatccaaaaccttatatgagaaaatttaagacacctttaatgattgctgaagaaaaatatagacaacaaaaagaagaaattgaaaaacagaaacaggagagttcttactacaacattgttaaaactcaaagccaaaatcaacacataacagaggtggaaaaggaaatgccattacaaaaaaccaatgaggaggtttccctatctggaattgattcagaatgcactgtggttcaacccagcccaggctctcaaagtaatgctcggatactaggagtgtgttctgataaccaactctccacaacatcgccagaaacagtcgctgccaagaggctccaccatgttttagcagcttcagaagacaaagataagatgaaaaaggaagttttacaaagctcaagggacattatgcaatccaaatcagcttgcgaaattaaacaaagtcaccaagaatgtagtacccaacaaacacaacagaagaagtatttggagcagttgcacttgccccaaagcaaaccaatttccccaaatttcaaagttaaaaccatcaaacttccaactctagatcatacattaaatgaaacagaccacagctatgaaagtcataaacagcaatctgagattgatgttcaaacctttaccaaaaaacaatatctgaaaaccaagaaaactgaagcaagcactgaatgtagtcataagcaatctctggctgaaagacattatcagttacctaagaaggagaaaagagtgacagtacaattgcctacagaatccatacagaagaaccaggaagataagctcaagatggttcccaggaagcaaagagaatttagcggatctgacagagggaaacttccaggaagtgaagaaaaaaatcagggaccatcaatgattggtcgaaaagaagagagattaataactgaaagaaaacacgaacatctgaagaataaatcagcaccaaaggtcgtcaagcaaaaggttatcgatgcacatcttgattcacagactcagaattttcagcaaacacaaatacagaccgctgaaagtaaagctgaacataaaaaattgccccagccatataatagtctgcaggaagaaaaatgtctcgaagtcaagggcatacaagagaaacaagtcttctctaatactaaagattcaaagcaagagattacacagaacaaatctttcttttcctctgtgaaagaatcccagcgggatgatggaaaaggtgccttaaatatagtggaattcttgagaaaacgtgaagaactgcaacagattttgtcgagagtgaaacagtttgaagcagagccaaataaaagtggccttaaaacatttcagacactattaaatactatcccaggatggctgataagtgaagataagagagaatatgcagttcacattgccatggagaataatttagaaaaagtaaaagaagaaataacacatattaaaactcaagcggaagatatgcttgtgtcctatgaaaatataattcagacagccatgatgtcctccaaaacaggaaaaccgggaaataaacccactagtcttgatgaaacatcatccaaagtatctaatgttcatgtcagcaataataaaaatagtgaacagaaagaaaataaaattgccaaagagaaaacagtacagcaccaagtagcagctcatcatgaagcaactgttcgtagtcacgtgaaaacccatcaggaaattaaacttgatgatagcaacattcctcctccctctttaaaaacacgcccaccgtcaccaacttttatcacaatagaatctactgcccgacgaacagaaaaccctactaagaacgagctttctcagtcccctaaaaaggacagttatgttgaacccccaccaagaaggcccatgtcgcaaaaatctgaaattcacagagcaaacacttccccttctccacccaggagtcgctctgaacaacttgtcagactcaaagacaccactgcaaagttatccaaaggggccatcccatgtccagcagcaaccccggttccaattgtagagaagaggtctgaaatcatcatgtctcctgcaacacttcgtcgtcaaattaagatagaaactcgtggtagggactctccacctacaatcacaataccagtaaatataaatcatgctgctagtggttccttcagagaatctgtggacgctcaagaggaaatcaggaaagtggagaagagagctacttatgttcataaagatggactaaattccactgatcacatggtgcccgacactgaaagttatgatgcagttgaaatcatccgcaaggttgcagtgcctcctcgcctgtcagagcacacacagagatatgaagcggccaaccgaactgttcaaatggctgaaaatttcgtgaatgaccctgaaaatgaaataaacagatggttcagggaatttgagcatggcccagtttctgaagcaaagtcaaatagaagagtttatgcaaagggagaaacaaaccataacatacaacaagaaagtcgtacattttgtaaggaggaatttggattaacatctttaggaaacacgagttttacagacttttcttgcaaacatcctagagaactgcgagaaaagattcctgttaagcagcccaggatctgctctgaaaccaggtctctaagtgaacatttctcaggcatggatgcatttgagagtcaaattgttgagtcgaagatgaaaacctcttcatcacatagctcagaagctggcaaatctggctgtgacttcaagcatgccccaccaacctatgaggatgtcattgctggacatattttagatatctctgattcacctaaagaagtaagaaaaaattttcaaaagacgtggcaagagagtggaagagtttttaaaggcctgggatatgcaaccgcagatgcttctgcaactgagatgagaaccaccttccaagaggaatctgcatttataagtgaagctgctgctccaagacaaggaaatatgtatactttgtcaaaagacagtttatccaatggagtgcctagtggcagacaagcagaattttcataagtcctgcttccgatgccaccattgcaacagtaaactaagtttgggaaattatgcatcacttcatggacaaatatactgtaaacctcactttaaacaacttttcaaatccaaaggaaattatgatgaaggttttggacataagcagcataaagatagatggaactgcaaaaaccaaagcagatcagtggactttattcctaatgaagaaccaaatatgtgtaaaaatattgcagaaaacacccttgtacctggagatcgtaatgaacatttagatgctggtaacagtgaagggcaaaggaatgatttgagaaaattaggggaaaggggaaaattaaaagtcatttggcctccttccaaggagatccctaagaaaaccttaccctttgaggaagagctcaaaatgagtaaacctaagtggccacctgaaatgacaaccctgctatcccctgaatttaaaagtgaatctctgctagaagatgttagaactccagaaaataaaggacaaagacaagatcactttccatttttgcagccttatctacagtccacccatgtttgtcagaaagaggatgttataggaatcaaagaaatgaaaatgcctgaaggaagaaaagatgaaaagaaggaaggaaggaagaatgtgcaagataggccgagtgaagctgaagacacaaagagtaacaggaaaagtgctatggatcttaatgacaacaataatgtgattgtgcagagtgctgaaaaggagaaaaatgaaaaaactaaccaaactaatggtgcagaagttttacaggttactaacactgatgatgagatgatgccagaaaatcataaagaaaatttgaataagaataataataacaattatgtagcagtctcatatctgaataattgcaggcagaagacatctattttagaatttcttgatctattacccttgtcgagtgaagcaaatgacactgcaaatgaatatgaaattgagaagttagaaaatacatctagaatctcagagttacttggtatatttgaatctgaaaagacttattcgaggaatgtactagcaatggctctgaagaaacagactgacagagcagctgctggcagtcctgtgcagcctgctccaaaaccaagcctcagcagaggccttatggtaaaggggggaagttcaatcatctctcctgatacaaatctcttaaacattaaaggaagccattcaaagagcaaaaatttacactttttcttttctaacaccgtgaaaatcactgcattttccaagaaaaatgagaacattttcaattgtgatttaatagattctgtagatcaaattaaaaatatgccatgcttggatttaagggaatttggaaaggatgttaaaccttggcatgttgaaacaacagaagctgcccgcaataatgaaaacacaggttttgatgctctgagccatgaatgtacagctaagcctttgtttcccagagtggaggtgcagtcagaacaactcacggtggaagagcagattaaaagaaacaggtgctacagtgacactgagtaaaatatctatggccactgacagtccacacttaggcactgagagatattgatgttctgaaataagattttatgaatttggatacccttttgaggaacttgatgtaaacatggtgttcagaaatctcgtgtctatctcaatgggatatttcttgtattacaccttgtcatttttttcacaatttatttacatctacttttgtttgaactggaatgaagagatgaaacactatggatatgttttccattcaaatggcactttagcatattgttctgttttcctgtaaaacatcatgggtgtgatttttatactgctgctgcttgtcacaattattataacttctctgtaatttcctctgaaataaaattgaatcacctgaggtgcaaaccaaaatacttctgtaactttttttgatatatactgtcattctaagtacatatactccttgtgacttgggaagtatttgtcttgaggcaagtatttaccacccacactaaaataatgctggaaaaaataaaatactaaactgaaggcacagtattattagaaagtgtaacattttcattttctcttttactctacattttaaagatacgagggttattgttcttgaaataattacctatattaaattatcatagaatgtgtctataaacatttgacgaaaaatgttgattttcctccagaataatgtgaagtccatactcagaaattaactagaaaggt

SEQ ID NO: 2576 - protein, 1729 aa, Homo sapiens; identical to SEQ ID NO: 2574

SEQ ID NO: 2577 - DNA, 1466 bp, Homo sapiens
gaaaacagaagaaattataaaaggtaacatgctagccacactcaagtcacttaaagaatcaagccatcgatggaaagaatctaaacagcctgatgccatccctggtgatattgaaaaagctattgaatgccttgaaaaagctacaaatacaaagacagaaattctgaaaaaggagcttctcaaagatgacctggaaacatcactaaggtctttgaaagaagcacaaagaagtttcaaagaggtacataaagaaggtgtaataaaaaaagatgctaaagctgtgatggcaggatcctcgggagagcagaaaacagatattcatcaggttgctgtccagaggaacaaaaatagtcttcttcagccaaagccaggtccatttgagccagcggccaagtggcaagggggagcagatactctcagtcaaactatggggaaatcttgccatggcaatttagtagaagaaagaactgaggttaatcttccaaaagcccccaaaggcactgtaaagattgtcatagatcgtgaacaaaacaatgatgctctggagaaaagccttagaagactatctaattcacaccataaatctaatgttttggaatcaggagacaaaacgggtgtctggactgatactacaggagaacagcatcttagagatgaatatatgagcagacaattaacttcaactgtgtcagttaagaataatctaacaactaaagaatcagacagggcagtgagagagctgaagaaggatgatgtctttaattccatccaatctgctggtaaaaccgttggaaagcaacagacatatgaactgagaaatgaccaccagaaaatggagggttttcatataaagagtcctaaaaagaccaaaaatattaaaatattaactgatacacaaagctccaagcccagtcccacccagcatccagtcagcatgccagttggaggaacttacgacctttcaggggactttcagaagcaaactttgttaaagcaagaaacaaaatattctaataaggatataaagaaaaagaatataaaccttcaaccaatgtggcagcttttgcctgtagagcaagacacatccaatgtaacagaaatgaaagtctctgaaaaaagtcacaatacatttaaggcaaccaacaaaaagcgggagactgatgttcacttgaaaagccaggactttctaatgaaaacaaatacttccacaggcttaaaaatggcaatggaaaggtccttgaatccaatcaactttaaccctgaaaaaaatgggtttcttccctcactgtccacagagaagataaaggctgaatttgaaagttttccaggcctccctcttcctccacctccagtagatgagaaatctgaaagagaaagttcatcgatgtttctgccgcctcctcctcctccaactccatctcaaaagccagcacatctcctttcctcctctgctccggaaaagcaca

SEQ ID NO: 2578 - protein, 478 aa, Homo sapiens
MLATLKSLKESSHRWKESKQPDAIPGDIEKAIECLEKATNTKTEILKKELLKDDLETSLRSLKEAQRSFKEVHKEGVIKKDAKAVMAGSSGEQKTDIHQVAVQRNKNSLLQPKPGPFEPAAKWQGGADTLSQTMGKSCHGNLVEERTEVNLPKAPKGTVKIVIDREQNNDALEKSLRRLSNSHHKSNVLESGDKTGVWTDTTGEQHLRDEYMSRQLTSTVSVKNNLTTKESDRAVRELKKDDVFNSIQSAGKTVGKQQTYELRNDHQKMEGFHIKSPKKTKNIKILTDTQSSKPSPTQHPVSMPVGGTYDLSGDFQKQTLLKQETKYSNKDIKKKNINLQPMWQLLPVEQDTSNVTEMKVSEKSHNTFKATNKKRETDVHLKSQDFLMKTNTSTGLKMAMERSLNPINFNPEKNGFLPSLSTEKIKAEFESFPGLPLPPPPVDEKSERESSSMFLPPPPPPTPSQKPAHLLSSSAPEK

SEQ ID NO: 2579 - DNA, 3508 bp, Homo sapiens
gaaaacagaagaaattataaaaggtaacatgctagccacactcaagtcacttaaagaatcaagccatcgatggaaagaatctaaacagcctgatgccatccctggtgatattgaaaaagctattgaatgccttgaaaaagctacaaatacaaagacagaaattctgaaaaaggagcttctcaaagatgacctggaaacatcactaaggtctttgaaagaagcacaaagaagtttcaaagaggtacataaagaaggtgtaataaaaaaagatgctaaagctgtgatggcaggatcctcgggagagcagaaaacagatattcatcaggttgctgtccagaggaacaaaaatagtcttcttcagccaaagccaggtccatttgagccagcggccaagtggcaagggggagcagatactctcagtcaaactatggggaaatcttgccatggcaatttagtagaagaaagaactgaggttaatcttccaaaagcccccaaaggcactgtaaagattgtcatagatcgtgaacaaaacaatgatgctctggagaaaagccttagaagactatctaattcacaccataaatctaatgttttggaatcaggagacaaaacgggtgtctggactgatactacaggagaacagcatcttagagatgaatatatgagcagacaattaacttcaactgtgtcagttaagaataatctaacaactaaagaatcagacagggcagtgagagagctgaagaaggatgatgtctttaattccatccaatctgctggtaaaaccgttggaaagcaacagacatatgaactgagaaatgaccaccagaaaatggagggttttcatataaagagtcctaaaaagaccaaaaatattaaaatattaactgatacacaaagctccaccatgttttagcagcttcagaagacaaagataagatgaaaaaggaagttttacaaagctcaagggacattatgcaatccaaatcagcttgcgaaattaaacaaagtcaccaagaatgtagtacccaacaaacacaacagaagaagtatttggagcagttgcacttgccccaaagcaaaccaatttccccaaatttcaaagttaaaaccatcaaacttccaactctagatcatacattaaatgaaacagaccacagctatgaaagtcataaacagcaatctgagattgatgttcaaacctttaccaaaaaacaatatctgaaaaccaagaaaactgaagcaagcactgaatgtagtcataagcaatctctggctgaaagacattatcagttacctaagaaggagaaaagagtgacagtacaattgcctacagaatccatacagaagaaccaggaagataagctcaagatggttcccaggaagcaaagagaatttagcggatctgacagagggaaacttccaggaagtgaagaaaaaaatcagggaccatcaatgattggtcgaaaagaagagagattaataactgaaagaaaacacgaacatctgaagaataaatcagcaccaaaggtcgtcaagcaaaaggttatcgatgcacatcttgattcacagactcagaattttcagcaaacacaaatacagaccgctgaaagtaaagctgaacataaaaaattgccccagccatataatagtctgcaggaagaaaaatgtctcgaagtcaagggcatacaagagaaacaagtcttctctaatactaaagattcaaagcaagagattacacagaacaaatctttcttttcctctgtgaaagaatcccagcgggatgatggaaaaggtgccttaaatatagtggaattcttgagaaaacgtgaagaactgcaacagattttgtcgagagtgaaacagtttgaagcagagccaaataaaagtggccttaaaacatttcagacactattaaatactatcccaggatggctgataagtgaagataagagagaatatgcagttcacattgccatggagaataatttagaaaaagtaaaagaagaaataacacatattaaaactcaagcggaagatatgcttgtgtcctatgaaaatataattcagacagccatgatgtcctccaaaacaggaaaaccgggaaataaacccactagtcttgatgaaacatcatccaaagtatctaatgttcatgtcagcaataataaaaatagtgaacagaaagaaaataaaattgccaaagagaaaacagtacagcaccaagtagcagctcatcatgaagcaactgttcgtagtcacgtgaaaacccatcaggaaattaaacttgatgatagcaacattcctcctccctctttaaaaacacgcccaccgtcaccaacttttatcacaatagaatctactgcccgacgaacagaaaaccctactaagaacgagctttctcagtcccctaaaaaggacagttatgttgaacccccaccaagaaggcccatgtcgcaaaaatctgaaattcacagagcaaacacttccccttctccacccaggagtcgctctgaacaacttgtcagactcaaagacaccactgcaaagttatccaaaggggccatcccatgtccagcagcaaccccggttccaattgtagagaagaggtctgaaatcatcatgtctcctgcaacacttcgtcgtcaaattaagatagaaactcgtggtagggactctccacctacaatcacaataccagtaaatataaatcatgctgctagtggttccttcagagaatctgtggacgctcaagaggaaatcaggaaagtggagaagagagctacttatgttcataaagatggactaaattccactgatcacatggtgcccgacactgaaagttatgatgcagttgaaatcatccgcaaggttgcagtgcctcctcgcctgtcagagcacacacagagatatgaagcggccaaccgaactgttcaaatggctgaaaatttcgtgaatgaccctgaaaatgaaataaacagatggttcagggaatttgagcatggcccagtttctgaagcaaagtcaaatagaagagtttatgcaaagggagaaacaaaccataacatacaacaagaaagtcgtacattttgtaaggaggaatttggattaacatctttaggaaacacgagttttacagacttttcttgcaaacatcctagagaactgcgagaaaagattcctgttaagcagcccaggatctgctctgaaaccaggtctctaagtgaacatttctcaggcatggatgcatttgagagtcaaattgttgagtcgaagatgaaaacctcttcatcacatagctcagaagctggcaaatctggctgtgacttcaagcatgccccaccaacctatgaggatgtcattgctggacatattttagatatctctgattcacctaaagaagtaagaaaaaattttcaaaagacgtggcaagagagtggaagagtttttaaaggcctgggatatgcaaccgcagatgcttctgcaactgagatgagaaccaccttcc

SEQ ID NO: 2580 - protein, 295 aa, Homo sapiens
MLATLKSLKESSHRWKESKQPDAIPGDIEKAIECLEKATNTKTEILKKELLKDDLETSLRSLKEAQRSFKEVHKEGVIKKDAKAVMAGSSGEQKTDIHQVAVQRNKNSLLQPKPGPFEPAAKWQGGADTLSQTMGKSCHGNLVEERTEVNLPKAPKGTVKIVIDREQNNDALEKSLRRLSNSHHKSNVLESGDKTGVWTDTTGEQHLRDEYMSRQLTSTVSVKNNLTTKESDRAVRELKKDDVFNSIQSAGKTVGKQQTYELRNDHQKMEGFHIKSPKKTKNIKILTDTQSSTMF

SEQ ID NO: 2581 - DNA, 3963 bp, Homo sapiens
tgcccaaacccaaacttcccaagcatataaaagataataagaacgatttttcccccaaagttgaactggcaacctccctgtcagatatggaatgtaaaattactacctcaaaggatcagaaaaaagtaatggtgatgaccagcagtgaacacacggagacaaagcagaacgttattagtaagagtcttgatgaaagaaaacaattatctattgactctgcaaactgtctctcacacacagttccaggaacttcagcacccaggaaaaaacagattgcgcctcttataaaatctcattcatttccagagagttcaggacaacaaaatccaaaaccttatatgagaaaatttaagacacctttaatgattgctgaagaaaaatatagacaacaaaaagaagaaattgaaaaacagaaacaggagagttcttactacaacattgttaaaactcaaagccaaaatcaacacataacagaggtggaaaaggaaatgccattacaaaaaaccaatgaggaggtttccctatctggaattgattcagaatgcactgtggttcaacccagcccaggctctcaaagtaatgctcggatactaggagtgtgttctgataaccaactctccacaacatcgccagaaacagtcgctgccaagaggctccaccatgttttagcagcttcagaagacaaagataagatgaaaaaggaagttttacaaagctcaagggacattatgcaatccaaatcagcttgcgaaattaaacaaagtcaccaagaatgtagtacccaacaaacacaacagaagaagtatttggagcagttgcacttgccccaaagcaaaccaatttccccaaatttcaaagttaaaaccatcaaacttccaactctagatcatacattaaatgaaacagaccacagctatgaaagtcataaacagcaatctgagattgatgttcaaacctttaccaaaaaacaatatctgaaaaccaagaaaactgaagcaagcactgaatgtagtcataagcaatctctggctgaaagacattatcagttacctaagaaggagaaaagagtgacagtacaattgcctacagaatccatacagaagaaccaggaagataagctcaagatggttcccaggaagcaaagagaatttagcggatctgacagagggaaacttccaggaagtgaagaaaaaaatcagggaccatcaatgattggtcgaaaagaagagagattaataactgaaagaaaacacgaacatctgaagaataaatcagcaccaaaggtcgtcaagcaaaaggttatcgatgcacatcttgattcacagactcagaattttcagcaaacacaaatacagaccgctgaaagtaaagctgaacataaaaaattgccccagccatataatagtctgcaggaagaaaaatgtctcgaagtcaagggcatacaagagaaacaagtcttctctaatactaaagattcaaagcaagagattacacagaacaaatctttcttttcctctgtgaaagaatcccagcgggatgatggaaaaggtgccttaaatatagtggaattcttgagaaaacgtgaagaactgcaacagattttgtcgagagtgaaacagtttgaagcagagccaaataaaagtggccttaaaacatttcagacactattaaatactatcccaggatggctgataagtgaagataagagagaatatgcagttcacattgccatggagaataatttagaaaaagtaaaagaagaaataacacatattaaaactcaagcggaagatatgcttgtgtcctatgaaaatataattcagacagccatgatgtcctccaaaacaggaaaaccgggaaataaacccactagtcttgatgaaacatcatccaaagtatctaatgttcatgtcagcaataataaaaatagtgaacagaaagaaaataaaattgccaaagagaaaacagtacagcaccaagtagcagctcatcatgaagcaactgttcgtagtcacgtgaaaacccatcaggaaattaaacttgatgatagcaacattcctcctccctctttaaaaacacgcccaccgtcaccaacttttatcacaatagaatctactgcccgacgaacagaaaaccctactaagaacgagctttctcagtcccctaaaaaggacagttatgttgaacccccaccaagaaggcccatgtcgcaaaaatctgaaattcacagagcaaacacttccccttctccacccaggagtcgctctgaacaacttgtcagactcaaagacaccactgcaaagttatccaaaggggccatcccatgtccagcagcaaccccggttccaattgtagagaagaggtctgaaatcatcatgtctcctgcaacacttcgtcgtcaaattaagatagaaactcgtggtagggactctccacctacaatcacaataccagtaaatataaatcatgctgctagtggttccttcagagaatctgtggacgctcaagaggaaatcaggaaagtggagaagagagctacttatgttcataaagatggactaaattccactgatcacatggtgcccgacactgaaagttatgatgcagttgaaatcatccgcaaggttgcagtgcctcctcgcctgtcagagcacacacagagatatgaagcggccaaccgaactgttcaaatggctgaaaatttcgtgaatgaccctgaaaatgaaataaacagatggttcagggaatttgagcatggcccagtttctgaagcaaagtcaaatagaagagtttatgcaaagggagaaacaaaccataacatacaacaagaaagtcgtacattttgtaaggaggaatttggattaacatctttaggaaacacgagttttacagacttttcttgcaaacatcctagagaactgcgagaaaagattcctgttaagcagcccaggatctgctctgaaaccaggtctctaagtgaacatttctcaggcatggatgcatttgagagtcaaattgttgagtcgaagatgaaaacctcttcatcacatagctcagaagctggcaaatctggctgtgacttcaagcatgccccaccaacctatgaggatgtcattgctggacatattttagatatctctgattcacctaaagaagtaagaaaaaattttcaaaagacgtggcaagagagtggaagagtttttaaaggcctgggatatgcaaccgcagatgcttctgcaactgagatgagaaccaccttccaagaggaatctgcatttataagtgaagctgctgctccaagacaaggaaatatgtatactttgtcaaaagacagtttatccaatggagtgcctagtggcagacaagcagaattttcataagtcctgcttccgatgccaccattgcaacagtaaactaagtttgggaaattatgcatcacttcatggacaaatatactgtaaacctcactttaaacaacttttcaaatccaaaggaaattatgatgaaggttttggacataagcagcataaagatagatggaactgcaaaaaccaaagcagatcagtggactttattcctaatgaagaaccaaatatgtgtaaaaatattgcagaaaacacccttgtacctggagatcgtaatgaacatttagatgctggtaacagtgaagggcaaaggaatgatttgagaaaattaggggaaaggggaaaattaaaagtcatttggcctccttccaaggagatccctaagaaaaccttaccctttgaggaagagctcaaaatgagtaaacctaagtggccacctgaaatgacaaccctgctatcccctgaatttaaaagtgaatctctgctagaagatgttagaactccagaaaataaaggacaaagacaagatcactttccatttttgcagccttatctacagtccacccatgtttgtcagaaagaggatgttataggaatc

SEQ ID NO: 2582 - protein, 1097 aa, Homo sapiens
MECKITTSKDQKKVMVMTSSEHTETKQNVISKSLDERKQLSIDSANCLSHTVPGTSAPRKKQIAPLIKSHSFPESSGQQNPKPYMRKFKTPLMIAEEKYRQQKEEIEKQKQESSYYNIVKTQSQNQHITEVEKEMPLQKTNEEVSLSGIDSECTVVQPSPGSQSNARILGVCSDNQLSTTSPETVAAKRLHHVLAASEDKDKMKKEVLQSSRDIMQSKSACEIKQSHQECSTQQTQQKKYLEQLHLPQSKPISPNFKVKTIKLPTLDHTLNETDHSYESHKQQSEIDVQTFTKKQYLKTKKTEASTECSHKQSLAERHYQLPKKEKRVTVQLPTESIQKNQEDKLKMVPRKQREFSGSDRGKLPGSEEKNQGPSMIGRKEERLITERKHEHLKNKSAPKVVKQKVIDAHLDSQTQNFQQTQIQTAESKAEHKKLPQPYNSLQEEKCLEVKGIQEKQVFSNTKDSKQEITQNKSFFSSVKESQRDDGKGALNIVEFLRKREELQQILSRVKQFEAEPNKSGLKTFQTLLNTIPGWLISEDKREYAVHIAMENNLEKVKEEITHIKTQAEDMLVSYENIIQTAMMSSKTGKPGNKPTSLDETSSKVSNVHVSNNKNSEQKENKIAKEKTVQHQVAAHHEATVRSHVKTHQEIKLDDSNIPPPSLKTRPPSPTFITIESTARRTENPTKNELSQSPKKDSYVEPPPRRPMSQKSEIHRANTSPSPPRSRSEQLVRLKDTTAKLSKGAIPCPAATPVPIVEKRSEIIMSPATLRRQIKIETRGRDSPPTITIPVNINHAASGSFRESVDAQEEIRKVEKRATYVHKDGLNSTDHMVPDTESYDAVEIIRKVAVPPRLSEHTQRYEAANRTVQMAENFVNDPENEINRWFREFEHGPVSEAKSNRRVYAKGETNHNIQQESRTFCKEEFGLTSLGNTSFTDFSCKHPRELREKIPVKQPRICSETRSLSEHFSGMDAFESQIVESKMKTSSSHSSEAGKSGCDFKHAPPTYEDVIAGHILDISDSPKEVRKNFQKTWQESGRVFKGLGYATADASATEMRTTFQEESAFISEAAAPRQGNMYTLSKDSLSNGVPSGRQAEFS

SEQ ID NO: 2583 - DNA, 2782 bp, Homo sapiens
gggaaataaacccactagtcttgatgaaacatcatccaaagtatctaatgttcatgtcagcaataataaaaatagtgaacagaaagaaaataaaattgccaaagagaaaacagtacagcaccaagtagcagctcatcatgaagcaactgttcgtagtcacgtgaaaacccatcaggaaattaaacttgatgatagcaacattcctcctccctctttaaaaacacgcccaccgtcaccaacttttatcacaatagaatctactgcccgacgaacagaaaaccctactaagaacgagctttctcagtcccctaaaaaggacagttatgttgaacccccaccaagaaggcccatgtcgcaaaaatctgaaattcacagagcaaacacttccccttctccacccaggagtcgctctgaacaacttgtcagactcaaagacaccactgcaaagttatccaaaggggccatcccatgtccagcagcaaccccggttccaattgtagagaagaggtctgaaatcatcatgtctcctgcaacacttcgtcgtcaaattaagatagaaactcgtggtagggactctccacctacaatcacaataccagtaaatataaatcatgctgctagtggttccttcagagaatctgtggacgctcaagaggaaatcaggaaagtggagaagagagctacttatgttcataaagatggatttattcctaatgaagaaccaaatatgtgtaaaaatattgcagaaaacacccttgtacctggagatcgtaatgaacatttagatgctggtaacagtgaagggcaaaggaatgatttgagaaaattaggggaaaggggaaaattaaaagtcatttggcctccttccaaggagatccctaagaaaaccttaccctttgaggaagagctcaaaatgagtaaacctaagtggccacctgaaatgacaaccctgctatcccctgaatttaaaagtgaatctctgctagaagatgttagaactccagaaaataaaggacaaagacaagatcactttccatttttgcagccttatctacagtccacccatgtttgtcagaaagaggatgttataggaatcaaagaaatgaaaatgcctgaaggaagaaaagatgaaaagaaggaaggaaggaagaatgtgcaagataggccgagtgaagctgaagacacaaagagtaacaggaaaagtgctatggatcttaatgacaacaataatgtgattgtgcagagtgctgaaaaggagaaaaatgaaaaaactaaccaaactaatggtgcagaagttttacaggttactaacactgatgatgagatgatgccagaaaatcataaagaaaatttgaataagaataataataacaattatgtagcagtctcatatctgaataattgcaggcagaagacatctattttagaatttcttgatctattacccttgtcgagtgaagcaaatgacactgcaaatgaatatgaaattgagaagttagaaaatacatctagaatctcagagttacttggtatatttgaatctgaaaagacttattcgaggaatgtactagcaatggctctgaagaaacagactgacagagcagctgctggcagtcctgtgcagcctgctccaaaaccaagcctcagcagaggccttatggtaaaggggggaagttcaatcatctctcctgatacaaatctcttaaacattaaaggaagccattcaaagagcaaaaatttacactttttcttttctaacaccgtgaaaatcactgcattttccaagaaaaatgagaacattttcaattgtgatttaatagattctgtagatcaaattaaaaatatgccatgcttggatttaagggaatttggaaaggatgttaaaccttggcatgttgaaacaacagaagctgcccgcaataatgaaaacacaggttttgatgctctgagccatgaatgtacagctaagcctttgtttcccagagtggaggtgcagtcagaacaactcacggtggaagagcagattaaaagaaacaggtgctacagtgacactgagtaaaatatctatggccactgacagtccacacttaggcactgagagatattgatgttctgaaataagattttatgaatttggatacccttttgaggaacttgatgtaaacatggtgttcagaaatctcgtgtctatctcaatgggatatttcttgtattacaccttgtcatttttttcacaatttatttacatctacttttgtttgaactggaatgaagagatgaaacactatggatatgttttccattcaaatggcactttagcatattgttctgttttcctgtaaaacatcatgggtgtgatttttatactgctgctgcttgtcacaattattataacttctctgtaatttcctctgaaataaaattgaatcacctgaggtgcaaaccaaaatacttctgtaactttttttgatatatactgtcattctaagtacatatactccttgtgacttgggaagtatttgtcttgaggcaagtatttaccacccacactaaaataatgctggaaaaaataaaatactaaactgaaggcacagtattattagaaagtgtaacattttcattttctcttttactctacattttaaagatacgagggttattgttcttgaaataattacctatattaaattatcatagaatgtgtctataaacatttgacgaaaaatgttgattttcctccagaataatgtgaagtccatactcagaaattaactagaaaggt

SEQ ID NO: 2584 - protein, 569 aa, Homo sapiens
MSQKSEIHRANTSPSPPRSRSEQLVRLKDTTAKLSKGAIPCPAATPVPIVEKRSEIIMSPATLRRQIKIETRGRDSPPTITIPVNINHAASGSFRESVDAQEEIRKVEKRATYVHKDGFIPNEEPNMCKNIAENTLVPGDRNEHLDAGNSEGQRNDLRKLGERGKLKVIWPPSKEIPKKTLPFEEELKMSKPKWPPEMTTLLSPEFKSESLLEDVRTPENKGQRQDHFPFLQPYLQSTHVCQKEDVIGIKEMKMPEGRKDEKKEGRKNVQDRPSEAEDTKSNRKSAMDLNDNNNVIVQSAEKEKNEKTNQTNGAEVLQVTNTDDEMMPENHKENLNKNNNNNYVAVSYLNNCRQKTSILEFLDLLPLSSEANDTANEYEIEKLENTSRISELLGIFESEKTYSRNVLAMALKKQTDRAAAGSPVQPAPKPSLSRGLMVKGGSSIISPDTNLLNIKGSHSKSKNLHFFFSNTVKITAFSKKNENIFNCDLIDSVDQIKNMPCLDLREFGKDVKPWHVETTEAARNNENTGFDALSHECTAKPLFPRVEVQSEQLTVEEQIKRNRCYSDTE

SEQ ID NO: 2585 - DNA, 462 bp, Homo sapiens
atcttggctcctctgttattcttaaaatcataatcaacttcaaggttctctgaatctgttgtaaacttgatttttcttttcatcttctccatgttattttatctaaatgatctgttttcaaaattagctttaaaggtagtttttctgataaccaaagacttgtctttttcaggttgtcacacactgtcttcattctccctatgatgaaaatttctgcactccttttagggagcatctgtgtcttcacaaaatccctccactcctggactgagcagctcttgaagcgtttctaatgggtccgcggggcgcgtggtctccggccgctgggctggcgcgcgggccacagggacgctgcagccagggtcccgaagatgctgctgctccgctgccgctgccccgatccccggcgccagcatcacttctctgccgcccccgcctcctcgtgctccgctctctcggccg

SEQ ID NO: 2586 - protein, 55 aa, Homo sapiens
MGPRGAWSPAAGLARGPQGRCSQGPEDAAAPLPLPRSPAPASLLCRPRLLVLRSL

SEQ ID NO: 2587 - DNA, 1879 bp, Homo sapiens
atgcgaggttttctactcaggctgtttgagaagcaaatttttccattgtgtatatgtgagaaagtgcctactactcctttgctctccaacactcagaaaatgctctgcaaatccatgaacacagaaggctgcttatctatttcactggagctaaaaatgttcaacagccacatccttgaccttggagatctctaagctcagaggcccttggagatctttccacaggatctcctgccccagtttcagaatagtgggagtcaggggagactggaacagagatgacaattgcagctgggcaggaaggccctgagggcacttagcagtcaccctggagttgtaaatggcagagcctcgccagctacagacccgccagccagttgcacagcatacatcaaaggctcgagatgcccggctgtgggtttaaatggagcccaggtgtagcctgcaaactccctctcttctcccccactgagctacacctccactttacacgctgagcttggcaacctcagcacgaccaaggctgtggggtcagagttgctctcagtcttgccagctaggaacgctcagttaggcttggtgattagaacccaccctatgaatagagcagagatgctgtgttagaccaactactgttccagaatcaagtgattcggatcatgtgtgtaagcaaataaaaagttcaatgttgtgaattgagaaaaaatttacgtacctccttattacaaatttcaagcagaagagataagtacgaagaatacaaaatcacttaaaactccaccatacggaaacaaccatcacaaacattttgttcattttcattccatatatctctcaatgcaaatacacagatggaaaaaagaatggaaggaagaactgaagaatggatggatgggtggaaggatggacagatggacagatagatgggtaggcaggtgagtccgtagatgggcacacaagttatagatgtaattctagaaataatcctacagtacatgttattttgaactgaaaatgtgttccttctctttagaaactattacctgttgctttcttcctgtaagtacaggagtaagatattcttaatgcagaaacctggagatcatagaacacaaactaaaaaatgcactcatattccaccaccagaagattactgttaacatatatgcatacgtatgtatataggtatgttatggactgaatgatatcaccccataattcacgtgtcaaagccctaatcttcaatgtgactgtatttggagacaaggcctttaaagaagtaattaaggttaaatgaggtcataaggcccctaatccagtagggctgatatccttataagaggaggaagagacaccagagatctctctctctctctctccatgtgtgtacagagaaaaggtcatgtgaggacacagtgagaaggtggccgtctgcaagtaaggaagagagccctcaccagaaaccaaccctgttggcactctgatcttagacttccagcctccaaaactgtgagaaaataagtatctgttgtgtgatccatccagcctgtattactttatggcagcccaaacagactcaaacaaaatacaatgtaatatttagcaatgcacctctgtcacctacctccatggtccctttttcagtctttattctgttcagtggccaagggccaaggactccctgtgatgccagcctctgggcaccagaatggaactactcaaaagggcaacagcagccccgcaggcctccccatcctcccacccagtgtaggctcagtaataactgagtcttcatagctacaatgccttgaaccagattttaaaacaaacaaaccatgcatgaaattgatacaaaaaataaaatgctgcttaagtctgt

SEQ ID NO: 2588 - protein, 64 aa, Homo sapiens
MRGFLLRLFEKQIFPLCICEKVPTTPLLSNTQKMLCKSMNTEGCLSISLELKMFNSHILDLGDL

SEQ ID NO: 2589 - DNA, 667 bp, Homo sapiens
atcctcgaagaattacctgtacttgcgaggtgggtaacagtgaacacacgctttctggttctagtaatcctgggtgtttatcacgttcagagaaactcaagctattgcatgattagccccctatctggcaaggaaaccccatacagaagaaacaacaaacctgcgcctgcaccgcctctgcgtcctgggtagtctgtgcttgtaatccagcatgtttcacagagtaagcctgttgtgactttgcttttggggtctatgtcattggtttctgatgcttgtacaaacacgcacacacaaatggataaaacagcacctctggctgttacattaccataaaccatatcacatgcctacattttacaaatgatttctggtttctcttagttcttctctaacatagtactttctttccagcaaaagcaaaatgtgttttcagatttgttactttaataaaggttatccataccaataaaaagtgtacaacacagcattttctgttaaattattattggttttcagttgtaatttggtattttttctggcatgcgtttattaatttattaaattggcttttagaaataaaaaatattgatagcttacttttttctcataagaatattcgggaaaatgtgtttggccatttattaaatactgagtacttcttctg

SEQ ID NO: 2590 - protein, 31 aa, Homo sapiens
MLVQTRTHKWIKQHLWLLHYHKPYHMPTFYK

SEQ ID NO: 2591 - DNA, 1327 bp, Homo sapiens
gtgacaaaactggatgttccctccatccccaaaagtccaagtaaatagtgttgccacattgaaactaagagcctttggaaatctggacttgaaccttaaaaataatttccaaagctgtggacaaggaattacgagaaagcatttcttaccagtttcagagcattatcacaagaatagaattcagtgaaccatttgtatcagttttgtgttatttcttttcttcttggtattcgacttgctattttagaaattatggatccggatgagcaattggaaacccttcatgaagcactgaaactactgccacctgctcactgcgaaaccctccggtacctcatggcacatctaaagagagtgaccctccacgaaaaggagaatcttatgaatgcagagaaccttggaatcgtctttggacccacccttatgagatctccagaactagacgccatggctgcattgaatgatatacggtatcagagactggtggtggagctgcttatcaaaaacgaagacattttattttaaatttttaatttgaggggaaaagaaatgttttacagatgaaggaatgttttatagtaatttaatttgctcctgtagctgcattatttcttgattagaggtttgggcatataaccagattaaagtgaaggaactttctgttgtttttgtagcaccgctcagctgtcttgtaaaacagtgaacacacgctttctggttctagtaatcctgggtgtttatcacgttcagagaaactcaagctattgcatgattagccccctatctggcaaggaaaccccatacagaagaaacaacaaacctgcgcctgcaccgcctctgcgtcctgggtagtctgtgcttgtaatccagcatgtttcacagagtaagcctgttgtgactttgcttttggggtctatgtcattggtttctgatgcttgtacaaacacgcacacacaaatggataaaacagcacctctggctgttacattaccataaaccatatcacatgcctacattttacaaatgatttctggtttctcttagttcttctctaacatagtactttctttccagcaaaagcaaaatgtgttttcagatttgttactttaataaaggttatccataccaataaaaagtgtacaacacagcattttctgttaaattattattggttttcagttgtaatttggtattttttctggcatgcgtttattaatttattaaattggcttttagaaataaaaaatattgatagcttacttttttctcataagaatattcgggaaaatgtgtttggccatttattaaatactgagtacttcttctg

SEQ ID NO: 2592 - protein, 90 aa, Homo sapiens
MDPDEQLETLHEALKLLPPAHCETLRYLMAHLKRVTLHEKENLMNAENLGIVFGPTLMRSPELDAMAALNDIRYQRLVVELLIKNEDILF

SEQ ID NO: 2593 - DNA, 2271 bp, Homo sapiens
gctaggggcttcatagggtgtctgttgctagaaactgattgcaggcagtatgtaggcatctttcattcagaatggacattaatatcttgaatagagaagaaagcttttagaaatgtatcatttgtcaaaattgcatgccttttaaaaaatgataaagagagatgctgagtgttttgtatgttagcatcgactctttctttttatttctgttcagactcaagtttttagaagctagaatatagatccctttaagaaaaaaaaaggaagaaagaagaatttgctggttagtcgacctctgtttaagaagtgcttcatcctcctcctccacctctccgtggtgtttctctgcagctctctgtaggttagggttctgtgctgcctggcagaatgctcatgtgttagctgaatagatatcatcgacagacatagaccactataggttttctttccttgtgaattccaaaatgccatccaaagagtcttggtcagggaggaaaactaatagggctgcagttcacaaatcaaaacaagagggccgtcagcaagatttattgatagcagccttgggaatgaaactgggttctccaaagtcgtctgtgacaatctggcaacctctgaaactctttgcttattcgcagttgacatcacttgttagaagagcaactctgaaagaaaacgagcaaattccaaaatatgaaaagattcacaatttcaaggtgcatacattcagagggccacactggtgtgaatactgtgccaactttatgtggggtctcattgctcagggagtgaaatgtgcagattgtggtttgaatgttcataagcagtgttccaagatggtcccaaatgactgtaagccagacttgaagcatgtcaaaaaggtgtacagctgtgaccttacgacgctcgtgaaagcacataccactaagcggccaatggtggtagacatgtgcatcagggagattgagtctagaggtcttaattctgaaggactataccgagtatcaggatttagtgacctaattgaagatgtcaagatggctttcgacagagatggtgagaaggcagatatttctgtgaacatgtatgaagatatcaacattatcactggtgcacttaaactgtacttcagggatttgccaattccactcattacatatgatgcctaccctaagtttatagaatctgccaaaattatggatccggatgagcaattggaaacccttcatgaagcactgaaactactgccacctgctcactgcgaaaccctccggtacctcatggcacatctaaagagagtgaccctccacgaaaaggagaatcttatgaatgcagagaaccttggaatcgtctttggacccacccttatgagatctccagaactagacgccatggctgcattgaatgatatacggtatcagagactggtggtggagctgcttatcaaaaacgaagacattttattttaaatttttaatttgaggggaaaagaaatgttttacagatgaaggaatgttttatagtaatttaatttgctcctgtagctgcattatttcttgattagaggtttgggcatataaccagattaaagtgaaggaactttctgttgtttttgtagcaccgctcagctgtcttgtaaaacagtgaacacacgctttctggttctagtaatcctgggtgtttatcacgttcagagaaactcaagctattgcatgattagccccctatctggcaaggaaaccccatacagaagaaacaacaaacctgcgcctgcaccgcctctgcgtcctgggtagtctgtgcttgtaatccagcatgtttcacagagtaagcctgttgtgactttgcttttggggtctatgtcattggtttctgatgcttgtacaaacacgcacacacaaatggataaaacagcacctctggctgttacattaccataaaccatatcacatgcctacattttacaaatgatttctggtttctcttagttcttctctaacatagtactttctttccagcaaaagcaaaatgtgttttcagatttgttactttaataaaggttatccataccaataaaaagtgtacaacacagcattttctgttaaattattattggttttcagttgtaatttggtattttttctggcatgcgtttattaatttattaaattggcttttagaaataaaaaatattgatagcttacttttttctcataagaatattcgggaaaatgtgtttggccatttattaaatactgagtacttcttctg

SEQ ID NO: 2594 - protein, 334 aa, Homo sapiens
MPSKESWSGRKTNRAAVHKSKQEGRQQDLLIAALGMKLGSPKSSVTIWQPLKLFAYSQLTSLVRRATLKENEQIPKYEKIHNFKVHTFRGPHWCEYCANFMWGLIAQGVKCADCGLNVHKQCSKMVPNDCKPDLKHVKKVYSCDLTTLVKAHTTKRPMVVDMCIREIESRGLNSEGLYRVSGFSDLIEDVKMAFDRDGEKADISVNMYEDINIITGALKLYFRDLPIPLITYDAYPKFIESAKIMDPDEQLETLHEALKLLPPAHCETLRYLMAHLKRVTLHEKENLMNAENLGIVFGPTLMRSPELDAMAALNDIRYQRLVVELLIKNEDILF

SEQ ID NO: 2595 - DNA, 617 bp, Homo sapiens
atcctcgaagaattacctgtacttgcgaggtgggtaacagtgaacacacgctttctggttctagtaatcctgggtgtttatcacgttcagagaaactcaagctattgcatgattagccccctatctggcaaggaaaccccatacagaagaaacaacaaacctgcgcctgcaccgcctctgcgtcctgggtagtctgtgcttgtaatccagcatgtttcacagagtaagcctgttgtgactttgcttttggggtctatgtcattggtttctgatgcttgtacaaacacgcacacacaaatggataaaacagcacctctggctgttacattaccataaaccatatcacatgcctacattttacaaatgatttctggtttctcttagttcttctctaacatagtactttctttccagcaaaagcaaaatgtgttttcagatttgttactttaataaaggttatccataccaataaaaagtgtacaacacagcattttctgttaaattattattggttttcagttgtaatttggtattttttctggcatgcgtttattaatttattaaattggcttttagaaataaaaaatattgatagcttacttttttctcataagaat

SEQ ID NO: 2596 - protein, 31 aa, Homo sapiens; identical to SEQ ID NO: 2590

SEQ ID NO: 2597 - DNA, 1277 bp, Homo sapiens
gtgacaaaactggatgttccctccatccccaaaagtccaagtaaatagtgttgccacattgaaactaagagcctttggaaatctggacttgaaccttaaaaataatttccaaagctgtggacaaggaattacgagaaagcatttcttaccagtttcagagcattatcacaagaatagaattcagtgaaccatttgtatcagttttgtgttatttcttttcttcttggtattcgacttgctattttagaaattatggatccggatgagcaattggaaacccttcatgaagcactgaaactactgccacctgctcactgcgaaaccctccggtacctcatggcacatctaaagagagtgaccctccacgaaaaggagaatcttatgaatgcagagaaccttggaatcgtctttggacccacccttatgagatctccagaactagacgccatggctgcattgaatgatatacggtatcagagactggtggtggagctgcttatcaaaaacgaagacattttattttaaatttttaatttgaggggaaaagaaatgttttacagatgaaggaatgttttatagtaatttaatttgctcctgtagctgcattatttcttgattagaggtttgggcatataaccagattaaagtgaaggaactttctgttgtttttgtagcaccgctcagctgtcttgtaaaacagtgaacacacgctttctggttctagtaatcctgggtgtttatcacgttcagagaaactcaagctattgcatgattagccccctatctggcaaggaaaccccatacagaagaaacaacaaacctgcgcctgcaccgcctctgcgtcctgggtagtctgtgcttgtaatccagcatgtttcacagagtaagcctgttgtgactttgcttttggggtctatgtcattggtttctgatgcttgtacaaacacgcacacacaaatggataaaacagcacctctggctgttacattaccataaaccatatcacatgcctacattttacaaatgatttctggtttctcttagttcttctctaacatagtactttctttccagcaaaagcaaaatgtgttttcagatttgttactttaataaaggttatccataccaataaaaagtgtacaacacagcattttctgttaaattattattggttttcagttgtaatttggtattttttctggcatgcgtttattaatttattaaattggcttttagaaataaaaaatattgatagcttacttttttctcataagaat

SEQ ID NO: 2598 - protein, 90 aa, Homo sapiens; identical to SEQ ID NO: 2592

SEQ ID NO: 2599 - DNA, 2221 bp, Homo sapiens
gctaggggcttcatagggtgtctgttgctagaaactgattgcaggcagtatgtaggcatctttcattcagaatggacattaatatcttgaatagagaagaaagcttttagaaatgtatcatttgtcaaaattgcatgccttttaaaaaatgataaagagagatgctgagtgttttgtatgttagcatcgactctttctttttatttctgttcagactcaagtttttagaagctagaatatagatccctttaagaaaaaaaaaggaagaaagaagaatttgctggttagtcgacctctgtttaagaagtgcttcatcctcctcctccacctctccgtggtgtttctctgcagctctctgtaggttagggttctgtgctgcctggcagaatgctcatgtgttagctgaatagatatcatcgacagacatagaccactataggttttctttccttgtgaattccaaaatgccatccaaagagtcttggtcagggaggaaaactaatagggctgcagttcacaaatcaaaacaagagggccgtcagcaagatttattgatagcagccttgggaatgaaactgggttctccaaagtcgtctgtgacaatctggcaacctctgaaactctttgcttattcgcagttgacatcacttgttagaagagcaactctgaaagaaaacgagcaaattccaaaatatgaaaagattcacaatttcaaggtgcatacattcagagggccacactggtgtgaatactgtgccaactttatgtggggtctcattgctcagggagtgaaatgtgcagattgtggtttgaatgttcataagcagtgttccaagatggtcccaaatgactgtaagccagacttgaagcatgtcaaaaaggtgtacagctgtgaccttacgacgctcgtgaaagcacataccactaagcggccaatggtggtagacatgtgcatcagggagattgagtctagaggtcttaattctgaaggactataccgagtatcaggatttagtgacctaattgaagatgtcaagatggctttcgacagagatggtgagaaggcagatatttctgtgaacatgtatgaagatatcaacattatcactggtgcacttaaactgtacttcagggatttgccaattccactcattacatatgatgcctaccctaagtttatagaatctgccaaaattatggatccggatgagcaattggaaacccttcatgaagcactgaaactactgccacctgctcactgcgaaaccctccggtacctcatggcacatctaaagagagtgaccctccacgaaaaggagaatcttatgaatgcagagaaccttggaatcgtctttggacccacccttatgagatctccagaactagacgccatggctgcattgaatgatatacggtatcagagactggtggtggagctgcttatcaaaaacgaagacattttattttaaatttttaatttgaggggaaaagaaatgttttacagatgaaggaatgttttatagtaatttaatttgctcctgtagctgcattatttcttgattagaggtttgggcatataaccagattaaagtgaaggaactttctgttgtttttgtagcaccgctcagctgtcttgtaaaacagtgaacacacgctttctggttctagtaatcctgggtgtttatcacgttcagagaaactcaagctattgcatgattagccccctatctggcaaggaaaccccatacagaagaaacaacaaacctgcgcctgcaccgcctctgcgtcctgggtagtctgtgcttgtaatccagcatgtttcacagagtaagcctgttgtgactttgcttttggggtctatgtcattggtttctgatgcttgtacaaacacgcacacacaaatggataaaacagcacctctggctgttacattaccataaaccatatcacatgcctacattttacaaatgatttctggtttctcttagttcttctctaacatagtactttctttccagcaaaagcaaaatgtgttttcagatttgttactttaataaaggttatccataccaataaaaagtgtacaacacagcattttctgttaaattattattggttttcagttgtaatttggtattttttctggcatgcgtttattaatttattaaattggcttttagaaataaaaaatattgatagcttacttttttctcataagaat

SEQ ID NO: 2600 - protein, 334 aa, Homo sapiens; identical to SEQ ID NO: 2594

SEQ ID NO: 2601 - DNA, 489 bp, Homo sapiens
atcctcgaagaattacctgtacttgcgaggtgggtaacagtgaacacacgctttctggttctagtaatcctgggtgtttatcacgttcagagaaactcaagctattgcatgattagccccctatctggcaaggaaaccccatacagaagaaacaacaaacctgcgcctgcaccgcctctgcgtcctgggtagtctgtgcttgtaatccagcatgtttcacagagtaagcctgttgtgactttgcttttggggtctatgtcattggtttctgatgcttgtacaaacacgcacacacaaatggataaaacagcacctctggctgttacattaccataaaccatatcacatgcctacattttacaaatgatttctggtttctcttagttcttctctaacatagtactttctttccagcaaaagcaaaatgtgttttcagatttgttactttaataaaggttatccataccaataaaaagtgtacaacacagc

SEQ ID NO: 2602 - protein, 31 aa, Homo sapiens; identical to SEQ ID NO: 2590

SEQ ID NO: 2603 - DNA, 1149 bp, Homo sapiens
gtgacaaaactggatgttccctccatccccaaaagtccaagtaaatagtgttgccacattgaaactaagagcctttggaaatctggacttgaaccttaaaaataatttccaaagctgtggacaaggaattacgagaaagcatttcttaccagtttcagagcattatcacaagaatagaattcagtgaaccatttgtatcagttttgtgttatttcttttcttcttggtattcgacttgctattttagaaattatggatccggatgagcaattggaaacccttcatgaagcactgaaactactgccacctgctcactgcgaaaccctccggtacctcatggcacatctaaagagagtgaccctccacgaaaaggagaatcttatgaatgcagagaaccttggaatcgtctttggacccacccttatgagatctccagaactagacgccatggctgcattgaatgatatacggtatcagagactggtggtggagctgcttatcaaaaacgaagacattttattttaaatttttaatttgaggggaaaagaaatgttttacagatgaaggaatgttttatagtaatttaatttgctcctgtagctgcattatttcttgattagaggtttgggcatataaccagattaaagtgaaggaactttctgttgtttttgtagcaccgctcagctgtcttgtaaaacagtgaacacacgctttctggttctagtaatcctgggtgtttatcacgttcagagaaactcaagctattgcatgattagccccctatctggcaaggaaaccccatacagaagaaacaacaaacctgcgcctgcaccgcctctgcgtcctgggtagtctgtgcttgtaatccagcatgtttcacagagtaagcctgttgtgactttgcttttggggtctatgtcattggtttctgatgcttgtacaaacacgcacacacaaatggataaaacagcacctctggctgttacattaccataaaccatatcacatgcctacattttacaaatgatttctggtttctcttagttcttctctaacatagtactttctttccagcaaaagcaaaatgtgttttcagatttgttactttaataaaggttatccataccaataaaaagtgtacaacacagc

SEQ ID NO: 2604 - protein, 90 aa, Homo sapiens; identical to SEQ ID NO: 2592

SEQ ID NO: 2605 - DNA, 2093 bp, Homo sapiens
gctaggggcttcatagggtgtctgttgctagaaactgattgcaggcagtatgtaggcatctttcattcagaatggacattaatatcttgaatagagaagaaagcttttagaaatgtatcatttgtcaaaattgcatgccttttaaaaaatgataaagagagatgctgagtgttttgtatgttagcatcgactctttctttttatttctgttcagactcaagtttttagaagctagaatatagatccctttaagaaaaaaaaaggaagaaagaagaatttgctggttagtcgacctctgtttaagaagtgcttcatcctcctcctccacctctccgtggtgtttctctgcagctctctgtaggttagggttctgtgctgcctggcagaatgctcatgtgttagctgaatagatatcatcgacagacatagaccactataggttttctttccttgtgaattccaaaatgccatccaaagagtcttggtcagggaggaaaactaatagggctgcagttcacaaatcaaaacaagagggccgtcagcaagatttattgatagcagccttgggaatgaaactgggttctccaaagtcgtctgtgacaatctggcaacctctgaaactctttgcttattcgcagttgacatcacttgttagaagagcaactctgaaagaaaacgagcaaattccaaaatatgaaaagattcacaatttcaaggtgcatacattcagagggccacactggtgtgaatactgtgccaactttatgtggggtctcattgctcagggagtgaaatgtgcagattgtggtttgaatgttcataagcagtgttccaagatggtcccaaatgactgtaagccagacttgaagcatgtcaaaaaggtgtacagctgtgaccttacgacgctcgtgaaagcacataccactaagcggccaatggtggtagacatgtgcatcagggagattgagtctagaggtcttaattctgaaggactataccgagtatcaggatttagtgacctaattgaagatgtcaagatggctttcgacagagatggtgagaaggcagatatttctgtgaacatgtatgaagatatcaacattatcactggtgcacttaaactgtacttcagggatttgccaattccactcattacatatgatgcctaccctaagtttatagaatctgccaaaattatggatccggatgagcaattggaaacccttcatgaagcactgaaactactgccacctgctcactgcgaaaccctccggtacctcatggcacatctaaagagagtgaccctccacgaaaaggagaatcttatgaatgcagagaaccttggaatcgtctttggacccacccttatgagatctccagaactagacgccatggctgcattgaatgatatacggtatcagagactggtggtggagctgcttatcaaaaacgaagacattttattttaaatttttaatttgaggggaaaagaaatgttttacagatgaaggaatgttttatagtaatttaatttgctcctgtagctgcattatttcttgattagaggtttgggcatataaccagattaaagtgaaggaactttctgttgtttttgtagcaccgctcagctgtcttgtaaaacagtgaacacacgctttctggttctagtaatcctgggtgtttatcacgttcagagaaactcaagctattgcatgattagccccctatctggcaaggaaaccccatacagaagaaacaacaaacctgcgcctgcaccgcctctgcgtcctgggtagtctgtgcttgtaatccagcatgtttcacagagtaagcctgttgtgactttgcttttggggtctatgtcattggtttctgatgcttgtacaaacacgcacacacaaatggataaaacagcacctctggctgttacattaccataaaccatatcacatgcctacattttacaaatgatttctggtttctcttagttcttctctaacatagtactttctttccagcaaaagcaaaatgtgttttcagatttgttactttaataaaggttatccataccaataaaaagtgtacaacacagc

SEQ ID NO: 2606 - protein, 334 aa, Homo sapiens; identical to SEQ ID NO: 2594

SEQ ID NO: 2607 - DNA, 2345 bp, Homo sapiens
cgcctctccgccagccactgcgccgcggccaagcctcctgcctcgcaggtacctcctcccgcgcgcacgctccgcgcctgatggcagcgacaagtgccggctcgcggagagctagcggggctccctgggcccggtgcgcccgacaataacgcgtgaataactttttcttgcagcggtcccccgcgtcccggcctgcagcctccccgggcgccggcgcccccagcacgccccatcgggcaccccactctctccgaggtgtgggtgcggcgggctgatgaggtgatccctagcccgcctgggaggagcgcctggactcgcgggcggcggcgagcgcctttacaatggccctgaccctgtttgatacagatgaatatagacctcctgtttggaaatcttacttatatcagctacaacaggaagcccctcatcctcgaagaattacctgtacttgcgaggtggaaaacagaccaaagtattatggaagagagtttcatggcatgatctccagagaagcagccgaccagctcttgattgtggctgaggggagctacctcatccgggagagccagcggcagccagggacctacactttggctttaagatttggaagtcaaaccagaaacttcaggctctactacgatggcaagcactttgttggggagaaacgctttgagtccatccacgatctggtgactgatggcttgattactctctatattgaaaccaaggcagcagaatacattgccaagatgacgataaacccaatttatgagcacgtaggatacacaaccttaaacagagagccagcatacaaaaaacatatgccagtcctgaaagagacacatgatgagagagattctacaggccaggatggggtgtcagagaaaaggttgacatcacttgttagaagagcaactctgaaagaaaacgagcaaattccaaaatatgaaaagattcacaatttcaaggtgcatacattcagagggccacactggtgtgaatactgtgccaactttatgtggggtctcattgctcagggagtgaaatgtgcagattgtggtttgaatgttcataagcagtgttccaagatggtcccaaatgactgtaagccagacttgaagcatgtcaaaaaggtgtacagctgtgaccttacgacgctcgtgaaagcacataccactaagcggccaatggtggtagacatgtgcatcagggagattgagtctagaggtcttaattctgaaggactataccgagtatcaggatttagtgacctaattgaagatgtcaagatggctttcgacagagatggtgagaaggcagatatttctgtgaacatgtatgaagatatcaacattatcactggtgcacttaaactgtacttcagggatttgccaattccactcattacatatgatgcctaccctaagtttatagaatctgccaaaattatggatccggatgagcaattggaaacccttcatgaagcactgaaactactgccacctgctcactgcgaaaccctccggtacctcatggcacatctaaagagagtgaccctccacgaaaaggagaatcttatgaatgcagagaaccttggaatcgtctttggacccacccttatgagatctccagaactagacgccatggctgcattgaatgatatacggtatcagagactggtggtggagctgcttatcaaaaacgaagacattttattttaaatttttaatttgaggggaaaagaaatgttttacagatgaaggaatgttttatagtaatttaatttgctcctgtagctgcattatttcttgattagaggtttgggcatataaccagattaaagtgaaggaactttctgttgtttttgtagcaccgctcagctgtcttgtaaaacagtgaacacacgctttctggttctagtaatcctgggtgtttatcacgttcagagaaactcaagctattgcatgattagccccctatctggcaaggaaaccccatacagaagaaacaacaaacctgcgcctgcaccgcctctgcgtcctgggtagtctgtgcttgtaatccagcatgtttcacagagtaagcctgttgtgactttgcttttggggtctatgtcattggtttctgatgcttgtacaaacacgcacacacaaatggataaaacagcacctctggctgttacattaccataaaccatatcacatgcctacattttacaaatgatttctggtttctcttagttcttctctaacatagtactttctttccagcaaaagcaaaatgtgttttcagatttgttactttaataaaggttatccataccaataaaaagtgtacaacacagc

SEQ ID NO: 2608 - protein, 459 aa, Homo sapiens; identical to SEQ ID NO: 194

SEQ ID NO: 2609 - DNA, 565 bp, Homo sapiens
ctccagagaaggaagaagctttccattttttaaggcttaaaaaaaacacccaagtatctttaaagcagtttagataccaagagttgctcttctaacaagtgatgtcaactgcgaataagcaaagagtttcagaggttgccagattgtcacagacgactttggagaacccagtttcattcccaaggctgctatcaataaatcttgctgacggccctcttgttttgatttgtgaactgcagccctattagttttcctccctgaccaagactctttggatggcattttggaattcacaaggaaagaaaacctatagtggtctatgtctgtcgatgatatctattcagctaacacatgagcattctgccaggcagcacagaaccctaacctacagagagctgcagagaaacaccacggagaggtggaggaggaggatgaagcacttcttaaacagaggtcgactaaccagcaaattcttctttcttcctttttttttcttaaagggatctatattctagcttctaaaaacttgagtctgaacagaaataaaaagaaagagtcgatgcta

SEQ ID NO: 2610 - protein, 79 aa, Homo sapiens
MAFWNSQGKKTYSGLCLSMISIQLTHEHSARQHRTLTYRELQRNTTERWRRRMKHFLNRGRLTSKFFFLPFFFLKGSIF

SEQ ID NO: 2611 - DNA, 572 bp, Homo sapiens
ggagctgttcctattcggccatcttgactcctctctgccggacttttctttaagaaaatcttctgccactgttataaaagacagcaagatcaatcactcctcttccacatcctcttactgtgaagataataaggttgaagaccttgatgatgatctactttcacttgaacagcaaattggaccatctagttgcaggaaaacaagttcagggctcccactgattctacattatggagcagctcagggaagggagagaatgtattgcagaaatgcaacttaactttttcctttccagatggcatggagatgataaatgtggacacatggacacacacacagagaagcagccatgtgaagacagaagcggagattggagtgatataagaaatgccaaggattgccagcaatcaccaaaagcagggaagaaataagaaaagattcttcaagagagccttcagagagaccatggccttgtcaatacctggattttggacttctaatctccagaactgtgagggaataaatttcagttattttcagatacccagcttgtggtactttgttacaggagc

SEQ ID NO: 2612 - protein, 66 aa, Homo sapiens [sequence omitted]

SEQ ID NO: 2613 - DNA, 1170 bp, Homo sapiens
ggggcggctcgcgccagcgcgtagagcgcccgcagagctgggaaaatcggtccgagaggcctgatctgagaggaccacagttgaaacttcatctttctctgaaaccatcacgccttagccaatcctaacgaaaacgtataagctttgttgagttggagggaatcattgctgtgagaagctgacagtggtggatgacaagcttgaatttccagaggaaatagcatgtctgtgaaactcacccatgccatctggaaaggaaaaagttaagttgcatttctgcaatacattctctcccttccctgagctgctcctggaatataaagaaagcaaggaaatatttactgggccttcagctttctgtactacttcggaacagcactagcatctatctcagggtttaaaatatggaagttcttgccttccttgaatcttttctcccagaaataacatattggctctcttccctgtgacatgcctcatctgacattggctggctttcatataaaacctttgttttagcctactatcaattcaacttttacattgacaaaacgtaatttttggttgtcaatgtaaaagttgacatttttacattcaactttaatttaaatgctgaatttaaatttaaatgctgaaaatttatttaaacacttaaaatgatattagaagaggtattttatgtttttaaacagagatatatttcatttttatatgcagtcaacagatcacatgtgtatgtctcttatgtgttcctgtgtgggaatagcttgaattactacataagttctctgagaatattaagttcatttaggggaacaggacatatctatatgaaaaacagaaataatactacaaacaaaagagagatcacgagataacatgtaattaattctcagtgaatgacatgtcatgaaatcatcagaagagatgaggatatgggaaaagctttatgaaagtagtcagaaccataaggaagattcggttttgttaaacagaaagacctttttccattgtggtattaagtttaatatgattttcattgtattaaaatactaatgcagtaagttgaaaatataattgcattcttttcatttaatctattgtaaaatatataatcaaaatgatatacttgtaaaataattacatatataataaaatcaatatacctgt

SEQ ID NO: 2614 - protein, 46 aa, Homo sapiens
MPSGKEKVKLHFCNTFSPFPELLLEYKESKEIFTGPSAFCTTSEQH

SEQ ID NO: 2615 - DNA, 1048 bp, Homo sapiens
agaactttttgcaaaactgataaaagcaaccagtcaacaagaatgtactaaacctccttcagcattgactacttagtcaaaggctggggagattttcagcatgtctgtgaaactcacccatgccatctggaaaggaaaaagttaagttgcatttctgcaatacattctctcccttccctgagctgctcctggaatataaagaaagcaaggaaatatttactgggccttcagctttctgtactacttcggaacagcactagcatctatctcagggtttaaaatatggaagttcttgccttccttgaatcttttctcccagaaataacatattggctctcttccctgtgacatgcctcatctgacattggctggctttcatataaaacctttgttttagcctactatcaattcaacttttacattgacaaaacgtaatttttggttgtcaatgtaaaagttgacatttttacattcaactttaatttaaatgctgaatttaaatttaaatgctgaaaatttatttaaacacttaaaatgatattagaagaggtattttatgtttttaaacagagatatatttcatttttatatgcagtcaacagatcacatgtgtatgtctcttatgtgttcctgtgtgggaatagcttgaattactacataagttctctgagaatattaagttcatttaggggaacaggacatatctatatgaaaaacagaaataatactacaaacaaaagagagatcacgagataacatgtaattaattctcagtgaatgacatgtcatgaaatcatcagaagagatgaggatatgggaaaagctttatgaaagtagtcagaaccataaggaagattcggttttgttaaacagaaagacctttttccattgtggtattaagtttaatatgattttcattgtattaaaatactaatgcagtaagttgaaaatataattgcattcttttcatttaatctattgtaaaatatataatcaaaatgatatacttgtaaaataattacatatataataaaatcaatatacctgt

SEQ ID NO: 2616 - protein, 46 aa, Homo sapiens; identical to SEQ ID NO: 2614

SEQ ID NO: 2617 - DNA, 768 bp, Homo sapiens
tttggaaaaccaatataaaagcctccatgatccacatttaaaagcatactataagcgcaaagatattttgaagagattaaagaaaggtggctacatcaccagcaataataaagttgtatgtaccttgagagaattgaataagtacaggcaatatcttaccagtttaaaattagactttgagagaaactatataaaagaacaagtaagttaaatacttaaatttggtttatttacatagagtttggaagaaatgcttgattatatgtagagtgttcttctaataatattttgatcctttattattgacaaagtaattgaatattttttccaagtgaaaatttacagtaggaataaacaatattttaattttgctatagttggccaagaatgggaaagggactgggttatctatcaacacaccagtggtagctggcataattcaataactaaattgctagtcagatgtgttgtttccccctgagctaatgccaataacaaacatctcttgtggcagaaagattcttaaattgaaacctaaaacagtttgagccataggaaaagaacaataattatctgtagtgttctacagtgattcaagaatatgtacactctgtgtttgtactcatacacgtgcacctgtaaaaatgttgttcttgaatgtgaacaaaatgttgttcttgaatgtgaagtagaatgattgggtgtagagtgaatggttatggatagtgacttccttttgatttttgacttaaaggtgtgtgtgtgtgg

SEQ ID NO: 2618 - protein, 31 aa, Homo sapiens
MYTLCLYSYTCTCKNVVLECEQNVVLECEVE

SEQ ID NO: 2619 - DNA, 688 bp, Homo sapiens
agtacatgaatcactcctactaagagatcctgaaagaggtcatcaaagccaccagaaactattcctggacagaggaggttttataggtgtggttggtctccttactgacgtgtcaactacaaatgcacagggttctgcctgaaatgttttagttgttgcagatgtgtagcttctatatgtaaagtcttcactgcacgtgctacagaaacttgaactatctgaagagaggatggagtcatcagatactgggaacaagaagactaagcaataagtgagaaaagaaatgatggaatagatgtgaggcttccacagcaaactcctgtaaaacctgcagttaaacctgagcaagaggaatgtgacatatgtgtctttgctctttatttggatctgtgtgtatgctcttggagcagtggcgaagaagctccaggtaaggtatagagttctttatttttcatcaagctaagatttttaatgaaacaatatccaaaatgcttgctatgaaagattcaagtgatttttgtagttctacattcttgggtaggagaagataaaaaatgcagttattacaactatattatgagcctcttctaaccttttctttaaagaggtaggtatttatatttctaataaataaaaacgtttgtatcaaataagtaaaataaacaatgttattttacatatggtctac

SEQ ID NO: 2620 - protein, 46 aa, Homo sapiens
VHESLLLRDPERGHQSHQKLFLDRGGFIGVVGLLTDVSTTNAQGSA

SEQ ID NO: 2621 - DNA, 439 bp, Homo sapiens
cagtacatgaatcactcctactaagagatcctgaaagaggtcatcaaagccaccagaaactattcctggacagaggaggttttataggtgtggttggtctccttactgacgtgtcaactacaaatgcacagggttctgcctgaaatgttttagttgttgcagatgtgtagcttctatatgtaaagtcttcactgcacgtgctacagaaacttgaactatctgaagagaggatggagtcatcagatactggatccagtcaaaatatttggatgctttcagaaacatctgcctagctgagatgtggggaaggaacataaagcattttctctcccagtccctgctgaaagggtgagcctgtggtctatatatataggaatgactaaagttaattgttaagaattatttgataggcaaaaataaaagctaatgctttatatag

SEQ ID NO: 2622 - protein, 46 aa, Homo sapiens; identical to SEQ ID NO: 2620

SEQ ID NO: 2623 - DNA, 8192 bp, Homo sapiens
aggtaacttctgaagaactgaatattataattcagaatgtaatgacctgggttgtggctacagtgaccagtatattgtacccagccatcacaaagtatgaaaaaagattgcaaaataatacatacccagtatctgatgactccatcctctcttcagatagttcaagtttctgtagcacgtgcagtgaagactttacatatagaagctacacatctgcaacaactaaaacatttcaggcagaaccctgtgcatttgtagttgacacgtcagtaaggagaccaaccacacctataaaacctcctcctgcacatgtggaaaaaacagttgtggggaaaacatgtcacataaaaggacaatctataatctctaaacataaatataataaaaccaacttgctatattcataccctaagctcagaagttgtaaatcagatagtcaccttttagcatcatttgaaacaggcacaaaaaaatctaaggatgctaccactgaaacagatagcttagggagttcattgcattgtgataaaacagcaaaagccatggatgaaatgaagaatttaaaaaatgtttttgttaactttaaatgttacttgaaaggggaaactgaagtgattttagaaagcattttgcgagaaataatgtctgatttaacccaggccattccctctctctcttctgttactgctgaagtttttgttgaacaatgtgaacgtgaaaaagaaatcttgctttccaatgctcatattccctcagttgcttctgagattgtggaaaatatgcttgagaagttagagtctgcagttgagaaaaaatgtgttgagatgttttcacaagatttgtcagtcgacattaaaccaagtttagcagccagtgatgaacttctcacatcatctaatggaaaacctttgaaaaattcaatgcctcatactttggacccaatgtgtgatattgcagaggacatggtgcatgccattttagaaaagctaatgactcttgtttcttttaagcaaaatgaatttcttcatcttaaagacacaaataagctttcctgccagcaacataagacagacccaatatgtatgttccttcaaagagctggcaaaaataaatctagtcttgaatctgatgaagctagtttaattgtcaatgaagaagtacaaaatttaatatcaaatattttttcccagtcttctttggttgcttatatagaggaagcaatcaatgctatactaggttatatacaaactgaactaaataatgagagaattattgcatctgaagaaaccgtagtactccttcagctacttgaggacatcctttttcagctccatcaggaaccagtaaatgaaagttttcaaaaaagtaggcaacctagaataagtagtccttctgacaccaaagaaaagtacagactcactggcactagattatcaaatagtcctaggtctggaagaccatttccacctataaatgttccaggcatggttctttattctgatgatgaaaatgaggaaatagacaatattgtaaaaaatgtgcttgattcaactttcaaagatgaaaaagtaaaatcacaagaacagattcctaatcattggtttacaaagggaaacacttgttttgaatgcaaaagaaatatcaaaccacctacaaagcctggttctagaagcaaagctgcatttcatgattgggaattaaagactgagccaccatctactaatcatgaagatattttaaagaaaaaactttcttcgaataaagacatttcaactttcagccaagatcaaaagcatcaaatagaaaaggcttcagaaaacatagtcacaagtattttaaaggaaatgctcaaggacatatcttccgttccttttggtcacttagacagcaaaactggcagtgaagcttcagttcttgtttcagaaaagcctcaaggactgtcacatcaagaatggatagaccagatgttttctgtttcagaaatcagtacagtggctcaagaaataacagattctgtgttaaacatacttcataaggcatcaaactacatttccaataccactaaaagttccatttcatcatcagttcatcagatttccttacataattctgacactgaacacatagtcaaagaagcaccaaataaatacccattaaaaacatggtttgacagtgaaaagaaaatgaaatatttatctttatttgacgttgatcctgaaaagcctccctggttaaaatctggaaaaagtgaacctaaacctgtagatgacattaatgataagatcattcgtacaatttttaaaagactgaagtcatttatttgtccaaaattgcatatgggcttcaaatcttcattacgatctcaacttagtaagtacacagctaaaatagtaaacattgttttatgtgctatccagaatgaactggaacttcacaaggaaaacctaaatcttagggagattgaccataccaaatcccttacagataaaggattttttgctaatactgataaaaaattagaatctcttgtcacgagtattgatgatgacattttggcgagtccattattaacctgtatttatgatatgttgttatcaagtgaaaatgcacatcaaagaagcatttcactctcttctcgtaagccaaagtctgcaactgacagtgttgatgtacaaagcattttgccaaataggcaagataaaaaatcttttcacaaatatttggctactccttgtactcaccacagtgtcaatggtggaaaccatattaaagagaatgcaaaattgcaagtgttagaaagaattggggaaacactacatgaaatgttaagcaagctcctggggacccatcttcattctcagctatcttgtagtcaacaaagcagagagatgaccaataagaatcagaaaatggctgctgcattgcagtctaatattcagttaatttctaaagcaattttggattatatccttgcaaaattatgtggtgttgacatggataccagttttgcaagttgtggattaaaagctatctcagagtctcttgacattgacaacccatcatttgcttcaattattgagaaaatggccaaatccaccaaaataatctccagcatagtttccagaagggttcaggaggacaataaagaagagactaaaagcaaggcaaaacctgttgctcctgtgtcttccaaaacaccaagcacaaaagaaatgcatccaaataaactaaaagctgtagcttcagatattcttaatatggtttttgctaaactggaagggtttgccaacggacatttagaaattttgggtgctattaatgatggaaataagaaaagcaataagataggctgggaatatgaaagcaccaatatttccagagacacacatgaagcatcatttctgtctgctttatatatgcatgcaaagaaggtatcaagtgctattttgaaggttattcaaacagaattaaatgtgacctcatcagatttgaagacaagtgtagaaaacccaccacctgagactcaaatacttaagtatgtagtcaagttaattttagatgcagtatcttccgatatgtttaatgaaatggaatctgaagggggaggcattgaaacttatcgatacaggccaacatatggaagtcttcctggaggagctgaatcagattcatttctagaagatgatgcatatacagcgaaaaaaattattgatgagagatccccacaaagagaagaagtgaaaacacgttctcttaaacaatgggctctcgaaaaaaccttaaacaaaattgaagtaaaactcaaagaaccacatatatctccaattgctcccattataagaaatattttgaatgaaatttttcaaagtactttaatcaatcaattaaatgtcctttctctctcccactctaattttaatggcatgcctcacaatgttgatgagccaactccccaaacatctgttcaatttatggataaaatgatggatcctttactttcggaagcagatataaccatagtaacagataatattgttaggactgtatttcacaaactttattcagctgccatgacagaaagaaatgtaagggaaaataggtataaaactatcactttttcagcaaatgtttcttctcatgaacacacctataaaggaaagtcctctgtcacggctttggatgaaaatccatgtacttttcagtctagattcagcgttgctgacaaggagacaaaggtaaatctagctgaagatattgtacaggcaatattaacaaatttagaaacttttgctacttccaaagtaaaatctctcttttattctcaagtcaactttacagttccagtggctttacctattcagcaagatcacagtacattgagcaaagcattatcagccaaagattcatattctgatgagcaattttcctgttgctcagtagatcataccaagtcaggaaagaccaacttgtgccaactgtctttgtctaaattaaatacttatgcactacaagtggctagaagaaatttacaaggaatcaaacaggaattagataaagaaagggaaaatccttttttaactcatgacattgggatttctgaaagtattgcaagtcaaattgttaacgcattgttagacattatatcacgtaaaggcaaatgtgacaaaaacagttctgacaaagagatcgatttagatcagcaaaaaggtgttattgaaaagctgctcaatgagaccaaatatcgaaaagtacttcaacttcaaatacaagataccattgaaggtatcctatgtgatatttatgaaaaaaccctgtttcagaataatctctcatttgccacacccactctgaaatgtagcatagctgataaacattcagaagaaaattctgaaatgttcatggagggtgcaaataagattattcctaagctttcagttcctaaatcagatgtcattttgatatccaatgatatagtgaatattgttcttcataatctcagttctgctgccacgcttgtcataaatgcaaagaatcctacttctgcaagattgcccctgacattttgtgatacgtttccaaaaatagactgtcaacagcctcttaaggggtcaaaaactgaaagaaaaacagagcgtttttcatattcaagaaatcagaaatcagcttatgctgatgataatcagataactgtagtagagaaagaagacactcagaaatctgctactgactcatgtgaggaaaatgctaacttcattactaaaactatttttaaacgtttggaatcttttgccacagaaagaatagattcattaattacccttgctttccaaagtaaagaaaagtcatttgttatcccagaattggaaaattgtaaacaaaatgacagcatcttttatgattcaagccaagtggaatcagatgtaaatgtcctgaaaatatcagcaactgaaaccattctcagccaagagcttacagatttcacttttgttggtcgcagagaaaaacttggatccacaattcacctatcgcaagctaggcttaagacatatgctgacgtcattgccagtgccattttgaagcttattaaaaatgacttagacttagaaattcaaaagatatatccatatcaaaacaatattttgttccaagaaaacatcattgtgagtgaaattgttgacagtatgttaaagatgttagatgataaaagatctgtaaaggaaatttgttttaattcaaaagaaaattctaacttttcacaattagctttatcaaatgaaatattgctgggtcacaaagagaaggaaagaagtaccaaacaatctctatttacaaagtatccattagagcaaaaccaaatgatattggaaaacaaaaggcagataattgttttggaagaaatatttatgagaaatggagaatcaaaaaacaaagaaaaaggtgaactgctcattgcagtggaagaacttttgaataagttgtatcaaagagtaagggaagtcacaggccatttgcctccacttaatgaaactgccaactttatatctaattctaagattaaaacatcagacacaacacagaaaaacagttttcaatcacatattaacagtgtagcaaatgacatagttgaaagtgttttggggaaaatgtacttggtagttgtgacatcattatatgaaaataataaaagtaggacagaagttgaaatatctgaccacaatgattccttactaatgaaaccattaaggtttagagaaactaaacaagcaggaaaaataagtaattcccctagatatgcgatatcacaggcttattcttatgtcgacagtcaaaatatctctgtgatggaaaacactcttttgccatatttaccattgcaagtgaagaaagacttaattcaaatggttctcaataagatcacaaattttgtctcacttcctttaaaggtgagccctaaggacaaccctaagccatgctttaaagcacatttaaaaacaagatcaaaaattaccactttgcctaaatttacaaaaaaaacacacttaggactgagtgctgctaaggccaaaagcaaaaccaagttaggtcctggagagaagaccctaaaagacagcagatccaagactgccattgggttgtcacacatcatgtcagctggagatgccaaaaatttactggacacaaaattgcccacttcagaactaaaaatatatgccaaggatataataattaacatcctagaaacaattgtgaaggaatttggaaaggtaaagcaaaccaaagctttaccatctgatcaaatcatagcagcaggtaaaatagttaatacagttttgcaagaattatatgttaccaataactgcaatttggcttacccgatgaaatcctcacatctcagactttcacaggggaatataggcacaggatcccttcctaaacaacaagcatgtttttacttggagaatgtttcttcacagctagagcacatttttcctagagaaggtatatttaaaaaattgtttgacaagtggcaaacagaatcaaatgacaaggaaaatgaaaaatgtaagctattgatgatagctgaaaatgttttgactgaaatttcaataaaagcaaaagaattagaatattctctttcacttttaaatttgccccctcttgagaattgtgaaagcaggttttataatcattttaaaggagcttctactagagccgaggatactaaagcacaaattaatatgtttggaagggaaattgttgaaatgctacttgaaaaactacagctatgctttctgtcccaaattcccactccagatagtgaagaaactctatcaaacagtaaagaacacattactgctaaaagtaaatatggttttccaaacaagcatagcctcagcagtttaccaatctataacacaaagacaaaagaccaaatttctgtgggctccagcaaccaaattgttcaagagattgtagaaacggttttaaacatgttagagtcatttgtggacttgcagtttaaacatatctccaaatatgagttttctgaaattgtgaaaatgcctatagaaaacctttcttctatccaacagaaactgttaaacaaaaaaatgttgccaaaattacaaccactgaaaatgttttctgataaatccgagtcaaatactattaatttcaaggaaaacatacagaatatccttctacgggttcattcattccattcacaattacttacatatgctgttaatatcatcagtgacatgcttgctgtaattaagaacaagctagacaacgaaataagccaaatggaaccatcttcaattagcatattgaaagagaacattgtagcaagtgagatcattggcacactaatggaccagtgtacttatttcaatgagtctttgatacaaaacctttcaagagaaagtttgttccaaggagctgaaaatgcctacactgttaatcaggttgaattagcaactaatatgaaaatgttcacatcaaagttaaaggaaggtagtttggggattaatccttcacaagtgagtaaaactgggtttgtgttttgttcagatgaagatatgaaagaaaagtacagggtttcatcagatttacccacctctgtcagatcctctgtagaagacacagttaaaaactcagagccaacgaaaaggcctgattcagaaactatg

SEQ ID NO: 2624 - protein, 4000 aa, Homo sapiens
MTWVVATVTSILYPAITKYEKRLQNNTYPVSDDSILSSDSSSFCSTCSEDFTYRSYTSATTKTFQAEPCAFVVDTSVRRPTTPIKPPPAHVEKTVVGKTCHIKGQSIISKHKYNKTNLLYSYPKLRSCKSDSHLLASFETGTKKSKDATTETDSLGSSLHCDKTAKAMDEMKNLKNVFVNFKCYLKGETEVILESILREIMSDLTQAIPSLSSVTAEVFVEQCEREKEILLSNAHIPSVASEIVENMLEKLESAVEKKCVEMFSQDLSVDIKPSLAASDELLTSSNGKPLKNSMPHTLDPMCDIAEDMVHAILEKLMTLVSFKQNEFLHLKDTNKLSCQQHKTDPICMFLQRAGKNKSSLESDEASLIVNEEVQNLISNIFSQSSLVAYIEEAINAILGYIQTELNNERIIASEETVVLLQLLEDILFQLHQEPVNESFQKSRQPRISSPSDTKEKYRLTGTRLSNSPRSGRPFPPINVPGMVLYSDDENEEIDNIVKNVLDSTFKDEKVKSQEQIPNHWFTKGNTCFECKRNIKPPTKPGSRSKAAFHDWELKTEPPSTNHEDILKKKLSSNKDISTFSQDQKHQIEKASENIVTSILKEMLKDISSVPFGHLDSKTGSEASVLVSEKPQGLSHQEWIDQMFSVSEISTVAQEITDSVLNILHKASNYISNTTKSSISSSVHQISLHNSDTEHIVKEAPNKYPLKTWFDSEKKMKYLSLFDVDPEKPPWLKSGKSEPKPVDDINDKIIRTIFKRLKSFICPKLHMGFKSSLRSQLSKYTAKIVNIVLCAIQNELELHKENLNLREIDHTKSLTDKGFFANTDKKLESLVTSIDDDILASPLLTCIYDMLLSSENAHQRSISLSSRKPKSATDSVDVQSILPNRQDKKSFHKYLATPCTHHSVNGGNHIKENAKLQVLERIGETLHEMLSKLLGTHLHSQLSCSQQSREMTNKNQKMAAALQSNIQLISKAILDYILAKLCGVDMDTSFASCGLKAISESLDIDNPSFASIIEKMAKSTKIISSIVSRRVQEDNKEETKSKAKPVAPVSSKTPSTKEMHPNKLKAVASDILNMVFAKLEGFANGHLEILGAINDGNKKSNKIGWEYESTNISRDTHEASFLSALYMHAKKVSSAILKVIQTELNVTSSDLKTSVENPPPETQILKYVVKLILDAVSSDMFNEMESEGGGIETYRYRPTYGSLPGGAESDSFLEDDAYTAKKIIDERSPQREEVKTRSLKQWALEKTLNKIEVKLKEPHISPIAPIIRNILNEIFQSTLINQLNVLSLSHSNFNGMPHNVDEPTPQTSVQFMDKMMDPLLSEADITIVTDNIVRTVFHKLYSAAMTERNVRENRYKTITFSANVSSHEHTYKGKSSVTALDENPCTFQSRFSVADKETKVNLAEDIVQAILTNLETFATSKVKSLFYSQVNFTVPVALPIQQDHSTLSKALSAKDSYSDEQFSCCSVDHTKSGKTNLCQLSLSKLNTYALQVARRNLQGIKQELDKERENPFLTHDIGISESIASQIVNALLDIISRKGKCDKNSSDKEIDLDQQKGVIEKLLNETKYRKVLQLQIQDTIEGILCDIYEKTLFQNNLSFATPTLKCSIADKHSEENSEMFMEGANKIIPKLSVPKSDVILISNDIVNIVLHNLSSAATLVINAKNPTSARLPLTFCDTFPKIDCQQPLKGSKTERKTERFSYSRNQKSAYADDNQITVVEKEDTQKSATDSCEENANFITKTIFKRLESFATERIDSLITLAFQSKEKSFVIPELENCKQNDSIFYDSSQVESDVNVLKISATETILSQELTDFTFVGRREKLGSTIHLSQARLKTYADVIASAILKLIKNDLDLEIQKIYPYQNNILFQENIIVSEIVDSMLKMLDDKRSVKEICFNSKENSNFSQLALSNEILLGHKEKERSTKQSLFTKYPLEQNQMILENKRQIIVLEEIFMRNGESKNKEKGELLIAVEELLNKLYQRVREVTGHLPPLNETANFISNSKIKTSDTTQKNSFQSHINSVANDIVESVLGKMYLVVVTSLYENNKSRTEVEISDHNDSLLMKPLRFRETKQAGKISNSPRYAISQAYSYVDSQNISVMENTLLPYLPLQVKKDLIQMVLNKITNFVSLPLKVSPKDNPKPCFKAHLKTRSKITTLPKFTKKTHLGLSAAKAKSKTKLGPGEKTLKDSRSKTAIGLSHIMSAGDAKNLLDTKLPTSELKIYAKDIIINILETIVKEFGKVKQTKALPSDQIIAAGKIVNTVLQELYVTNNCNLAYPMKSSHLRLSQGNIGTGSLPKQQACFYLENVSSQLEHIFPREGIFKKLFDKWQTESNDKENEKCKLLMIAENVLTEISIKAKELEYSLSLLNLPPLENCESRFYNHFKGASTRAEDTKAQINMFGREIVEMLLEKLQLCFLSQIPTPDSEETLSNSKEHITAKSKYGFPNKHSLSSLPIYNTKTKDQISVGSSNQIVQEIVETVLNMLESFVDLQFKHISKYEFSEIVKMPIENLSSIQQKLLNKKMLPKLQPLKMFSDKSESNTINFKENIQNILLRVHSFHSQLLTYAVNIISDMLAVIKNKLDNEISQMEPSSISILKENIVASEIIGTLMDQCTYFNESLIQNLSRESLFQGAENAYTVNQVELATNMKMFTSKLKEGSLGINPSQVSKTGFVFCSDEDMKEKYRVSSDLPTSVRSSVEDTVKNSEPTKRPDSETMPSCSTRNKVQDHRPRESNFGSFDQTMKGNSYLPEGSFLQKLLRKASDSTEAALKQVLSFIEMGKGENLRVFHYENLKPVVEPNQIQTTISPLKICLAAENIVNTVLSSCGFPSQPHTNENREIMKPFFISKQSSLSEVSGGQKDNEKSLLRMQDKKINYIPEEENENLEASREDSSFLQKLKKKEYPKIETVKEVEAFTFADHEMGSNEVHLIARHVTTSVVTYLKNFETTVFSEEKMSVSTWSRKKYESKQFLRNIYDDSSIYQCCEHLTESVLYHLTSSISDGTKKGREKEKAWEIQEATFSKIISIHSQVFESRSISIGELALCISEIIIKILFNNKIIQADIAQKMVAIPTKYTYCPGIVSGGFDDLFQDLLVGVIHVLSKEIEVDYHFESNVRNKSFSMHRNNSVPLCNKINRQASPRDWQFSTQQIGQLFQKNKLSYLACKLNSLVGNLKTSESKEVVNKVFNIVSDLFSPDECLDTGMDSGKIQRTYFYSSNNEQPNSILTNNLQLSSKSVFLLNVVCEKLIRILLEECTSTAFPDKGSVSEETSAEECQLLKMLQSVEDGKSDYRKGGMDCECLQVDYMSDLLENVAEIDQDLLTSDSMLTIISHSLVKSLMDKLSHSIQQAPESLPFANKHLNYRTREIQSSFIKARKSELIELGQSKSSLELRSYDSNSLTVSLNNPSVVSSKIQAPFNKHCAVKSSSVSPFERQRTKEMDKVAIHNKLHQEGIYAGVYSATFLEGIISELFFNLSMSLWGKNKNITVSWLNEMNTLFVNNVVNEFNNAQVTVLRNAEERLCFPPVHTETVSKIVDSVYYDVLQQYELKVACGNNPVYDNASIAEQITNGILLEILDYKLPSCFKEHLIPHSYYPLKPEIILQKLQSNLTEFTSLPRSSSDYSTMLSHSFLEDVIRRLLSQLIPPPITCSSLGKKYLMSSDFNEMSTCIINKVMSAISKHKIWFTIYDNQYLYTGKNLQKMVDSVYCNILQMSDSLVSIQKSIVSRSPIMIDQIASFIIQEIIENHLQPFLSGEVLCHPRTPLDPVSTIVTQVLSEVIESHRPQKQSPLDIHLDSFVREIVARLLSKIFSPKHNTEIELKNMTQRIVNSINRHFNKAKIHILYDDKEQAFFSFNTDIVDELATSVYRNALKQHGLDLAVDKESEDSGIFVENITNLIVAAISDYLLHPLFSGDFSASTYSNSVAENIVQDILSNISKSTEPSQSVPLYNTLLPYTFLEDMIRVLLSKLFSSASSLVLNRDTQKDISRVNFNDIASNLVSDIRM

SEQ ID NO: 2625 - DNA, 3870 bp, Homo sapiens
gtatcaaagagtaagggaagtcacaggccatttgcctccacttaatgaaactgccaactttatatctaattctaagattaaaacatcagacacaacacagaaaaacagttttcaatcacatattaacagtgtagcaaatgacatagttgaaagtgttttggggaaaatgtacttggtagttgtgacatcattatatgaaaataataaaagtaggacagaagttgaaatatctgaccacaatgattccttactaatgaaaccattaaggtttagagaaactaaacaagcaggaaaaataagtaattcccctagatatgcgatatcacaggcttattcttatgtcgacagtcaaaatatctctgtgatggaaaacactcttttgccatatttaccattgcaagtgaagaaagacttaattcaaatggttctcaataagatcacaaattttgtctcacttcctttaaaggtgagccctaaggacaaccctaagccatgctttaaagcacatttaaaaacaagatcaaaaattaccactttgcctaaatttacaaaaaaaacacacttaggactgagtgctgctaaggccaaaagcaaaaccaagttaggtcctggagagaagaccctaaaagacagcagatccaagactgccattgggttgtcacacatcatgtcagctggagatgccaaaaatttactggacacaaaattgcccacttcagaactaaaaatatatgccaaggatataataattaacatcctagaaacaattgtgaaggaatttggaaaggtaaagcaaaccaaagctttaccatctgatcaaatcatagcagcaggtaaaatagttaatacagttttgcaagaattatatgttaccaataactgcaatttggcttacccgatgaaatcctcacatctcagactttcacaggggaatataggcacaggatcccttcctaaacaacaagcatgtttttacttggagaatgtttcttcacagctagagcacatttttcctagagaaggtatatttaaaaaattgtttgacaagtggcaaacagaatcaaatgacaaggaaaatgaaaaatgtaagctattgatgatagctgaaaatgttttgactgaaatttcaataaaagcaaaagaattagaatattctctttcacttttaaatttgccccctcttgagaattgtgaaagcaggttttataatcattttaaaggagcttctactagagccgaggatactaaagcacaaattaatatgtttggaagggaaattgttgaaatgctacttgaaaaactacagctatgctttctgtcccaaattcccactccagatagtgaagaaactctatcaaacagtaaagaacacattactgctaaaagtaaatatggttttccaaacaagcatagcctcagcagtttaccaatctataacacaaagacaaaagaccaaatttctgtgggctccagcaaccaaattgttcaagagattgtagaaacggttttaaacatgttagagtcatttgtggacttgcagtttaaacatatctccaaatatgagttttctgaaattgtgaaaatgcctatagaaaacctttcttctatccaacagaaactgttaaacaaaaaaatgttgccaaaattacaaccactgaaaatgttttctgataaatccgagtcaaatactattaatttcaaggaaaacatacagaatatccttctacgggttcattcattccattcacaattacttacatatgctgttaatatcatcagtgacatgcttgctgtaattaagaacaagctagacaacgaaataagccaaatggaaccatcttcaattagcatattgaaagagaacattgtagcaagtgagatcattggcacactaatggaccagtgtacttatttcaatgagtctttgatacaaaacctttcaagagaaagtttgttccaaggagctgaaaatgcctacactgttaatcaggttgaattagcaactaatatgaaaatgttcacatcaaagttaaaggaaggtagtttggggattaatccttcacaagtgagtaaaactgggtttgtgttttgttcagatgaagatatgaaagaaaagtacagggtttcatcagatttacccacctctgtcagatcctctgtagaagacacagttaaaaactcagagccaacgaaaaggcctgattcagaaactatgccatcgtgttctactagaaacaaagtacaagaccacagaccaagggaatctaactttggtagttttgatcagaccatgaaaggaaatagctacctccctgaaggcagtttcttacaaaagctgcttaggaaagcaagtgactccacagaagcagcattaaagcaagtcttgtcattcatagaaatgggaaaaggtgaaaatctaagagtgtttcattatgagaacctaaaaccagttgttgaaccaaaccaaattcagacaaccatttcccctctcaaaatatgtttagctgcagaaaatattgtcaatactgtgctatccagctgtggctttccaagtcaaccacacactaatgagaacagggaaataatgaaaccatttttcatatcaaaacaaagctctttatctgaagtatctggagggcaaaaggataacgaaaaaagtttgcttagaatgcaggataaaaaaatcaactatatacctgaggaagaaaatgaaaaccttgaagccagccgggaagattcttcttttttgcaaaaattgaaaaaaaaggagtacccaaagatagagactgtgaaggaagttgaagcctttacttttgctgatcatgaaatgggttccaatgaagttcatctgatagcaagacatgtcaccacatctgtggtcacatatttgaagaactttgaaactacaggccgttgctagaaattcatttcagaatataagaaagcctgatattacaaaggtggagctcttaaaagatgttcaaagtaaaaatgatcttattgttcgattagtagctcatgatattgatcaagtgtatttggaaaattacataaaagaggaacgagattctgatgaagatgaagttgttttaacacagacttttgcaaaagaagaaggcatcaaagtatttgaagatcaagtgaaagaagtcaagaagccaatacaaagcaaactttctcctaagtcaacactaagcacgagcagcctgaaaaaatttttgtcactaagtaaatgttgtcagaccacagccagtgcaaatattgaaagtactgaagcaatctcaaatcaggtaatagaatccaaggagacacatgttaaaagagctgttgctgagcttgacatggccacaccaaagacgatgcctgaaacagcctcttcatcttgggaggaaaagccccagtgtaagaaagaagaaaagaatcttgttactgaaccaacacattacttcatacacagaattatgagttcatcttcatacaaccaagaagatctcatttcatctactggtgaggctgaagattgtcactcagacccaagtgctaaaatattagaagaaagttctcaggaacaaaagccagagcatggaaacagtgttaagtttatcaccatctttgaaagatccaaggatgttcttggcagtgcaaatccctcaaaggaagtcatttcagaaactcccaagcccgatgtctccaaacaaggatctaaaatgctgacaaaaatgtcttcaactttgtcaaaggtgttttctcaatgtaacaccaatatttccagatcttcctcaccagctcaccaggatgaacactgaagcttttgtacctgatataagtatgcttacttcttttagaaaataaaatggtttttaaagcata

SEQ ID NO: 2626 - protein, 917 aa, Homo sapiens
MYLVVVTSLYENNKSRTEVEISDHNDSLLMKPLRFRETKQAGKISNSPRYAISQAYSYVDSQNISVMENTLLPYLPLQVKKDLIQMVLNKITNFVSLPLKVSPKDNPKPCFKAHLKTRSKITTLPKFTKKTHLGLSAAKAKSKTKLGPGEKTLKDSRSKTAIGLSHIMSAGDAKNLLDTKLPTSELKIYAKDIIINILETIVKEFGKVKQTKALPSDQIIAAGKIVNTVLQELYVTNNCNLAYPMKSSHLRLSQGNIGTGSLPKQQACFYLENVSSQLEHIFPREGIFKKLFDKWQTESNDKENEKCKLLMIAENVLTEISIKAKELEYSLSLLNLPPLENCESRFYNHFKGASTRAEDTKAQINMFGREIVEMLLEKLQLCFLSQIPTPDSEETLSNSKEHITAKSKYGFPNKHSLSSLPIYNTKTKDQISVGSSNQIVQEIVETVLNMLESFVDLQFKHISKYEFSEIVKMPIENLSSIQQKLLNKKMLPKLQPLKMFSDKSESNTINFKENIQNILLRVHSFHSQLLTYAVNIISDMLAVIKNKLDNEISQMEPSSISILKENIVASEIIGTLMDQCTYFNESLIQNLSRESLFQGAENAYTVNQVELATNMKMFTSKLKEGSLGINPSQVSKTGFVFCSDEDMKEKYRVSSDLPTSVRSSVEDTVKNSEPTKRPDSETMPSCSTRNKVQDHRPRESNFGSFDQTMKGNSYLPEGSFLQKLLRKASDSTEAALKQVLSFIEMGKGENLRVFHYENLKPVVEPNQIQTTISPLKICLAAENIVNTVLSSCGFPSQPHTNENREIMKPFFISKQSSLSEVSGGQKDNEKSLLRMQDKKINYIPEEENENLEASREDSSFLQKLKKKEYPKIETVKEVEAFTFADHEMGSNEVHLIARHVTTSVVTYLKNFETTGRC

SEQ ID NO: 2627 - DNA, 3884 bp, Homo sapiens
tacagaatatgagaaggaagtacttggatcagattctgaaataggctataaaaagaagattgacaatgcaagggaaagctcatttaaaaaagatgacaagctctttcagttatcctccttgaagtccaagagaaatctagggactacaacagatactttggaaataagaattcgaacatcaagcaatgaggggagaagagactctccaacacaaacgtgtagggatgaggaacaccactcagattatgaacatgttcaaaatgtcattgaaaatatttttgaagatgttttagaactatcttcttctccagaaccagcatattattcgaaactcagttatgaccaaagccccccaggtgataatgtattaaatgtaattcaagagattagcagggattcggcacagtctgttacaacaaaaaaagtatcctcctcaactaacaaaaatatctctgccaaagaaaaagaagaggaagagagagaaaaagagaaagtaagagaggagattaaaagtgaacccagtaaaccagatgatcctcaaaaccaacgagaaagtaaacctggaatttttcccgctaagtttttagaagatgttattactgagatggttaaacaattgatcttttcttctataccagaaacacaaatacaagatagatgtcaaaatgttagtgataagcaaaatcaagccaaactctatgacactgctatgaaactcatcaattcactgttaaaggagttctcagatgctcaaattaaggttttcaggccagataagggaaatcagttccctgggggtaaagtgtcttcagttcctaaagtacctccaaggtataaagagccaactacagatgaagcaccatccagcattaagataaaatctgcagataaaatgccacctatgcataaaatgatgagaaaaccttcttcagataagataccatcaattgacaaaacattggtcaataaagttgttcactcctctgtttgtaatattttaaatgactatggatctcaagactctatttggaagaatataaacagtaatggagaaaatttagcaagaagactaactagtgcagtgataaatgaaattttccaacgtcaggttaacttgatattttgtgatgaggtttcagtttcagcatgtttgcctctggaatctaaggatgttgttaaaaaggtccaaaagttggcccaaacagccagcaaagaatgtcaaacttcatcaccatatacaataatattacctcataaatttttggagaatgtgatttctgctcttttctccaaaattttctcaacaatatccagcacaaaaacaaaagaacctgaggacaatttgtccacagaactgaatttccttcaaatgaagttagtaagtgcagttgcaacagagatctcccaagataaatatatgactatacagtatgtagaaaccttacaatctgatgatgatgaaattattcaattagtggttcagtctgtttataataatctcttgccacagtttggatcacaagagattatacaaaattgtgtaaccagtggatgcaaaatcctttcagaaaacatagttgacttgcccctacctaaaccttcacatgctgataagctgtcttataacataatagaagaaattgctgtgaaatttttatcaaagcttttatctatatttccaaaagtacataaagaaagaacaaaatctctagagactgatatgcaaaaaataacttcaaaagtactaaattcagtccaagaatttatctccaaaagtaagattaaacttgtaccacccaccaaggaatcacctactgtgcctgtagctgataatgcaactattgaaaacatagttaattctatttataccagtgttttaaagcactctggctcttatacttctgtatttaaagatttaatgggtaaaagcaatgtcctctctgatacaataggctttttaatggtgaatgcaatttcgaattctgaatttcaacctcaagtagaggaagaagtatcaaattcagaattagttctggaagctgtcaaaattatggaaaaagtgatcaaaattattgatgaacttaagtctaaggaaaagtcttcatccagaaaaggtttgacattagatgccaaacttttagaagaggtgttggccttgttcttggctaaactaataaggttgccaagttcctcaagcaaagatgaaaaaaacttatcaaagactgagttaaataaaattgcatctcaactgtcaaaattggtaacagctgaaatttccagaagtagcattagtctaatagcttctgatcctgaagagcactgtttaaatccagaaaatacagaaaggatttatcaggttgtcgattccgtttatagtaacatactgcaacaatcaggaaccaacaaagaattttattatgatataaaagatacaaatacagcctttcctaaaaaagtggctagtttaattattgatggagtttcaagttttccattagatacaattaactcaacaatttcaaatgctgatctctctggagagctagacgttaatagaattgttcaaaaggcccaagaacatgcttttaatgtgattcctgaattagagcaagaaaagttagatcaaaatttatctgaagaggaatctccaattaaaatagttccacatgttggaaaaaaaccagtcaaaatagatccaaaaattatttcagaacacttagcagttatttctataaaaactcaacctcttgagaaacttaagcaggagtgtttgaaaagaactggacatagcatagcagaactgagaagagcatcaataagtgggagaaattactccttaggatcacctgatttagaaaagagaaagacagaaagacgtacctcattggataagactggaagactggatgtaaaacccctagaggccgttgctagaaattcatttcagaatataagaaagcctgatattacaaaggtggagctcttaaaagatgttcaaagtaaaaatgatcttattgttcgattagtagctcatgatattgatcaagtgtatttggaaaattacataaaagaggaacgagattctgatgaagatgaagttgttttaacacagacttttgcaaaagaagaaggcatcaaagtatttgaagatcaagtgaaagaagtcaagaagccaatacaaagcaaactttctcctaagtcaacactaagcacgagcagcctgaaaaaatttttgtcactaagtaaatgttgtcagaccacagccagtgcaaatattgaaagtactgaagcaatctcaaatcaggtaatagaatccaaggagacacatgttaaaagagctgttgctgagcttgacatggccacaccaaagacgatgcctgaaacagcctcttcatcttgggaggaaaagccccagtgtaagaaagaagaaaagaatcttgttactgaaccaacacattacttcatacacagaattatgagttcatcttcatacaaccaagaagatctcatttcatctactggtgaggctgaagattgtcactcagacccaagtgctaaaatattagaagaaagttctcaggaacaaaagccagagcatggaaacagtgttaagtttatcaccatctttgaaagatccaaggatgttcttggcagtgcaaatccctcaaaggaagtcatttcagaaactcccaagcccgatgtctccaaacaaggatctaaaatgctgacaaaaatgtcttcaactttgtcaaaggtgttttctcaatgtaacaccaatatttccagatcttcctcaccagctcaccaggatgaacactgaagcttttgtacctgatataagtatgcttacttcttttagaaaataaaatggtttttaaagcata

SEQ ID NO: 2628 - protein, 1071 aa, Homo sapiens
MVKQLIFSSIPETQIQDRCQNVSDKQNQAKLYDTAMKLINSLLKEFSDAQIKVFRPDKGNQFPGGKVSSVPKVPPRYKEPTTDEAPSSIKIKSADKMPPMHKMMRKPSSDKIPSIDKTLVNKVVHSSVCNILNDYGSQDSIWKNINSNGENLARRLTSAVINEIFQRQVNLIFCDEVSVSACLPLESKDVVKKVQKLAQTASKECQTSSPYTIILPHKFLENVISALFSKIFSTISSTKTKEPEDNLSTELNFLQMKLVSAVATEISQDKYMTIQYVETLQSDDDEIIQLVVQSVYNNLLPQFGSQEIIQNCVTSGCKILSENIVDLPLPKPSHADKLSYNIIEEIAVKFLSKLLSIFPKVHKERTKSLETDMQKITSKVLNSVQEFISKSKIKLVPPTKESPTVPVADNATIENIVNSIYTSVLKHSGSYTSVFKDLMGKSNVLSDTIGFLMVNAISNSEFQPQVEEEVSNSELVLEAVKIMEKVIKIIDELKSKEKSSSRKGLTLDAKLLEEVLALFLAKLIRLPSSSSKDEKNLSKTELNKIASQLSKLVTAEISRSSISLIASDPEEHCLNPENTERIYQVVDSVYSNILQQSGTNKEFYYDIKDTNTAFPKKVASLIIDGVSSFPLDTINSTISNADLSGELDVNRIVQKAQEHAFNVIPELEQEKLDQNLSEEESPIKIVPHVGKKPVKIDPKIISEHLAVISIKTQPLEKLKQECLKRTGHSIAELRRASISGRNYSLGSPDLEKRKTERRTSLDKTGRLDVKPLEAVARNSFQNIRKPDITKVELLKDVQSKNDLIVRLVAHDIDQVYLENYIKEERDSDEDEVVLTQTFAKEEGIKVFEDQVKEVKKPIQSKLSPKSTLSTSSLKKFLSLSKCCQTTASANIESTEAISNQVIESKETHVKRAVAELDMATPKTMPETASSSWEEKPQCKKEEKNLVTEPTHYFIHRIMSSSSYNQEDLISSTGEAEDCHSDPSAKILEESSQEQKPEHGNSVKFITIFERSKDVLGSANPSKEVISETPKPDVSKQGSKMLTKMSSTLSKVFSQCNTNISRSSSPAHQDEH

SEQ ID NO: 2629 - DNA, 440 bp, Homo sapiens
ctcttgagaaacttaagcaggagtgtttgaaaagaactggacatagcatagcagaactgagaagagcatcaataagtgggagaaattactccttaggatcacctgatttagaaaagagaaagacaaaagttctcaggaacaaaagccagagcatggaaacagtgttaagtttatcaccatctttgaaagatccaaggatgttcttggcagtgcaaatccctcaaaggaagtcatttcagaaactcccaagcccgatgtctccaaacaaggatctaaaatgctgacaaaaatgtcttcaactttgtcaaaggtgttttctcaatgtaacaccaatatttccagatcttcctcaccagctcaccaggatgaacactgaagcttttgtacctgatataagtatgcttacttcttttagaaaataaaatggtttttaaagcata

SEQ ID NO: 2630 - protein, 43 aa, Homo sapiens
METVLSLSPSLKDPRMFLAVQIPQRKSFQKLPSPMSPNKDLKC

SEQ ID NO: 2631 - DNA, 1280 bp, Homo sapiens
agactgctgttaaactggctcactccatatactctgtgctacagcaatttaatatttcattaaaaagcattaatgatggctccagtgaatttctcctattcaagctccataatgacagcagttcaagcgagtgttgatctctgagtgatgcaacacaaaaacatcgcctaacaaaggaacacttggagtactactcatattctctgcaacttgaggagaaaaagaagtgttctataagaagtttggacaagactctgcaagaagttaagaggtccttaaaggcaactgtgaattaacggagactagttttgagaaaatcagtcctgatttgtttctcctggagttttcttctttatgtgatccttcataaaagctgctaatatgggaaagattgaaatcagcaagtttctggctgtaagctaaaagaggctcttgaatcatatttccgcctgcttagcaaatttctcttgcgacaattggatgttatttggggttccatactagcaggaagaagtacaagcaaagctaagtcattttgagaataaatattatctctctatatatttgtaaatgttattttctttttttttgaggtttatgattgatccttggcatgtgtccccttgtgtattgctctactaaaaatagcctaaaaaagaattttcccctcgatgtggagcttctctttagttacaattctactttctccttcacttgagtatcagtcttcagagaactaccataacaaaggagtggatacagatatacgcaaaaaagtctatgagaaaattagtacattaaatttgtgaaagctcatttaaagtaattttctactaacaattttaatcaaatgtattaatcatatttctatgcttagtgatgttaaataaaaatttaaaaggtggcaatcaataaacagagataaaagcttctcaagaataaatgaaaggaagtaataaaaagactcactaagctgaattgcctcctatcaacagcagctgataaaatattaaaagatttgccttgtgtaatgtctctggagagctgtcttactgatgtacgaggccatgattgacaactttgagactttgctggaagcgacaaaagtatatctataatattatgctgaattgcataggtctttcttcttaaatgaggctagaaataacataccaccaagtgtttggcttttaggaaattgagcattttctttagttctagctgcagtttaatttcctcagaattagacattatgcggtatctggaacgttaaaaaaaaa

SEQ ID NO: 2632 - protein, 45 aa, Homo sapiens [sequence omitted]

SEQ ID NO: 2633 - DNA, 1222 bp, Homo sapiens
aggaaaagaagaaagctgaaaacacactgaggattatgggagaggggcaagtgcatgaagcttctcaatgacatacagacactctaaaagctcaagagatcaattattcaacttcaagaactgaaatttgaacacagattttgagcttccaaatcaggagaaaaagaagtgttctataagaagtttggacaagactctgcaagaagttaagaggtccttaaaggcaactgtgaattaacggagactagttttgagaaaatcagtcctgatttgtttctcctggagttttcttctttatgtgatccttcataaaagctgctaatatgggaaagattgaaatcagcaagtttctggctgtaagctaaaagaggctcttgaatcatatttccgcctgcttagcaaatttctcttgcgacaattggatgttatttggggttccatactagcaggaagaagtacaagcaaagctaagtcattttgagaataaatattatctctctatatatttgtaaatgttattttctttttttttgaggtttatgattgatccttggcatgtgtccccttgtgtattgctctactaaaaatagcctaaaaaagaattttcccctcgatgtggagcttctctttagttacaattctactttctccttcacttgagtatcagtcttcagagaactaccataacaaaggagtggatacagatatacgcaaaaaagtctatgagaaaattagtacattaaatttgtgaaagctcatttaaagtaattttctactaacaattttaatcaaatgtattaatcatatttctatgcttagtgatgttaaataaaaatttaaaaggtggcaatcaataaacagagataaaagcttctcaagaataaatgaaaggaagtaataaaaagactcactaagctgaattgcctcctatcaacagcagctgataaaatattaaaagatttgccttgtgtaatgtctctggagagctgtcttactgatgtacgaggccatgattgacaactttgagactttgctggaagcgacaaaagtatatctataatattatgctgaattgcataggtctttcttcttaaatgaggctagaaataacataccaccaagtgtttggcttttaggaaattgagcattttctttagttctagctgcagtttaatttcctcagaattagacattatgcggtatctggaacgttaaaaaaaaa

SEQ ID NO: 2634 - protein, 45 aa, Homo sapiens [sequence omitted]

SEQ ID NO: 2635 - DNA, 1067 bp, Homo sapiens
agcaggaaaagaagaaagctgaaaacacactgaggattatgggagaggggcaagtgcatgaagcttctcaatgacatacagacactctaaaagctcaagagatcaattattcaacttcaagaactgaaatttgaacacagattttgagcttccaaatcagctgctaatatgggaaagattgaaatcagcaagtttctggctgtaagctaaaagaggctcttgaatcatatttccgcctgcttagcaaatttctcttgcgacaattggatgttatttggggttccatactagcaggaagaagtacaagcaaagctaagtcattttgagaataaatattatctctctatatatttgtaaatgttattttctttttttttgaggtttatgattgatccttggcatgtgtccccttgtgtattgctctactaaaaatagcctaaaaaagaattttcccctcgatgtggagcttctctttagttacaattctactttctccttcacttgagtatcagtcttcagagaactaccataacaaaggagtggatacagatatacgcaaaaaagtctatgagaaaattagtacattaaatttgtgaaagctcatttaaagtaattttctactaacaattttaatcaaatgtattaatcatatttctatgcttagtgatgttaaataaaaatttaaaaggtggcaatcaataaacagagataaaagcttctcaagaataaatgaaaggaagtaataaaaagactcactaagctgaattgcctcctatcaacagcagctgataaaatattaaaagatttgccttgtgtaatgtctctggagagctgtcttactgatgtacgaggccatgattgacaactttgagactttgctggaagcgacaaaagtatatctataatattatgctgaattgcataggtctttcttcttaaatgaggctagaaataacataccaccaagtgtttggcttttaggaaattgagcattttctttagttctagctgcagtttaatttcctcagaattagacattatgcggtatctggaacgttaaaaaaaaa

SEQ ID NO: 2636 - protein, 45 aa, Homo sapiens [sequence omitted]

SEQ ID NO: 2637 - DNA, 741 bp, Homo sapiens
aggagggggcagggacgggacgtgggaaaatgactacgcgtcactcgtgatgtcgcgcatccgataggcccttttcagatggcaaaaggcctgagggtgaatctgggcgagctggttgagtccatgcgtttgtgcttcctctcagtccactttcgcttacgatggggcgactcttgtccatcgtcacctcaccgggaaacttttcctgccgggccagttaatggtcccctgtaccatccccatcctgagtgactactaagcagccgcagcgactcggggttgctccgtgaccacgttactcagttaaccttcttgttccctggagaggcggagctgaatggcccggacggggtttctccatgtttcccaggctggtctcaaactcctggactcaagcaatctgcccaccttgcctcccaaaatgctcctccaaaaaaggagtgtgccgccacacccagcctgagcaacttttgtttttaagtataaactgagagagaagactgcccaagttctggcctatagacagaagacttctaacagtgaaggacatgtttgcttccctttccaccatgattgcaagtttcctgaggcctccctagccatgctgaactcacagtttttaaagtatctagtgtatataaggacaagccattctcagtcaagcatgaaactgaatctgaggaaaagaagaaagctgaaaacacactgaggattatgggagaggggcaagtgcatgaagct

SEQ ID NO: 2638 - protein, 43 aa, Homo sapiens
MFPRLVSNSWTQAICPPCLPKCSSKKGVCRHTQPEQLLFLSIN

SEQ ID NO: 2639 - DNA, 811 bp, Homo sapiens
actcttgttgcccaggctggagtgcaatggcgcgatctcggctcaccacaatctctgcctcccaggttcaagcaattctcctgcctcagcctccggagtagctgtgattacaggcatgcaccaccacggctggctaattttgtatttttagtagagatgggggtttcaccatgttggtcaggctggtctcgaactcccgatctcagggaatatctttctccaccactttctcttagatttatgtgagtcctcatgtatcaggccaaggcggtgggaccgaagttacctctggagtatgaaaataagcaacaccattatgaaaagtcaaaagaactttggagtcaaacagtcctgcatttgaaggctagtgctaccactcaccattaggctatttaaccccatacttcttaaagttggataagggatggatggtataccaggagatatgaaaaagcagaggctgaacatagtaatcttcctacagaatcagttttattcaattgtttttgggaaatatttttatattcaaataaacaatatgatattatggaacagaatgcaaattatacatgatgtttttgcataaatcatgagactttaaagaaaatttgcaattccagtatgctgcagtgggttaggaaccacaacatgccaagattaactctcctctacctttaggagtatttcagcagaaacatttttaaaacaatgactttatctttttgggattgaattttctatttacaaaaatagagataacaatacatcatgggattctatgaagattaaatgaaaactcataacattgacc

SEQ ID NO: 2640 - protein, 44 aa, Homo sapiens
MYQAKAVGPKLPLEYENKQHHYEKSKELWSQTVLHLKASATTHH

SEQ ID NO: 2641 - DNA, 2991 bp, Homo sapiens
agatctcgaggttgattctcaaggggaggggccagtgagggcacattgctttggaggagtagtttaataaactctctagtgctggaagttttagcaaacggaggagccttcaaacccggcaacagtccccatctaggtgtttccgtaacacatgcggaattattgctagtggaatttcaggctttctttgttgtttaactcaatgcatcgctaattgtttataatgaacttagatgttgcctccacctgagccttgctattgctaacattaaaatattttgtaggcctggcgcgatggctcccgcctgtaatcccagcactttgggaggccaaggtgggcggatcacgaggtcaggagatcgagaccatcctggccaaaatgcaaacatcaaaccagatgcaaacagattcattatctccatcccctaatcctgtgtcacctgtgcctttgaataacccaacaagtgccccaagatatggaacagtgatccctaatcgcatctttgtaggaggaattgattttaagacaaacgaaagtgatttaagaaaatttttttcccagtatgggtctgtgaaagaagtgaagattgtaaatgacagagctggagtatccaaagggtatggtttcgtcacttttgaaacacaagaagatgcacaaaaaattttacaagaggctgaaaaacttaattataaggataagaagctgaacattggtccagcaataagaaaacaacaagtagggatccctcgttctagtataatgccagcagctggaacaatgtatctaacaacttcaactggatatccttatacttaccataatggtgttgcttattttcatactccagaggtaacttcggtcccaccgccttggccttcacgttctgtatgtagctcccctgtgatggtagctcagcccatttatcagcaacctgcatatcactaccagggaattaaacaatgtcatacaagaagatggatggactctttgcttccttttaccaaatgtgatgaggccaccacacagtatttaccaggacagtggcagtggagtgttcctcagccttctgcctcttctgctccattcttatacctgcaaccttctgaggttatttatcaaccagtggaaattgcacaggatggtggatgtgttcctcctccactgtctctgatggaaacttcagttccagagccttattctgatcatggagttcaagcaacatatcaccaggtttatgctccaagtgccatcactatgcctgcgcctgtgatgcagcctgagccaattaaaacagtgtggagcattcattattaagacaattgggcagctctattccagctcaactgatttcttgtccaatgatccttgcgtggccgagatccagcttcaacgaaccagctagaagctgcccgttgtgaaacttagtgttagttaatacctcaccatactcagttattccactataagctgtctaaatttgatgaaatttgctttttcagctgttctacaaaattatttaggtagatgtggcatgttggttttttatgtgctaacctaactgtaatgaccttttctacaacatgttttatccattccataaataataaccacattgggaatagtgaggtgtcttttattttctctgctttgtgttattttttcttatcaaacaattagatgttatgtttcatattatttgatatttattttcatatttaggataagaatcatttttaattataatacttttaatactttcatatattttacaacagtatactatttaatattaatgacaattctatttttgctttgctgttttgtcatttaatatgcttttgtctaatttttaattcatttattactgttactccttatttaattttgcgtctgccatggttttcagaatctgaatagtatttatacttcttttttataacattttccaaatattagaaataccatcaacatgatcagtattcttgccttttcatgtaatttgactatattaaattttttctccagtgtttgagacaatattgaaatcttcctataacataatttatttggtatcaaattttataaaatatggatccacctttggaattttgataaaagggttcatctctgacatgatcccataacactgactgaaattccaccaaattactgttctttgaatgctttaatccttaaaccttttcttctgatatgcaaccaatatattcaattatatatgtgattaatttttaaaaggacaattgttttcataaaatgcaaaactattttttacaccaaaggaaaattttagattctgattctaaatccgatttttactataaaattggaaaatagatgggaggggtgtcattcattgttcaaaaggtacagaacaaatcataggggtttttaatctctaaaatttctacagtagtacaggaaatattcctctttacattcatttgcagttctttcactgacctcctaattttaggtggagggggcagggggagccataaaagttggtattaccctaataaatctatctctttcctcccctgtttcaaccccacatgtattccatgctcagcagcagcagcagaaatagtaggatatagatcacaaaggtttttctggtgagtcaaatagggtgttttcttttgaaactgtaatgaatatgtttgccagtcaaatggcttcatgagaacagtagaaccttatgaatgtatactagcatacaaggatctcaaatacattaattattctcagttttaggaatgtaaatagattaagtcccacaatgaaatttcagaagtttttgttctgtaagtaaaaaattactaaccactgatgttcaagattttcttttaatagcactatccttgagaaccaaaaagtttatgttttgattttcaaatgttaaacaagatgctaaacaaatcctggactgttaataaaaattaattatgtattattggataaggaatttt

SEQ ID NO: 2642 - protein, 311 aa, Homo sapiens
MQTSNQMQTDSLSPSPNPVSPVPLNNPTSAPRYGTVIPNRIFVGGIDFKTNESDLRKFFSQYGSVKEVKIVNDRAGVSKGYGFVTFETQEDAQKILQEAEKLNYKDKKLNIGPAIRKQQVGIPRSSIMPAAGTMYLTTSTGYPYTYHNGVAYFHTPEVTSVPPPWPSRSVCSSPVMVAQPIYQQPAYHYQGIKQCHTRRWMDSLLPFTKCDEATTQYLPGQWQWSVPQPSASSAPFLYLQPSEVIYQPVEIAQDGGCVPPPLSLMETSVPEPYSDHGVQATYHQVYAPSAITMPAPVMQPEPIKTVWSIHY

SEQ ID NO: 2643 - DNA, 2838 bp, Homo sapiens
aatcagggagcgccgcgcgagggtggggaccagctgcgcacgaggccagcggcggggtcgctgccgttgaggcttcccgccactgctgctggcggatttgtggggcaaaatttctcgctggctagccttcttttccctcccgcactttggtggggagggggtggatcctcgtttcggtgcccaagttcacgatgacccgagagaactcgaggaagttgtcgccgcggccatttcccccagtgccgcaacttgctggccttggagggggaggagcgccgaggcagtgactgcgacgcaaacatcaaaccagatgcaaacagattcattatctccatcccctaatcctgtgtcacctgtgcctttgaataacccaacaagtgccccaagatatggaacagtgatccctaatcgcatctttgtaggaggaattgattttaagacaaacgaaagtgatttaagaaaatttttttcccagtatgggtctgtgaaagaagtgaagattgtaaatgacagagctggagtatccaaagggtatggtttcgtcacttttgaaacacaagaagatgcacaaaaaattttacaagaggctgaaaaacttaattataaggataagaagctgaacattggtccagcaataagaaaacaacaagtagggatccctcgttctagtataatgccagcagctggaacaatgtatctaacaacttcaactggatatccttatacttaccataatggtgttgcttattttcatactccagaggtaacttcggtcccaccgccttggccttcacgttctgtatgtagctcccctgtgatggtagctcagcccatttatcagcaacctgcatatcactaccaggccaccacacagtatttaccaggacagtggcagtggagtgttcctcagccttctgcctcttctgctccattcttatacctgcaaccttctgaggttatttatcaaccagtggaaattgcacaggatggtggatgtgttcctcctccactgtctctgatggaaacttcagttccagagccttattctgatcatggagttcaagcaacatatcaccaggtttatgctccaagtgccatcactatgcctgcgcctgtgatgcagcctgagccaattaaaacagtgtggagcattcattattaagacaattgggcagctctattccagctcaactgatttcttgtccaatgatccttgcgtggccgagatccagcttcaacgaaccagctagaagctgcccgttgtgaaacttagtgttagttaatacctcaccatactcagttattccactataagctgtctaaatttgatgaaatttgctttttcagctgttctacaaaattatttaggtagatgtggcatgttggttttttatgtgctaacctaactgtaatgaccttttctacaacatgttttatccattccataaataataaccacattgggaatagtgaggtgtcttttattttctctgctttgtgttattttttcttatcaaacaattagatgttatgtttcatattatttgatatttattttcatatttaggataagaatcatttttaattataatacttttaatactttcatatattttacaacagtatactatttaatattaatgacaattctatttttgctttgctgttttgtcatttaatatgcttttgtctaatttttaattcatttattactgttactccttatttaattttgcgtctgccatggttttcagaatctgaatagtatttatacttcttttttataacattttccaaatattagaaataccatcaacatgatcagtattcttgccttttcatgtaatttgactatattaaattttttctccagtgtttgagacaatattgaaatcttcctataacataatttatttggtatcaaattttataaaatatggatccacctttggaattttgataaaagggttcatctctgacatgatcccataacactgactgaaattccaccaaattactgttctttgaatgctttaatccttaaaccttttcttctgatatgcaaccaatatattcaattatatatgtgattaatttttaaaaggacaattgttttcataaaatgcaaaactattttttacaccaaaggaaaattttagattctgattctaaatccgatttttactataaaattggaaaatagatgggaggggtgtcattcattgttcaaaaggtacagaacaaatcataggggtttttaatctctaaaatttctacagtagtacaggaaatattcctctttacattcatttgcagttctttcactgacctcctaattttaggtggagggggcagggggagccataaaagttggtattaccctaataaatctatctctttcctcccctgtttcaaccccacatgtattccatgctcagcagcagcagcagaaatagtaggatatagatcacaaaggtttttctggtgagtcaaatagggtgttttcttttgaaactgtaatgaatatgtttgccagtcaaatggcttcatgagaacagtagaaccttatgaatgtatactagcatacaaggatctcaaatacattaattattctcagttttaggaatgtaaatagattaagtcccacaatgaaatttcagaagtttttgttctgtaagtaaaaaattactaaccactgatgttcaagattttcttttaatagcactatccttgagaaccaaaaagtttatgttttgattttcaaatgttaaacaagatgctaaacaaatcctggactgttaataaaaattaattatgtattattggataaggaatttt

SEQ ID NO: 2644 - protein, 283 aa, Homo sapiens; identical to SEQ ID NO: 202

SEQ ID NO: 2645 - DNA, 3135 bp, Homo sapiens
acaccagtcttcggaagtcgcccgtcaaccggcttcttctacctcagtaaagccttaaggtcacctcaacctctcgaaacccaccagtcccagaggccgactcttctcaagtggaggagaggggaaggcgtgcatggagctttgcctgaccgctcgctctctcctccccagccgtctgagagaaggcgagaggggtcccagaaccgagccctcgctccgcacgccccacgcccgccccgctgtgccgtgcgctctgcccctgagacgccccggctcggagtcccagggccacagccgaaactcgccctcccgcgcccctctccggcttgcagcgcccgcccgcaccgccacctgccacccgaggcgacgcagtccgcttctccccacccgccaggtggcaggttcagggccggggtccgagcctgcttccctgcagctgccacagccaccctcgccgccagggggcgagagtcccaggcaggacaagcagcgctgctgccttggcgtgaaggtggtttcaaactttaggcttcttttccctaccccgcgtctctgaagagcagagaggaagatggaaaccgagtccgggccgcaaacatcaaaccagatgcaaacagattcattatctccatcccctaatcctgtgtcacctgtgcctttgaataacccaacaagtgccccaagatatggaacagtgatccctaatcgcatctttgtaggaggaattgattttaagacaaacgaaagtgatttaagaaaatttttttcccagtatgggtctgtgaaagaagtgaagattgtaaatgacagagctggagtatccaaagggtatggtttcgtcacttttgaaacacaagaagatgcacaaaaaattttacaagaggctgaaaaacttaattataaggataagaagctgaacattggtccagcaataagaaaacaacaagtagggatccctcgttctagtataatgccagcagctggaacaatgtatctaacaacttcaactggatatccttatacttaccataatggtgttgcttattttcatactccagaggtaacttcggtcccaccgccttggccttcacgttctgtatgtagctcccctgtgatggtagctcagcccatttatcagcaacctgcatatcactaccaggccaccacacagtatttaccaggacagtggcagtggagtgttcctcagccttctgcctcttctgctccattcttatacctgcaaccttctgaggttatttatcaaccagtggaaattgcacaggatggtggatgtgttcctcctccactgtctctgatggaaacttcagttccagagccttattctgatcatggagttcaagcaacatatcaccaggtttatgctccaagtgccatcactatgcctgcgcctgtgatgcagcctgagccaattaaaacagtgtggagcattcattattaagacaattgggcagctctattccagctcaactgatttcttgtccaatgatccttgcgtggccgagatccagcttcaacgaaccagctagaagctgcccgttgtgaaacttagtgttagttaatacctcaccatactcagttattccactataagctgtctaaatttgatgaaatttgctttttcagctgttctacaaaattatttaggtagatgtggcatgttggttttttatgtgctaacctaactgtaatgaccttttctacaacatgttttatccattccataaataataaccacattgggaatagtgaggtgtcttttattttctctgctttgtgttattttttcttatcaaacaattagatgttatgtttcatattatttgatatttattttcatatttaggataagaatcatttttaattataatacttttaatactttcatatattttacaacagtatactatttaatattaatgacaattctatttttgctttgctgttttgtcatttaatatgcttttgtctaatttttaattcatttattactgttactccttatttaattttgcgtctgccatggttttcagaatctgaatagtatttatacttcttttttataacattttccaaatattagaaataccatcaacatgatcagtattcttgccttttcatgtaatttgactatattaaattttttctccagtgtttgagacaatattgaaatcttcctataacataatttatttggtatcaaattttataaaatatggatccacctttggaattttgataaaagggttcatctctgacatgatcccataacactgactgaaattccaccaaattactgttctttgaatgctttaatccttaaaccttttcttctgatatgcaaccaatatattcaattatatatgtgattaatttttaaaaggacaattgttttcataaaatgcaaaactattttttacaccaaaggaaaattttagattctgattctaaatccgatttttactataaaattggaaaatagatgggaggggtgtcattcattgttcaaaaggtacagaacaaatcataggggtttttaatctctaaaatttctacagtagtacaggaaatattcctctttacattcatttgcagttctttcactgacctcctaattttaggtggagggggcagggggagccataaaagttggtattaccctaataaatctatctctttcctcccctgtttcaaccccacatgtattccatgctcagcagcagcagcagaaatagtaggatatagatcacaaaggtttttctggtgagtcaaatagggtgttttcttttgaaactgtaatgaatatgtttgccagtcaaatggcttcatgagaacagtagaaccttatgaatgtatactagcatacaaggatctcaaatacattaattattctcagttttaggaatgtaaatagattaagtcccacaatgaaatttcagaagtttttgttctgtaagtaaaaaattactaaccactgatgttcaagattttcttttaatagcactatccttgagaaccaaaaagtttatgttttgattttcaaatgttaaacaagatgctaaacaaatcctggactgttaataaaaattaattatgtattattggataaggaatttt

SEQ ID NO: 2646 - protein, 295 aa, Homo sapiens; identical to SEQ ID NO: 204

SEQ ID NO: 2647 - DNA, 1621 bp, Homo sapiens
agatctcgaggttgattctcaaggggaggggccagtgagggcacattgctttggaggagtagtttaataaactctctagtgctggaagttttagcaaacggaggagccttcaaacccggcaacagtccccatctaggtgtttccgtaacacatgcggaattattgctagtggaatttcaggctttctttgttgtttaactcaatgcatcgctaattgtttataatgaacttagatgttgcctccacctgagccttgctattgctaacattaaaatattttgtaggcctggcgcgatggctcccgcctgtaatcccagcactttgggaggccaaggtgggcggatcacgaggtcaggagatcgagaccatcctggccaaaatgcaaacatcaaaccagatgcaaacagattcattatctccatcccctaatcctgtgtcacctgtgcctttgaataacccaacaagtgccccaagatatggaacagtgatccctaatcgcatctttgtaggaggaattgattttaagacaaacgaaagtgatttaagaaaatttttttcccagtatgggtctgtgaaagaagtgaagattgtaaatgacagagctggagtatccaaagggtatggtttcgtcacttttgaaacacaagaagatgcacaaaaaattttacaagaggctgaaaaacttaattataaggataagaagctgaacattggtccagcaataagaaaacaacaagtagggatccctcgttctagtataatgccagcagctggaacaatgtatctaacaacttcaactggatatccttatacttaccataatggtgttgcttattttcatactccagaggtaacttcggtcccaccgccttggccttcacgttctgtatgtagctcccctgtgatggtagctcagcccatttatcagcaacctgcatatcactaccagggaattaaacaatgtcatacaagaagatggatggactctttgcttccttttaccaaatgtgatgaggccaccacacagtatttaccaggacagtggcagtggagtgttcctcagccttctgcctcttctgctccattcttatacctgcaaccttctgaggttatttatcaaccagtggaaattgcacaggatggtggatgtgttcctcctccactgtctctgatggaaacttcagttccagagccttattctgatcatggagttcaagcaacatatcaccaggtttatgctccaagtgccatcactatgcctgcgcctgtgatgcagcctgagccaattaaaacagtgtggagcattcattattaagacaattgggcagctctattccagctcaactgatttcttgtccaatgatccttgcgtggccgagatccagcttcaacgaaccagctagaagctgcccgttgtgaaacttagtgttagttaatacctcaccatactcagttattccactataagctgtctaaatttgatgaaatttgctttttcagctgttctacaaaattatttaggtagatgtggcatgttggttttttatgtgctaacctaactgtaatgaccttttctacaacatgttttatccattccataaataataaccacattgggaat

SEQ ID NO: 2648 - protein, 311 aa, Homo sapiens; identical to SEQ ID NO: 2642

SEQ ID NO: 2649 - DNA, 1443 bp, Homo sapiens
gggaccagctgcgcacgaggccagcggcggggtcgctgccgttgaggcttcccgccactgctgctggcggatttgtggggcaaaatttctcgctggctagccttcttttccctcccgcactttggtggggagggggtggatcctcgtttcggtgcccaagttcacgatgacccgagagaactcgaggaagttgtcgccgcggccatttcccccagtgccgcaacttgctggccttggagggggaggagcgccgaggcagtgactgcgacgcaaacatcaaaccagatgcaaacagattcattatctccatcccctaatcctgtgtcacctgtgcctttgaataacccaacaagtgccccaagatatggaacagtgatccctaatcgcatctttgtaggaggaattgattttaagacaaacgaaagtgatttaagaaaatttttttcccagtatgggtctgtgaaagaagtgaagattgtaaatgacagagctggagtatccaaagggtatggtttcgtcacttttgaaacacaagaagatgcacaaaaaattttacaagaggctgaaaaacttaattataaggataagaagctgaacattggtccagcaataagaaaacaacaagtagggatccctcgttctagtataatgccagcagctggaacaatgtatctaacaacttcaactggatatccttatacttaccataatggtgttgcttattttcatactccagaggtaacttcggtcccaccgccttggccttcacgttctgtatgtagctcccctgtgatggtagctcagcccatttatcagcaacctgcatatcactaccaggccaccacacagtatttaccaggacagtggcagtggagtgttcctcagccttctgcctcttctgctccattcttatacctgcaaccttctgaggttatttatcaaccagtggaaattgcacaggatggtggatgtgttcctcctccactgtctctgatggaaacttcagttccagagccttattctgatcatggagttcaagcaacatatcaccaggtttatgctccaagtgccatcactatgcctgcgcctgtgatgcagcctgagccaattaaaacagtgtggagcattcattattaagacaattgggcagctctattccagctcaactgatttcttgtccaatgatccttgcgtggccgagatccagcttcaacgaaccagctagaagctgcccgttgtgaaacttagtgttagttaatacctcaccatactcagttattccactataagctgtctaaatttgatgaaatttgctttttcagctgttctacaaaattatttaggtagatgtggcatgttggttttttatgtgctaacctaactgtaatgaccttttctacaacatgttttatccattccataaataataaccacattgggaat

SEQ ID NO: 2650 - protein, 283 aa, Homo sapiens; identical to SEQ ID NO: 202

SEQ ID NO: 2651 - DNA, 1765 bp, Homo sapiens
acaccagtcttcggaagtcgcccgtcaaccggcttcttctacctcagtaaagccttaaggtcacctcaacctctcgaaacccaccagtcccagaggccgactcttctcaagtggaggagaggggaaggcgtgcatggagctttgcctgaccgctcgctctctcctccccagccgtctgagagaaggcgagaggggtcccagaaccgagccctcgctccgcacgccccacgcccgccccgctgtgccgtgcgctctgcccctgagacgccccggctcggagtcccagggccacagccgaaactcgccctcccgcgcccctctccggcttgcagcgcccgcccgcaccgccacctgccacccgaggcgacgcagtccgcttctccccacccgccaggtggcaggttcagggccggggtccgagcctgcttccctgcagctgccacagccaccctcgccgccagggggcgagagtcccaggcaggacaagcagcgctgctgccttggcgtgaaggtggtttcaaactttaggcttcttttccctaccccgcgtctctgaagagcagagaggaagatggaaaccgagtccgggccgcaaacatcaaaccagatgcaaacagattcattatctccatcccctaatcctgtgtcacctgtgcctttgaataacccaacaagtgccccaagatatggaacagtgatccctaatcgcatctttgtaggaggaattgattttaagacaaacgaaagtgatttaagaaaatttttttcccagtatgggtctgtgaaagaagtgaagattgtaaatgacagagctggagtatccaaagggtatggtttcgtcacttttgaaacacaagaagatgcacaaaaaattttacaagaggctgaaaaacttaattataaggataagaagctgaacattggtccagcaataagaaaacaacaagtagggatccctcgttctagtataatgccagcagctggaacaatgtatctaacaacttcaactggatatccttatacttaccataatggtgttgcttattttcatactccagaggtaacttcggtcccaccgccttggccttcacgttctgtatgtagctcccctgtgatggtagctcagcccatttatcagcaacctgcatatcactaccaggccaccacacagtatttaccaggacagtggcagtggagtgttcctcagccttctgcctcttctgctccattcttatacctgcaaccttctgaggttatttatcaaccagtggaaattgcacaggatggtggatgtgttcctcctccactgtctctgatggaaacttcagttccagagccttattctgatcatggagttcaagcaacatatcaccaggtttatgctccaagtgccatcactatgcctgcgcctgtgatgcagcctgagccaattaaaacagtgtggagcattcattattaagacaattgggcagctctattccagctcaactgatttcttgtccaatgatccttgcgtggccgagatccagcttcaacgaaccagctagaagctgcccgttgtgaaacttagtgttagttaatacctcaccatactcagttattccactataagctgtctaaatttgatgaaatttgctttttcagctgttctacaaaattatttaggtagatgtggcatgttggttttttatgtgctaacctaactgtaatgaccttttctacaacatgttttatccattccataaataataaccacattgggaat

SEQ ID NO: 2652 - protein, 295 aa, Homo sapiens; identical to SEQ ID NO: 204

SEQ ID NO: 2653 - DNA, 950 bp, Homo sapiens
gggaccagctgcgcacgaggccagcggcggggtcgctgccgttgaggcttcccgccactgctgctggcggatttgtggggcaaaatttctcgctggctagccttcttttccctcccgcactttggtggggagggggtggatcctcgtttcggtgcccaagttcacgatgacccgagagaactcgaggaagttgtcgccgcggccatttcccccagtgccgcaacttgctggccttggagggggaggagcgccgaggcagtgactgcgacgcaaacatcaaaccagatgcaaacagattcattatctccatcccctaatcctgtgtcacctgtgcctttgaataacccaacaagtgccccaagatatggaacagtgatccctaatcgcatctttgtaggaggaattgattttaagacaaacgaaagtgatttaagaaaatttttttcccagtatgggtctgtgaaagaagtgaagattgtaaatgacagagctggagtatccaaagggtatggtttcgtcacttttgaaacacaagaagatgcacaaaaaattttacaagaggctgaaaaacttaattataaggataagaagctgaacattggtccagcaataagaaaacaacaagtagggatccctcgttctagtataatgccagcagctggaacaatgtatctaacaacttcaactggatatccttatacttaccataatggtgttgcttattttcatactccagaggtaacttcggtcccaccgccttggccttcacgttctgtatgtagctcccctgtgatggtagctcagcccatttatcagcaacctgcatatcactaccagggaattaaacaatgtcatacaagaagatggatggactctttgcttccttttaccaaatgtgatgaggccaccacacagtatttaccaggacagtggcagtggagtgttcctca

SEQ ID NO: 2654 - protein, 220 aa, Homo sapiens
MQTDSLSPSPNPVSPVPLNNPTSAPRYGTVIPNRIFVGGIDFKTNESDLRKFFSQYGSVKEVKIVNDRAGVSKGYGFVTFETQEDAQKILQEAEKLNYKDKKLNIGPAIRKQQVGIPRSSIMPAAGTMYLTTSTGYPYTYHNGVAYFHTPEVTSVPPPWPSRSVCSSPVMVAQPIYQQPAYHYQGIKQCHTRRWMDSLLPFTKCDEATTQYLPGQWQWSV

SEQ ID NO: 2655 - DNA, 5186 bp, Homo sapiens
atcgggccgccggcgtccgggctccagaggccgcctggctgggcgcccggtgccttttgtctggcgcagggccggcgtttgcatcacatttcggatacctccctctctttttcgcctctccttctgcctcccgctcacatcgcctccccactcccgccaccgtcccccgccggactgctagcctcctagaccgaagcccgaggacgtctctgcccgagcgatgtcccctctccagaaagttgccgccgccgccgccgccgccgccactgccgccgctgggcggtgaaacaaagtctggcggggccgcctcccggtgcaggagcgcaccggtgcctagcggctggactccgctgccgggcgtcccgctttcccccggggagccctaaacgctccaggccatggccgagggcgcggccggcagggaggatccggcgccgcccgacgcggcggggggcgaagacgacccccgagtgggcccggatgccgccggggactgcgtgacggcggcctctgggggccggatgagggaccgtcgcagcggggtcgcactgccaggcgccgcggggaccccagcggacagcgaggcgggcctcctggaggcagcacgggcgaccccccggcgcagcagcatcatcaagatgggactgtgtagttgcaggaaaacagctcagagtttccactgattcttcattatggatccttcaaaccaaaaatgtggtggaagaaagaaaaccgtgtctttcagcagcatgccatcggaaaagaaaattagcagtgcaaatgactgcatcagcttcatgcaagctggctgtgagttgaagaaagtccggccaaattctcgcatttacaaccgttttttcactctggacacagaccttcaagctcttcgctgggaaccttcaaagaaagacctcgagaaagccaagcttgatatttctgccataaaagagatcagactggggaaaaacacggaaacatttagaaacaatggccttgctgaccagatctgtgaggactgtgccttttccatactccacggggaaaactatgagtctctggacctagttgccaattcagcagatgtggcaaacatctgggtgtctgggttacggtacctggtttctcgaagtaagcagcctcttgattttatggagggcaaccagaacacaccacggttcatgtggttgaaaacagtgtttgaagcagcagatgttgatgggaatgggattatgttggaagacacctctgtagagttaataaaacaactcaaccctactctgaaggaagccaagatcaggttaaagtttaaagaaatccagaagagcaaggaaaaactaaccacccgcgtgaccgaagaggaattttgtgaagctttttgtgaactttgcaccaggccagaagtgtatttcttacttgtacagatatctaaaaacaaagaatatttggatgccaatgatctcatgctctttttagaagctgagcaaggagtcacccatatcaccgaggatatatgcttagacatcataaggagatacgaactttctgaagagggacgtcaaaaagggtttcttgcaattgatggctttacccagtatttattgtcatcagaatgtgacatttttgatcctgagcaaaagaaggttgcccaagatatgacccagccattatctcactactatatcaatgcctctcataacacctatctaatagaagaccagttcagggggccagctgacatcaatgggtacattagagctttgaaaatgggctgtcgaagcgttgaactcgatgtaagtgatggttcagataatgaaccaatcctttgtaatcgaaataacatgacaacccatgtttcctttcgaagtgtcatagaggtaataaataaatttgcctttgttgcttctgaatacccactcattctttgcttgggaaatcactgctccttgccgcagcagaaggtaatggctcaacagatgaaaaaggtctttggcaataaactctatactgaagcacctttgccctcagaatcctacctcccatcaccagaaaaattaaaaagaatgatcattgtgaaaggaaagaagttgccttctgatccagatgtgttagaaggagaagtaacagatgaagatgaagaagctgaaatgtctcgaaggatgtcggtagattacaatggtgagcagaagcaaatccgactctgtagggagctctctgatttggtgtctatttgtaaatctgttcaatacagggattttgaactatctatgaaaagccaaaactattgggaaatgtgttcatttagtgaaacagaggccagccgcattgcaaatgagtacccagaggattttgttaattataataagaagttcttatcaagaatctatccaagtgccatgaggatcgattccagtaacttgaatccacaggacttttggaattgtggctgtcagattgtagcaatgaattttcagactccgggtccaatgatggaccttcacacgggctggtttcttcaaaacgggggatgtggttatgttctaaggccgtctataatgcgagatgaagtttcttacttcagcgcaaatacaaagggcattctacctggggtgtctcctctagctcttcatatcaagatcatcagtggtcagaatttcccaaagcccaagggagcttgtgccaaaggggatgtcatagatccctatgtttgtatagagatacacggaattccagcggattgttcggaacaaagaactaaaactgtacagcaaaacagtgataatcctatttttgatgaaacttttgagttccaagtaaacctacctgagctggccatgatccgttttgttgttctggatgatgactacattggggatgagtttatagggcaatatacgataccatttgaatgtttgcagcctggatatcggcatgttcccctgcgttcttttgtgggtgacatcatggagcacgtaaccctttttgtccacatagcaataactaatcgaagtggaggaggaaaggcacagaagcgcagtctttcagtgagaatggggaagaaagttcgggaatataccatgctcaggaatatcggtcttaaaaccattgatgacatctttaaaatagcggttcatccattacgagaagccatagatatgagagaaaatatgcagaatgcaatcgtgtctattaaggaactatgtggactccctccaattgccagtctgaagcagtgcctgttaactctgtcatctcggctcatcaccagtgacaatactccttcagtctcacttgtgatgaaagacagctttccttacctggagcctctgggtgcaattccagatgtgcagaaaaagatgctgactgcttatgatctgatgattcaagagagccggtttctcatagaaatggcggacacagtccaggaaaagattgtacagtgtcagaaagcagggatggagttccatgaagaacttcataatttgggggcaaaagaaggcttgaagggaagaaaactcaacaaagcaactgagagctttgcttggaacattacagtattgaagggccaaggagatctgttgaagaatgccaagaatgaagctatagaaaacatgaagcagatccagctggcatgcctgtcctgtggactgagtaaagcccccagcagcagtgctgaggccaagagcaagcgcagcctggaagccatagaggagaaggaaagtagtgaggagaatgggaagctgtgactctgggcattatcgacacgttcacccatcttatcaaggactctggtttctcattcttgttttctttctttaaatgttttataagttcacaaaatggtgccctatatggggtattggacatagatattttcacaatgtcagtatttcagtgtagttaatttatctaaattaaagcctttagtatcagtgttttaaattctgagacatgtgtcaacacccctgtgtggatgcctgtggaagagtgtgtgtgtgtgtgtgtgtgtgtgtgtgtggcagagagagagaaagagagagagagagagaaattctgttaaaatctattctgtgttgcattattcatttagtgagttattccttgatcattttgggacaattgttttaatctgaaattctaaagagcacttactgtaacctgttgctgtgtttaatttgacttctctgcctttgacatttaatttagtgatcttagcatagcttattattgaaggaagccaaatttatcaaagcatagatgttttggtagattaaatatagattagaaaaattcctaagaatcagagtagaaataaaagtgaatgaaagattaaacagatgatgagaatttctaaaaagattagcaaggtcatttcttcagtcagaaaactttaaaaaatatttattaaataaaatcaatttttaggaagttttctgtagtcatttactaaacatatgatttcactagaaaagctgatcataagtgaatttatacctacctgtgtggtactctgaaacacactgaaagctctgttgcaattaggattttgatgtgacaataatattgttgtataatttcgagatttgtaggaaggtctcattcttccaagctgagagtctagcactcattttctataacagatatggcagcttagaggtgttggctttgtttggatgtaatttagggtactaaatttaaatttaaagatattgttcaaacaatatcatatcatcacattgagctgatataaattctgtgggtccgataatatctttgtgataatttaagagctaaccagttaccacacatctatgatataaccctaacacacacagaaaagcatacatgcaaaaagaaatgactaattagggtacatttataattgcatctaggtaatttttaccctaatgtcttcataaagtacttgagtgtaatgtttgttacctccaacagaactaaatgttctatggttatgaaagaatatatttatttaaagcattgcttttattttgaaaagcttcttaattaatttgattaacaaatatgctaatttggggaaacctagagaagataattgttgaaattttgcaaatataaacatctcctatagcttctgtgttatttctgacttcttaacactattatgtttatgttgcacattactgaaagagtaaagatatgaaaaaaac

SEQ ID NO: 2656 - protein, 1016 aa, Homo sapiens
MDPSNQKCGGRKKTVSFSSMPSEKKISSANDCISFMQAGCELKKVRPNSRIYNRFFTLDTDLQALRWEPSKKDLEKAKLDISAIKEIRLGKNTETFRNNGLADQICEDCAFSILHGENYESLDLVANSADVANIWVSGLRYLVSRSKQPLDFMEGNQNTPRFMWLKTVFEAADVDGNGIMLEDTSVELIKQLNPTLKEAKIRLKFKEIQKSKEKLTTRVTEEEFCEAFCELCTRPEVYFLLVQISKNKEYLDANDLMLFLEAEQGVTHITEDICLDIIRRYELSEEGRQKGFLAIDGFTQYLLSSECDIFDPEQKKVAQDMTQPLSHYYINASHNTYLIEDQFRGPADINGYIRALKMGCRSVELDVSDGSDNEPILCNRNNMTTHVSFRSVIEVINKFAFVASEYPLILCLGNHCSLPQQKVMAQQMKKVFGNKLYTEAPLPSESYLPSPEKLKRMIIVKGKKLPSDPDVLEGEVTDEDEEAEMSRRMSVDYNGEQKQIRLCRELSDLVSICKSVQYRDFELSMKSQNYWEMCSFSETEASRIANEYPEDFVNYNKKFLSRIYPSAMRIDSSNLNPQDFWNCGCQIVAMNFQTPGPMMDLHTGWFLQNGGCGYVLRPSIMRDEVSYFSANTKGILPGVSPLALHIKIISGQNFPKPKGACAKGDVIDPYVCIEIHGIPADCSEQRTKTVQQNSDNPIFDETFEFQVNLPELAMIRFVVLDDDYIGDEFIGQYTIPFECLQPGYRHVPLRSFVGDIMEHVTLFVHIAITNRSGGGKAQKRSLSVRMGKKVREYTMLRNIGLKTIDDIFKIAVHPLREAIDMRENMQNAIVSIKELCGLPPIASLKQCLLTLSSRLITSDNTPSVSLVMKDSFPYLEPLGAIPDVQKKMLTAYDLMIQESRFLIEMADTVQEKIVQCQKAGMEFHEELHNLGAKEGLKGRKLNKATESFAWNITVLKGQGDLLKNAKNEAIENMKQIQLACLSCGLSKAPSSSAEAKSKRSLEAIEEKESSEENGKL

SEQ ID NO: 2657 - DNA, 4619 bp, Homo sapiens
aggcacatagattctctctttgaacaatgcagctgctgcaggggatggggaagggatggcactggcaattcaagactgcctttcctacttcttcagtgcctctttcaccaatatgaagttaaaaccaggatccttcaaaccaaaaatgtggtggaagaaagaaaaccgtgtctttcagcagcatgccatcggaaaagaaaattagcagtgcaaatgactgcatcagcttcatgcaagctggctgtgagttgaagaaagtccggccaaattctcgcatttacaaccgttttttcactctggacacagaccttcaagctcttcgctgggaaccttcaaagaaagacctcgagaaagccaagcttgatatttctgccataaaagagatcagactggggaaaaacacggaaacatttagaaacaatggccttgctgaccagatctgtgaggactgtgccttttccatactccacggggaaaactatgagtctctggacctagttgccaattcagcagatgtggcaaacatctgggtgtctgggttacggtacctggtttctcgaagtaagcagcctcttgattttatggagggcaaccagaacacaccacggttcatgtggttgaaaacagtgtttgaagcagcagatgttgatgggaatgggattatgttggaagacacctctgtagagttaataaaacaactcaaccctactctgaaggaagccaagatcaggttaaagtttaaagaaatccagaagagcaaggaaaaactaaccacccgcgtgaccgaagaggaattttgtgaagctttttgtgaactttgcaccaggccagaagtgtatttcttacttgtacagatatctaaaaacaaagaatatttggatgccaatgatctcatgctctttttagaagctgagcaaggagtcacccatatcaccgaggatatatgcttagacatcataaggagatacgaactttctgaagagggacgtcaaaaagggtttcttgcaattgatggctttacccagtatttattgtcatcagaatgtgacatttttgatcctgagcaaaagaaggttgcccaagatatgacccagccattatctcactactatatcaatgcctctcataacacctatctaatagaagaccagttcagggggccagctgacatcaatgggtacattagagctttgaaaatgggctgtcgaagcgttgaactcgatgtaagtgatggttcagataatgaaccaatcctttgtaatcgaaataacatgacaacccatgtttcctttcgaagtgtcatagaggtaataaataaatttgcctttgttgcttctgaatacccactcattctttgcttgggaaatcactgctccttgccgcagcagaaggtaatggctcaacagatgaaaaaggtctttggcaataaactctatactgaagcacctttgccctcagaatcctacctcccatcaccagaaaaattaaaaagaatgatcattgtgaaaggaaagaagttgccttctgatccagatgtgttagaaggagaagtaacagatgaagatgaagaagctgaaatgtctcgaaggatgtcggtagattacaatggtgagcagaagcaaatccgactctgtagggagctctctgatttggtgtctatttgtaaatctgttcaatacagggattttgaactatctatgaaaagccaaaactattgggaaatgtgttcatttagtgaaacagaggccagccgcattgcaaatgagtacccagaggattttgttaattataataagaagttcttatcaagaatctatccaagtgccatgaggatcgattccagtaacttgaatccacaggacttttggaattgtggctgtcagattgtagcaatgaattttcagactccgggtccaatgatggaccttcacacgggctggtttcttcaaaacgggggatgtggttatgttctaaggccgtctataatgcgagatgaagtttcttacttcagcgcaaatacaaagggcattctacctggggtgtctcctctagctcttcatatcaagatcatcagtggtcagaatttcccaaagcccaagggagcttgtgccaaaggggatgtcatagatccctatgtttgtatagagatacacggaattccagcggattgttcggaacaaagaactaaaactgtacagcaaaacagtgataatcctatttttgatgaaacttttgagttccaagtaaacctacctgagctggccatgatccgttttgttgttctggatgatgactacattggggatgagtttatagggcaatatacgataccatttgaatgtttgcagcctggatatcggcatgttcccctgcgttcttttgtgggtgacatcatggagcacgtaaccctttttgtccacatagcaataactaatcgaagtggaggaggaaaggcacagaagcgcagtctttcagtgagaatggggaagaaagttcgggaatataccatgctcaggaatatcggtcttaaaaccattgatgacatctttaaaatagcggttcatccattacgagaagccatagatatgagagaaaatatgcagaatgcaatcgtgtctattaaggaactatgtggactccctccaattgccagtctgaagcagtgcctgttaactctgtcatctcggctcatcaccagtgacaatactccttcagtctcacttgtgatgaaagacagctttccttacctggagcctctgggtgcaattccagatgtgcagaaaaagatgctgactgcttatgatctgatgattcaagagagccggtttctcatagaaatggcggacacagtccaggaaaagattgtacagtgtcagaaagcagggatggagttccatgaagaacttcataatttgggggcaaaagaaggcttgaagggaagaaaactcaacaaagcaactgagagctttgcttggaacattacagtattgaagggccaaggagatctgttgaagaatgccaagaatgaagctatagaaaacatgaagcagatccagctggcatgcctgtcctgtggactgagtaaagcccccagcagcagtgctgaggccaagagcaagcgcagcctggaagccatagaggagaaggaaagtagtgaggagaatgggaagctgtgactctgggcattatcgacacgttcacccatcttatcaaggactctggtttctcattcttgttttctttctttaaatgttttataagttcacaaaatggtgccctatatggggtattggacatagatattttcacaatgtcagtatttcagtgtagttaatttatctaaattaaagcctttagtatcagtgttttaaattctgagacatgtgtcaacacccctgtgtggatgcctgtggaagagtgtgtgtgtgtgtgtgtgtgtgtgtgtgtggcagagagagagaaagagagagagagagagaaattctgttaaaatctattctgtgttgcattattcatttagtgagttattccttgatcattttgggacaattgttttaatctgaaattctaaagagcacttactgtaacctgttgctgtgtttaatttgacttctctgcctttgacatttaatttagtgatcttagcatagcttattattgaaggaagccaaatttatcaaagcatagatgttttggtagattaaatatagattagaaaaattcctaagaatcagagtagaaataaaagtgaatgaaagattaaacagatgatgagaatttctaaaaagattagcaaggtcatttcttcagtcagaaaactttaaaaaatatttattaaataaaatcaatttttaggaagttttctgtagtcatttactaaacatatgatttcactagaaaagctgatcataagtgaatttatacctacctgtgtggtactctgaaacacactgaaagctctgttgcaattaggattttgatgtgacaataatattgttgtataatttcgagatttgtaggaaggtctcattcttccaagctgagagtctagcactcattttctataacagatatggcagcttagaggtgttggctttgtttggatgtaatttagggtactaaatttaaatttaaagatattgttcaaacaatatcatatcatcacattgagctgatataaattctgtgggtccgataatatctttgtgataatttaagagctaaccagttaccacacatctatgatataaccctaacacacacagaaaagcatacatgcaaaaagaaatgactaattagggtacatttataattgcatctaggtaatttttaccctaatgtcttcataaagtacttgagtgtaatgtttgttacctccaacagaactaaatgttctatggttatgaaagaatatatttatttaaagcattgcttttattttgaaaagcttcttaattaatttgattaacaaatatgctaatttggggaaacctagagaagataattgttgaaattttgcaaatataaacatctcctatagcttctgtgttatttctgacttcttaacactattatgtttatgttgcacattactgaaagagtaaagatatgaaaaaaac

SEQ ID NO: 2658 - protein, 997 aa, Homo sapiens
MPSEKKISSANDCISFMQAGCELKKVRPNSRIYNRFFTLDTDLQALRWEPSKKDLEKAKLDISAIKEIRLGKNTETFRNNGLADQICEDCAFSILHGENYESLDLVANSADVANIWVSGLRYLVSRSKQPLDFMEGNQNTPRFMWLKTVFEAADVDGNGIMLEDTSVELIKQLNPTLKEAKIRLKFKEIQKSKEKLTTRVTEEEFCEAFCELCTRPEVYFLLVQISKNKEYLDANDLMLFLEAEQGVTHITEDICLDIIRRYELSEEGRQKGFLAIDGFTQYLLSSECDIFDPEQKKVAQDMTQPLSHYYINASHNTYLIEDQFRGPADINGYIRALKMGCRSVELDVSDGSDNEPILCNRNNMTTHVSFRSVIEVINKFAFVASEYPLILCLGNHCSLPQQKVMAQQMKKVFGNKLYTEAPLPSESYLPSPEKLKRMIIVKGKKLPSDPDVLEGEVTDEDEEAEMSRRMSVDYNGEQKQIRLCRELSDLVSICKSVQYRDFELSMKSQNYWEMCSFSETEASRIANEYPEDFVNYNKKFLSRIYPSAMRIDSSNLNPQDFWNCGCQIVAMNFQTPGPMMDLHTGWFLQNGGCGYVLRPSIMRDEVSYFSANTKGILPGVSPLALHIKIISGQNFPKPKGACAKGDVIDPYVCIEIHGIPADCSEQRTKTVQQNSDNPIFDETFEFQVNLPELAMIRFVVLDDDYIGDEFIGQYTIPFECLQPGYRHVPLRSFVGDIMEHVTLFVHIAITNRSGGGKAQKRSLSVRMGKKVREYTMLRNIGLKTIDDIFKIAVHPLREAIDMRENMQNAIVSIKELCGLPPIASLKQCLLTLSSRLITSDNTPSVSLVMKDSFPYLEPLGAIPDVQKKMLTAYDLMIQESRFLIEMADTVQEKIVQCQKAGMEFHEELHNLGAKEGLKGRKLNKATESFAWNITVLKGQGDLLKNAKNEAIENMKQIQLACLSCGLSKAPSSSAEAKSKRSLEAIEEKESSEENGKL

SEQ ID NO: 2659 - DNA, 733 bp, Homo sapiens
tcacttaataatgttagaaaagaaccttgggttaaaccctggaaaagtgagcttgcagggccaaggagatctgttgaagaatgccaagaatgaagctatagaaaacatgaagcagatccagctggcatgcctgtcctgtggactgagtaaagcccccagcagcagtgctgaggccaagagcaagcgcagcctggaagccatagaggagaaggaaagtagtgaggagaatgggaagctgtgactctgggcattatcgacacgttcacccatcttatcaaggactctggtttctcattcttgttttctttctttaaatgttttataagttcacaaaatggtgccctatatggggtattggacatagatattttcacaatgtcagtatttcagtgtagttaatttatctaaattaaagcctttagtatcagtgttttaaattctgagacatgtgtcaacacccctgtgtggatgcctgtggaagagtgtgtgtgtgtgtgtgtgtgtgtgtgtgtggcagagagagagaaagagagagagagagagaaattctgttaaaatctattctgtgttgcattattcatttagtgagttattccttgatcattttgggacaattgttttaatctgaaattctaaagagcacttactgtaacctgttgctgtgtttaatttgacttctctgcctttgacatttaatttagtgatcttagcatagcttattattgaaggaagc

SEQ ID NO: 2660 - protein, 76 aa, Homo sapiens
MLEKNLGLNPGKVSLQGQGDLLKNAKNEAIENMKQIQLACLSCGLSKAPSSSAEAKSKRSLEAIEEKESSEENGKL

SEQ ID NO: 2661 - DNA, 518 bp, Homo sapiens
ccaggttttgtctccagatttttctgaaaatattaatgaagccagctgggaagaggagcagtttggatgagactgggataagaagtggttaataaaatctggttatctattctggaaaaaataaacagctgataccaccattctgaactattacagtgaattccacataggcactgaaggtgcaagctttcatgaattgcttgcctttgagtcagaatctggaacgctgaggaggtctctttccagtaacttggaccagagacaactgtaaatgtgctggaagccagaagatgttggggaagctggcaaagagaaaacctgagagttatttactgctcagcctgcagcatccatgagtgactgaagggagtatctggacctttttctcacttccaaaagcaagtgctaccagaaaggaagaagaaaaccttgaagttatcttagcctacaacagtgatatcatccatatctttattgtcatggatgaaaatgggaaataaaagattctgatggctcct

SEQ ID NO: 2662 - protein, 48 aa, Homo sapiens
TADTTILNYYSEFHIGTEGASFHELLAFESESGTLRRSLSSNLDQRQL

SEQ ID NO: 2663 - DNA, 315 bp, Homo sapiens
ccaggttttgtctccagatttttctgaaaatattaatgaagccagctgggaagaggagcagtttggatgagactgggataagaagtggttaataaaatctggttatctattctggaaaaaataaacagctgataccaccattctgaactattacagtgaattccacataggcactgaaggtgcaagctttcatgaattgcttgcctttgagtcaggtactgtgttaaggacattatgtttaggactagatttacttctccaaaaagctaattccatgagttctggaggttgggaagtccaagataaagatgccag

SEQ ID NO: 2664 - DNA, 364 bp, Homo sapiens
tagtcctaaacataatgtccttaacacagtacctgactcaaaggcaagcaattcatgaaagcttgcaccttcagtgcctatgtggaattcactgtaatagttcagaatggtggtatcagctgtttattttttccagaatagataaccagattttattaaccacttcttatcccagtctcatccaaactgctcctcttcccagctggcttcattaatattttcagaaaaatctggagacaaaacatttcaaaaccaatccagccttcctgacaagtccccaaagtcttaattcattccagtctttactcaaaagtccaagtccaaaatctcatctgaggcaaggcaagtcccttccacatatgag

SEQ ID NO: 2665 - protein, 66 aa, Homo sapiens [sequence omitted]

SEQ ID NO: 2666 - DNA, 2528 bp, Homo sapiens
aatgcaagcagatgaagaggaaagaactgagcagcagtatttcaggattctcaataaggcatcaatgaaaaaaggtcaaaactgtgatccctgctacttgggaggctgagacacaagaattgcttgaatccaggaggcggaggttgcagtgaaccaagatcatgccactgaactccagcctgggtgacagagcaagagtctgtctcaaaaaaaaaaaaaagaaaagaaaaagatattgcttagaaaagtaacttgagtcctgttgagcctaagtaaaggacaataatggaagtttctagtctgcaaaatatgaagatgcccctcagagacacagctgtgggtgcctctcacaagacagatgttcaggaaaactgggctgttgctctggaattttcaatgagttattttacttgtttttgcctcagtttacagaaaataaactggcaacaatatctccttgttattgtgaggataaaataaaaggtgtgacatttctattttaaatgtataaaatgccgaaaaattggaggcaactggaaggtacagtagtggatgtgaggtagtaagggggaaaaaaggatatgtaaatcacctaagatgaaatagacattcagaaggccgtaacgtgaagtgtgagtgacactgattcgctaaaaatcctatatagtgtcttaaaacagcagcagtaacaacaacaaagtttatttgagaggaggaattctggaaaaaagcttctttcaaaaaaaaaaaaagagtcttctagtgctcagacagttcgttcctctgcaaaggcgggttactctgttggggtccattatagttctgaggatgaataggacaggacaaggagatggttcctggcccctgttctcctgccacagatctgtcccacctcccaggctccatgcatacagtgacagagatggaaagcccagaaccagtccctttaatgcacttatttgcaaaacaagatgtcactatgcagcagagtgacagtcctttcccctggaactgtcccagagttctccaagctgaagccagggctacattcaccatctcagactcctgctgagctaagtaaccaccctctcctaccttctcttcaggagccctggcacccttgctctggggagagtttgaagagcaacctgaaagttcccacagtttttcctcaaatctgggtttccatgagcatgggccaccagtcgggagagccacatgcctgcccttgcctggctcaagactgtcactctgtcagattcatatcgctctctgacccttagccttccagtctggatcttgaccttgaactggactctgtaggaagttcttaacattaaaggaagttatttatctcttttcaactaacccaagcactttctagcaccttttagcagtttaagctctatgactccattggataaaatgctggggagcaggacattgacacagtcacagaatatcacacacggaatcctcattcattcccccagggaaacagcacctgtagaagacaaatctggtagacactactgtgacaggtgattttatatgtcagcttgactaggccacaggatgtgtagacatttgtcaaatttttttttatatgtctgtgaggatgtttctggatgagattaacattgaatcagtagactgagtaaagaagaccgccctccccagtgggggtgtccctcatccaacctgtggaagccctacatagaacaaaaaggctgaacctcccccaaaatacggtgatctcaagctgcctgacttctggtgctggaacattgttctttttctgccttccgactcaaactgaaaatcagctcatcttgtatcctgagtctgctggcttccagactgaactatacattgactctcccaggtttccagcttgcaactgctggtcttgggacttctcagcctccataatcatgcattagccaatttctatatagatctagaaattcatatatatatatgtgtgtgtgtgtgtgtatgtgtgtgtgtgtgtgtacgcatatatatacagtcatgaatcactgagcagtgggcataccttctgagaaatgtgtcattaggcactgttatcattgtgtgaacatcatagtgtacttacacacacctagacggtatagcctacaacacacctaggctatatagtataacttgttgctggtagattacaaacctgtacaacctgttactgtactgaatactgtaggcaattgtaaaacaatggtaagtatttgtgtatctaaacatagctaaccatagaaaaggtacagtaaaaatactgtataagagataaaacatggtgtgcctgtataggttgcttaccataaataaagcttgcaggttggaagttactctgggtgagtcagtgagtaaatgatgagtgaatgtgaggcccttggacatcactgtaccctactgtagactttataaacactgtacacttaggttaccctaaatctattttaaaattgttttctttcttcaataataaattacccttagcttactgt

SEQ ID NO: 2667 - protein, 35 aa, Homo sapiens
MQADEEERTEQQYFRILNKASMKKGQNCDPCYLGG

SEQ ID NO: 2668 - DNA, 1206 bp, Homo sapiens
gtgaaggagactgagaaggaacagtcaaagatattgcaggaagaccagtagtacatggaagtcaaaggagagagcatcaagaaagagatgcgatgagtcaacaagaagtttacagcactgagaaagacgagtcaacaacagaaggaaaaaaatccagagaaaatggcacttgctgcattggaatgaaagataatctgcagaaggacctgctcagtggcaataaacattggcattcttggaaacagtgtttgcctaagaatcttctgtctgcctttgttgctttggccatattatgataagggcatgactggatttaccaaaatgggcatgattggatctacttattctcttatcagacaccttttcctagacaacatcctgaaacataagaataagcacaaaaatgaacatattacatcaaacgtaccactgagaagaatggtaagtttaacagtttcccacgtgggaggcatattgacgattacaattttaagttagcagaacaccagctcacatggaaacagtctcctccgtgaattctttctttggctgacagacatgagatgttagctgtctaagaagaccttcacaccaacaccttcttagaagatattgtaagataacaatccttgagtggaacctgaattctttctaaacactgcatgtaggaaaacaagaggcagttcacacaatcacttaacacctcttcttaaaagtgaatccttgaaggagtggtgttcaaatatttaagtacattagatactttatacacgccacatccaaaatgctcagtattcctaatacatttcattttctcccaagttttaatggttgatgcacaatcacattaatttcctattaatttctaggaatatgtacacagtagccttaggagaaagaagataactattactttacatttttaactgttttgttttcatgtccatgagagaaaaattaaagtaagttaaaaaattaactcagacactctatttatttttaggaagacatacaccccccacagggagacttttacatgttgtaataatgttcacaaacagctactctttaagtgtaacactattctaagcctcttttcctccattttatttcatatacatttatgcatctgcatgcatatataaccacatgtatttatatttagtaggtatagtttattacacataaatctaaatatctatcata

SEQ ID NO: 2669 - protein, 67 aa, Homo sapiens
MSQQEVYSTEKDESTTEGKKSRENGTCCIGMKDNLQKDLLSGNKHWHSWKQCLPKNLLSAFVALAIL

SEQ ID NO: 2670 - DNA, 358 bp, Homo sapiens
gggaggagaaagggaggaaagggagtagagaaggccacacacaatcttaaattcaatatttcactcccgttaaagataagctgtttataagctccagtgtagggcatgtaattctatgtaaaaactctgtggttcctcttcccacatgtaaatcatgatcactctacattctgctctctgggagccctcaaggcaaagagacaacaagactcgagaccacagaaaggacttatcacaagtctttgtggtagctgaggagtgccccctacagactgatatgcacaatgcaagcagatgaagaggaaagaactgagcagcagtatttcaggattctcaataaggcatcaatgaaaaaagg

SEQ ID NO: 2671 - protein, 47 aa, Homo sapiens
MITLHSALWEPSRQRDNKTRDHRKDLSQVFVVAEECPLQTDMHNASR

SEQ ID NO: 2672 - DNA, 1873 bp, Homo sapiens
gcctcccggagggacgcagggtgtctcgccgcctccctgcccacccccttccccggctaccttcatccgccctcccgccgccccccgccctcggtccgcgacgcccgagttccgtcaggagcccagagctgcgggagaacgaggcggcggcggcggcggcggcggcggcggcggcggcagcagcagcggcttcctcggggggttgtgattcgctcacaggagccattgacgggagaagaggaggctttcttggtggaatttacctcaggcaagatcgagccgcaggaataaaaagcgaggaagggaagggagcgccgccgggaggactagaaggggcagcctctcacacccactccgcctgccgtctcggggagcccggaccggggccgcgaccgcgacccctcccctcccccgctcctacctctcctcagccttcgccagggcctccccaaccctctcacggttgttctgcgaaggcgtggggactgtgagcttgtccatggaggcaggcaccttttttgatccagtcaaggaagaggatttgttgttttcgaaatcagagtgaaggaagcaccgaagcgaaacttaaggaatcctgccttcccggagccgcgggcgatgcgactagggctgccgggcgccgccgccgcccgtccggcttcgtccttcccggcagtcgggaactagttctgaccctcgccccccgaccccggatcgaatccccgccctccgcaccctggatatgttttctcccagacctggatatttttttgatatcgtgaaactacgagggaaataatttgggggatttcttcttggctccctgctttccccacagacatgccttccgtttggagggccgcggcaccccgtccgaggcgaaggaacccccccagccgcgagggagagaaatgaagggaatttctgcagcggcatgaaagctctgcagctaggtcctctcatcagccatttgtcctttcaaactgtattgtgatacgggcaggatcagtccacgggagagaagacgagcctcccggctgtttctccgccggtctacttcccatatttcttttctttgccctcctgattcttggctggcccagggatgacttcctcgctgcagcggccctggcgggtgccctggctaccatggaccatcctgctggtcagcactgcggctgcttcgcagaatcaagaacggctatgtgcgtttaaagatccgtatcagcaagaccttgggataggtgagagtagaatctctcatgaaaatgggacaatattatgctcgaaaggtagcacctgctatggcctttgggagaaatcaaaaggggacataaatcttgtaaaacaaggatgttggtctcacattggagatccccaagagtgtcactatgaagaatgtgtagtaactaccactcctccctcaattcagaatggaacataccgtttctgctgttgtagcacagatttatgtaatgtcaactttactgagaattttccacctcctgacacaacaccactcagtaagtaaagtaaccaacttttctttgtatttcctttctccaaagatttgcaaaatataaaaaaacttaaaaaacattcaaggttgaagccaggcgtgatggctcatgcctgtaatgccagcactttgggaggccgaggtggatggatcacctgaggtcagagtttgagaccagcctggtgaaatcccgtctctgccaaaagtaaaaaattagccgggcgtagtggtaggcgcctgtaatcccgctactcaggaggctgagacaggagaattgattgaacccgggaggcagaggttgcagtgagccaagattgcaccattgcactccagcctgggcaacaagagtgaacc

SEQ ID NO: 2673 - protein, 141 aa, Homo sapiens
MTSSLQRPWRVPWLPWTILLVSTAAASQNQERLCAFKDPYQQDLGIGESRISHENGTILCSKGSTCYGLWEKSKGDINLVKQGCWSHIGDPQECHYEECVVTTTPPSIQNGTYRFCCCSTDLCNVNFTENFPPPDTTPLSK

SEQ ID NO: 2674 - DNA, 3328 bp, Homo sapiens
gcctcccggagggacgcagggtgtctcgccgcctccctgcccacccccttccccggctaccttcatccgccctcccgccgccccccgccctcggtccgcgacgcccgagttccgtcaggagcccagagctgcgggagaacgaggcggcggcggcggcggcggcggcggcggcggcggcagcagcagcggcttcctcggggggttgtgattcgctcacaggagccattgacgggagaagaggaggctttcttggtggaatttacctcaggcaagatcgagccgcaggaataaaaagcgaggaagggaagggagcgccgccgggaggactagaaggggcagcctctcacacccactccgcctgccgtctcggggagcccggaccggggccgcgaccgcgacccctcccctcccccgctcctacctctcctcagccttcgccagggcctccccaaccctctcacggttgttctgcgaaggcgtggggactgtgagcttgtccatggaggcaggcaccttttttgatccagtcaaggaagaggatttgttgttttcgaaatcagagtgaaggaagcaccgaagcgaaacttaaggaatcctgccttcccggagccgcgggcgatgcgactagggctgccgggcgccgccgccgcccgtccggcttcgtccttcccggcagtcgggaactagttctgaccctcgccccccgaccccggatcgaatccccgccctccgcaccctggatatgttttctcccagacctggatatttttttgatatcgtgaaactacgagggaaataatttgggggatttcttcttggctccctgctttccccacagacatgccttccgtttggagggccgcggcaccccgtccgaggcgaaggaacccccccagccgcgagggagagaaatgaagggaatttctgcagcggcatgaaagctctgcagctaggtcctctcatcagccatttgtcctttcaaactgtattgtgatacgggcaggatcagtccacgggagagaagacgagcctcccggctgtttctccgccggtctacttcccatatttcttttctttgccctcctgattcttggctggcccagggatgacttcctcgctgcagcggccctggcgggtgccctggctaccatggaccatcctgctggtcagcactgcggctgcttcgcagaatcaagaacggctatgtgcgtttaaagatccgtatcagcaagaccttgggataggtgagagtagaatctctcatgaaaatgggacaatattatgctcgaaaggtagcacctgctatggcctttgggagaaatcaaaaggggacataaatcttgtaaaacaaggatgttggtctcacattggagatccccaagagtgtcactatgaagaatgtgtagtaactaccactcctccctcaattcagaatggaacataccgtttctgctgttgtagcacagatttatgtaatgtcaactttactgagaattttccacctcctgacacaacaccactcagtccacctcattcatttaaccgagatgagacaataatcattgctttggcatcagtctctgtattagctgttttgatagttgccttatgctttggatacagaatgttgacaggagaccgtaaacaaggtcttcacagtatgaacatgatggaggcagcagcatccgaaccctctcttgatctagataatctgaaactgttggagctgattggccgaggtcgatatggagcagtatataaaggctccttggatgagcgtccagttgctgtaaaagtgttttcctttgcaaaccgtcagaattttatcaacgaaaagaacatttacagagtgcctttgatggaacatgacaacattgcccgctttatagttggagatgagagagtcactgcagatggacgcatggaatatttgcttgtgatggagtactatcccaatggatctttatgcaagtatttaagtctccacacaagtgactgggtaagctcttgccgtcttgctcattctgttactagaggactggcttatcttcacacagaattaccacgaggagatcattataaacctgcaatttcccatcgagatttaaacagcagaaatgtcctagtgaaaaatgatggaacctgtgttattagtgactttggactgtccatgaggctgactggaaatagactggtgcgcccaggggaggaagataatgcagccataagcgaggttggcactatcagatatatggcaccagaagtgctagaaggagctgtgaacttgagggactgtgaatcagctttgaaacaagtagacatgtatgctcttggactaatctattgggagatatttatgagatgtacagacctcttcccaggggaatccgtaccagagtaccagatggcttttcagacagaggttggaaaccatcccacttttgaggatatgcaggttctcgtgtctagggaaaaacagagacccaagttcccagaagcctggaaagaaaatagcctggcagtgaggtcactcaaggagacaatcgaagactgttgggaccaggatgcagaggctcggcttactgcacagtgtgctgaggaaaggatggctgaacttatgatgatttgggaaagaaacaaatctgtgagcccaacagtcaatccaatgtctactgctatgcagaatgaacgtaggtgagtcaacacaagatggcaaatcaggatcaggtgaaaagatcaagaaacgtgtgaaaactccctattctcttaagcggtggcgcccctccacctgggtcatctccactgaatcgctggactgtgaagtcaacaataatggcagtaacagggcagttcattccaaatccagcactgctgtttaccttgcagaaggaggcactgctacaaccatggtgtctaaagatataggaatgaactgtctgtgaaatgttttcaagcctatggagtgaaattattttttgcatcatttaaacatgcagaagatgtttaaaaataaaaaaaaaactgctttatcctcctgtcagcaccccctcccacccctgcaacaaagacttgctttaaatagatttcagctatgcagaaaaatttagcttatgcttccatatttttaaattttgttttttaagttttgcacttttgtttagtctcgctaaagttatatttgtctgttatgaccacagagttatatgtgtgtgtatcaaaagtggtctcaaaatatttttttaagaaaaaaagcaaaaacaatgtattgctgataatcagtttggaccagtttcttaaggtcattaaaacagaagcaaattaagacagg

SEQ ID NO: 2675 - protein, 530 aa, Homo sapiens
MTSSLQRPWRVPWLPWTILLVSTAAASQNQERLCAFKDPYQQDLGIGESRISHENGTILCSKGSTCYGLWEKSKGDINLVKQGCWSHIGDPQECHYEECVVTTTPPSIQNGTYRFCCCSTDLCNVNFTENFPPPDTTPLSPPHSFNRDETIIIALASVSVLAVLIVALCFGYRMLTGDRKQGLHSMNMMEAAASEPSLDLDNLKLLELIGRGRYGAVYKGSLDERPVAVKVFSFANRQNFINEKNIYRVPLMEHDNIARFIVGDERVTADGRMEYLLVMEYYPNGSLCKYLSLHTSDWVSSCRLAHSVTRGLAYLHTELPRGDHYKPAISHRDLNSRNVLVKNDGTCVISDFGLSMRLTGNRLVRPGEEDNAAISEVGTIRYMAPEVLEGAVNLRDCESALKQVDMYALGLIYWEIFMRCTDLFPGESVPEYQMAFQTEVGNHPTFEDMQVLVSREKQRPKFPEAWKENSLAVRSLKETIEDCWDQDAEARLTAQCAEERMAELMMIWERNKSVSPTVNPMSTAMQNERR

SEQ ID NO: 2676 - DNA, 4617 bp, Homo sapiens
gcctcccggagggacgcagggtgtctcgccgcctccctgcccacccccttccccggctaccttcatccgccctcccgccgccccccgccctcggtccgcgacgcccgagttccgtcaggagcccagagctgcgggagaacgaggcggcggcggcggcggcggcggcggcggcggcggcagcagcagcggcttcctcggggggttgtgattcgctcacaggagccattgacgggagaagaggaggctttcttggtggaatttacctcaggcaagatcgagccgcaggaataaaaagcgaggaagggaagggagcgccgccgggaggactagaaggggcagcctctcacacccactccgcctgccgtctcggggagcccggaccggggccgcgaccgcgacccctcccctcccccgctcctacctctcctcagccttcgccagggcctccccaaccctctcacggttgttctgcgaaggcgtggggactgtgagcttgtccatggaggcaggcaccttttttgatccagtcaaggaagaggatttgttgttttcgaaatcagagtgaaggaagcaccgaagcgaaacttaaggaatcctgccttcccggagccgcgggcgatgcgactagggctgccgggcgccgccgccgcccgtccggcttcgtccttcccggcagtcgggaactagttctgaccctcgccccccgaccccggatcgaatccccgccctccgcaccctggatatgttttctcccagacctggatatttttttgatatcgtgaaactacgagggaaataatttgggggatttcttcttggctccctgctttccccacagacatgccttccgtttggagggccgcggcaccccgtccgaggcgaaggaacccccccagccgcgagggagagaaatgaagggaatttctgcagcggcatgaaagctctgcagctaggtcctctcatcagccatttgtcctttcaaactgtattgtgatacgggcaggatcagtccacgggagagaagacgagcctcccggctgtttctccgccggtctacttcccatatttcttttctttgccctcctgattcttggctggcccagggatgacttcctcgctgcagcggccctggcgggtgccctggctaccatggaccatcctgctggtcagcactgcggctgcttcgcagaatcaagaacggctatgtgcgtttaaagatccgtatcagcaagaccttgggataggtgagagtagaatctctcatgaaaatgggacaatattatgctcgaaaggtagcacctgctatggcctttgggagaaatcaaaaggggacataaatcttgtaaaacaaggatgttggtctcacattggagatccccaagagtgtcactatgaagaatgtgtagtaactaccactcctccctcaattcagaatggaacataccgtttctgctgttgtagcacagatttatgtaatgtcaactttactgagaattttccacctcctgacacaacaccactcagtccacctcattcatttaaccgagatgagacaataatcattgctttggcatcagtctctgtattagctgttttgatagttgccttatgctttggatacagaatgttgacaggagaccgtaaacaaggtcttcacagtatgaacatgatggaggcagcagcatccgaaccctctcttgatctagataatctgaaactgttggagctgattggccgaggtcgatatggagcagtatataaaggctccttggatgagcgtccagttgctgtaaaagtgttttcctttgcaaaccgtcagaattttatcaacgaaaagaacatttacagagtgcctttgatggaacatgacaacattgcccgctttatagttggagatgagagagtcactgcagatggacgcatggaatatttgcttgtgatggagtactatcccaatggatctttatgcaagtatttaagtctccacacaagtgactgggtaagctcttgccgtcttgctcattctgttactagaggactggcttatcttcacacagaattaccacgaggagatcattataaacctgcaatttcccatcgagatttaaacagcagaaatgtcctagtgaaaaatgatggaacctgtgttattagtgactttggactgtccatgaggctgactggaaatagactggtgcgcccaggggaggaagataatgcagccataagcgaggttggcactatcagatatatggcaccagaagtgctagaaggagctgtgaacttgagggactgtgaatcagctttgaaacaagtagacatgtatgctcttggactaatctattgggagatatttatgagatgtacagacctcttcccaggggaatccgtaccagagtaccagatggcttttcagacagaggttggaaaccatcccacttttgaggatatgcaggttctcgtgtctagggaaaaacagagacccaagttcccagaagcctggaaagaaaatagcctggcagtgaggtcactcaaggagacaatcgaagactgttgggaccaggatgcagaggctcggcttactgcacagtgtgctgaggaaaggatggctgaacttatgatgatttgggaaagaaacaaatctgtgagcccaacagtcaatccaatgtctactgctatgcagaatgaacgcaacctgtcacataataggcgtgtgccaaaaattggtccttatccagattattcttcctcctcatacattgaagactctatccatcatactgacagcatcgtgaagaatatttcctctgagcattctatgtccagcacacctttgactataggggaaaaaaaccgaaattcaattaactatgaacgacagcaagcacaagctcgaatccccagccctgaaacaagtgtcaccagcctctccaccaacacaacaaccacaaacaccacaggactcacgccaagtactggcatgactactatatctgagatgccatacccagatgaaacaaatctgcataccacaaatgttgcacagtcaattgggccaacccctgtctgcttacagctgacagaagaagacttggaaaccaacaagctagacccaaaagaagttgataagaacctcaaggaaagctctgatgagaatctcatggagcactctcttaaacagttcagtggcccagacccactgagcagtactagttctagcttgctttacccactcataaaacttgcagtagaagcaactggacagcaggacttcacacagactgcaaatggccaagcatgtttgattcctgatgttctgcctactcagatctatcctctccccaagcagcagaaccttcccaagagacctactagtttgcctttgaacaccaaaaattcaacaaaagagccccggctaaaatttggcagcaagcacaaatcaaacttgaaacaagtcgaaactggagttgccaagatgaatacaatcaatgcagcagaacctcatgtggtgacagtcaccatgaatggtgtggcaggtagaaaccacagtgttaactcccatgctgccacaacccaatatgccaatgggacagtactatctggccaaacaaccaacatagtgacacatagggcccaagaaatgttgcagaatcagtttattggtgaggacacccggctgaatattaattccagtcctgatgagcatgagcctttactgagacgagagcaacaagctggccatgatgaaggtgttctggatcgtcttgtggacaggagggaacggccactagaaggtggccgaactaattccaataacaacaacagcaatccatgttcagaacaagatgttcttgcacagggtgttccaagcacagcagcagatcctgggccatcaaagcccagaagagcacagaggcctaattctctggatctttcagccacaaatgtcctggatggcagcagtatacagataggtgagtcaacacaagatggcaaatcaggatcaggtgaaaagatcaagaaacgtgtgaaaactccctattctcttaagcggtggcgcccctccacctgggtcatctccactgaatcgctggactgtgaagtcaacaataatggcagtaacagggcagttcattccaaatccagcactgctgtttaccttgcagaaggaggcactgctacaaccatggtgtctaaagatataggaatgaactgtctgtgaaatgttttcaagcctatggagtgaaattattttttgcatcatttaaacatgcagaagatgtttaaaaataaaaaaaaaactgctttatcctcctgtcagcaccccctcccacccctgcaacaaagacttgctttaaatagatttcagctatgcagaaaaatttagcttatgcttccatatttttaaattttgttttttaagttttgcacttttgtttagtctcgctaaagttatatttgtctgttatgaccacagagttatatgtgtgtgtatcaaaagtggtctcaaaatatttttttaagaaaaaaagcaaaaacaatgtattgctgataatcagtttggaccagtttcttaaggtcattaaaacagaagcaaattaagacaggtttgactgc

SEQ ID NO: 2677 - protein, 1038 aa, Homo sapiens; identical to SEQ ID NO: 208

SEQ ID NO: 2678 - DNA, 8192 bp, Homo sapiens
gcctcccggagggacgcagggtgtctcgccgcctccctgcccacccccttccccggctaccttcatccgccctcccgccgccccccgccctcggtccgcgacgcccgagttccgtcaggagcccagagctgcgggagaacgaggcggcggcggcggcggcggcggcggcggcggcggcagcagcagcggcttcctcggggggttgtgattcgctcacaggagccattgacgggagaagaggaggctttcttggtggaatttacctcaggcaagatcgagccgcaggaataaaaagcgaggaagggaagggagcgccgccgggaggactagaaggggcagcctctcacacccactccgcctgccgtctcggggagcccggaccggggccgcgaccgcgacccctcccctcccccgctcctacctctcctcagccttcgccagggcctccccaaccctctcacggttgttctgcgaaggcgtggggactgtgagcttgtccatggaggcaggcaccttttttgatccagtcaaggaagaggatttgttgttttcgaaatcagagtgaaggaagcaccgaagcgaaacttaaggaatcctgccttcccggagccgcgggcgatgcgactagggctgccgggcgccgccgccgcccgtccggcttcgtccttcccggcagtcgggaactagttctgaccctcgccccccgaccccggatcgaatccccgccctccgcaccctggatatgttttctcccagacctggatatttttttgatatcgtgaaactacgagggaaataatttgggggatttcttcttggctccctgctttccccacagacatgccttccgtttggagggccgcggcaccccgtccgaggcgaaggaacccccccagccgcgagggagagaaatgaagggaatttctgcagcggcatgaaagctctgcagctaggtcctctcatcagccatttgtcctttcaaactgtattgtgatacgggcaggatcagtccacgggagagaagacgagcctcccggctgtttctccgccggtctacttcccatatttcttttctttgccctcctgattcttggctggcccagggatgacttcctcgctgcagcggccctggcgggtgccctggctaccatggaccatcctgctggtcagcactgcggctgcttcgcagaatcaagaacggctatgtgcgtttaaagatccgtatcagcaagaccttgggataggtgagagtagaatctctcatgaaaatgggacaatattatgctcgaaaggtagcacctgctatggcctttgggagaaatcaaaaggggacataaatcttgtaaaacaaggatgttggtctcacattggagatccccaagagtgtcactatgaagaatgtgtagtaactaccactcctccctcaattcagaatggaacataccgtttctgctgttgtagcacagatttatgtaatgtcaactttactgagaattttccacctcctgacacaacaccactcagtccacctcattcatttaaccgagatgagacaataatcattgctttggcatcagtctctgtattagctgttttgatagttgccttatgctttggatacagaatgttgacaggagaccgtaaacaaggtcttcacagtatgaacatgatggaggcagcagcatccgaaccctctcttgatctagataatctgaaactgttggagctgattggccgaggtcgatatggagcagtatataaaggctccttggatgagcgtccagttgctgtaaaagtgttttcctttgcaaaccgtcagaattttatcaacgaaaagaacatttacagagtgcctttgatggaacatgacaacattgcccgctttatagttggagatgagagagtcactgcagatggacgcatggaatatttgcttgtgatggagtactatcccaatggatctttatgcaagtatttaagtctccacacaagtgactgggtaagctcttgccgtcttgctcattctgttactagaggactggcttatcttcacacagaattaccacgaggagatcattataaacctgcaatttcccatcgagatttaaacagcagaaatgtcctagtgaaaaatgatggaacctgtgttattagtgactttggactgtccatgaggctgactggaaatagactggtgcgcccaggggaggaagataatgcagccataagcgaggttggcactatcagatatatggcaccagaagtgctagaaggagctgtgaacttgagggactgtgaatcagctttgaaacaagtagacatgtatgctcttggactaatctattgggagatatttatgagatgtacagacctcttcccaggggaatccgtaccagagtaccagatggcttttcagacagaggttggaaaccatcccacttttgaggatatgcaggttctcgtgtctagggaaaaacagagacccaagttcccagaagcctggaaagaaaatagcctggcagtgaggtcactcaaggagacaatcgaagactgttgggaccaggatgcagaggctcggcttactgcacagtgtgctgaggaaaggatggctgaacttatgatgatttgggaaagaaacaaatctgtgagcccaacagtcaatccaatgtctactgctatgcagaatgaacgcaacctgtcacataataggcgtgtgccaaaaattggtccttatccagattattcttcctcctcatacattgaagactctatccatcatactgacagcatcgtgaagaatatttcctctgagcattctatgtccagcacacctttgactataggggaaaaaaaccgaaattcaattaactatgaacgacagcaagcacaagctcgaatccccagccctgaaacaagtgtcaccagcctctccaccaacacaacaaccacaaacaccacaggactcacgccaagtactggcatgactactatatctgagatgccatacccagatgaaacaaatctgcataccacaaatgttgcacagtcaattgggccaacccctgtctgcttacagctgacagaagaagacttggaaaccaacaagctagacccaaaagaagttgataagaacctcaaggaaagctctgatgagaatctcatggagcactctcttaaacagttcagtggcccagacccactgagcagtactagttctagcttgctttacccactcataaaacttgcagtagaagcaactggacagcaggacttcacacagactgcaaatggccaagcatgtttgattcctgatgttctgcctactcagatctatcctctccccaagcagcagaaccttcccaagagacctactagtttgcctttgaacaccaaaaattcaacaaaagagccccggctaaaatttggcagcaagcacaaatcaaacttgaaacaagtcgaaactggagttgccaagatgaatacaatcaatgcagcagaacctcatgtggtgacagtcaccatgaatggtgtggcaggtagaaaccacagtgttaactcccatgctgccacaacccaatatgccaatgggacagtactatctggccaaacaaccaacatagtgacacatagggcccaagaaatgttgcagaatcagtttattggtgaggacacccggctgaatattaattccagtcctgatgagcatgagcctttactgagacgagagcaacaagctggccatgatgaaggtgttctggatcgtcttgtggacaggagggaacggccactagaaggtggccgaactaattccaataacaacaacagcaatccatgttcagaacaagatgttcttgcacagggtgttccaagcacagcagcagatcctgggccatcaaagcccagaagagcacagaggcctaattctctggatctttcagccacaaatgtcctggatggcagcagtatacagataggtgagtcaacacaagatggcaaatcaggatcaggtgaaaagatcaagaaacgtgtgaaaactccctattctcttaagcggtggcgcccctccacctgggtcatctccactgaatcgctggactgtgaagtcaacaataatggcagtaacagggcagttcattccaaatccagcactgctgtttaccttgcagaaggaggcactgctacaaccatggtgtctaaagatataggaatgaactgtctgtgaaatgttttcaagcctatggagtgaaattattttttgcatcatttaaacatgcagaagatgtttaaaaataaaaaaaaaactgctttatcctcctgtcagcaccccctcccacccctgcaacaaagacttgctttaaatagatttcagctatgcagaaaaatttagcttatgcttccatatttttaaattttgttttttaagttttgcacttttgtttagtctcgctaaagttatatttgtctgttatgaccacagagttatatgtgtgtgtatcaaaagtggtctcaaaatatttttttaagaaaaaaagcaaaaacaatgtattgctgataatcagtttggaccagtttcttaaggtcattaaaacagaagcaaattaagacaggtttgactgcagtggtgtctggtatccatgttttatttctgggcacaagctagtttttatgttgatacgttcctgaacatattatcttgttggacatcttttctcttgtgttttgtttgaatgtgcaatagtttataggccacaaataagctttcttgtaagctctcttcctaacagggcacatattcttccataatataaacacttttctgccccatctcccatacttttgaaggtcagttctatgacagtgaattttgcacaggagaagcagctacctgatttcttactttctctctccttatcatggagaatacagaaacattgtctgaaagggctctaaagaaggaactaccaaaacctgacttgaaatgccatttcttttaaccttccaaatcctaaatgtttccttcaaggcatcttaataaacttatttgcttctggttttgggagttcataagagagaatagaacaaaatacaggacatcaaatattagccatttcccattttattttatttttctatgtaggttcatgttccatgttcatttatttaagaaatacatttttattggtaagcttatagagctacacttatggaatttttaagtaggtaaataaatggttaagacaaaatagtgttatagccttcattctctgaataggccatctttgactcataaaattacccttactgtttattataacttcagaagtaatttatagttctgaacctatagtatcttttaccctgttcccaagcaaagactggtgactttatctgaaaatgattcctcttcccatgacctaaaacactgtgaggaaaaatcattcaagtggcatgccaagtccctatgaaggaagggctgctatcaaacctaccttttttgagcaaactgagactaaacttctctcttttcaaaattgtgttatcttccttaatcctattttcataatttttccttttgccagtttttcacattatctttgatatgtgagcaacatttattatttacattagagtataccttttagtaataaaatgacttgaaatcatattatttttaaaagccctttgcttctttcattacttataatctcctctaaaacaacctctgcatgttttttttaaataaagcactttctgtcaaataatggacttttttctaaacagaaattattttctattaatttgcaaactgatgatttcacttttttttacttttttttcgattatcagagtacttagtaaatgttatatagtttagttctaagatagttccagggattaaaaggttaagaggaaaacacaaatcaccaaatttctgatttatgtttttatctcctgaacaatattttctcactcatattcctctatcttatcacttagctaaagacagcctaaatttcccaattttctgtccaaaatatttgtgatttacttgtatataagccttctcatttgccatgtgctgtgatcttacaagttagatgttactatacctaccatttattcagctggattgctgaacacagttctggattcatagaattaagaatatcttgttagtgcccaggatttccacgttttgtgttttattggcccttttctttattcagccccttaatctattttcagtcttctggcacgtaatttttttcacagttattattcttctattaacaaattatttttatctttcctagtacattttcacttagttctcttgcccttaaatatctttcacatgcattttaggatattcttttcaaatatttgtaggacaactttgaatcaaaataaattatgttccttctccaatttgaagcattgaggataaatgaccatttgaggtctaactgatcttttcctgccagaagagttatcttacgttctgctatatttgtatttgggccagttgattgtaggttgtccaacattttttaatattgggaaaattatgataaaatgctttaaaaattaatatgccagattaaaataactgaatagtttactatttcattcaagcatgtttaaaacaaataatttcctttcaccagtttttcttagtaaactcctgaaaaagtaggaaaggtggaaagtatatatcatttttataaattttaaattgtacatcagacttttaaaatctgtaatatacaagcaagcaaaattattttaaatgacttaattgtatgctaatactcatctgataataaatgcttcttaaagttgacatttaactgctatcacaaagttttatatgtagaaaagtggggtccttttgaataaaagatcattcaactaaaaatattaaaatttatttcactggatggtaatgtaaccttaaaagcatcataataggtaaagtctaatattagttcccttaacaaaatcctaactgtataccagaattaggtcactgaaagaacttgatttgaattacgtttagacaaaaatgatttaattgtaaattcttaaaactttctaaatgcataattggcaaaaaaaaaaacccactgttaccagtgtaggaagttacaagaaggcacatactgaatgctgaagtatacatatgctatttctcttaaacctcagagcaaccatatgagcattgtaattaatattcccattttacagatgaggaaactgaagctaagagaagctaagtaatatgcccaaggtccacatctagtaacagacaaagctgggatttcagtctatgtctgcctctctccacatctctttcatccataccacactgcctacatgccatatgacaggatgtgtaatgggctaacgtttatttaaaaagttcaggccaggtgcagtggcttatgcctataatccccgcactttgggaggccgagccgggtggatcatgaggtcagacgttcaacaccagcctggccaagatggtgaaaccccgtctctattaaaaatattttttaaaaattaactgagcgtggtggtgggcgcctgtagtcccagctactcaggaggctaaggcaggagaatctcttgaacccgagaggtggaggttgcagtgagctgagatcgcgccactgcactgcagcctaggcgacagagcaagactgcctcaaaaaaaaaacataaaaattcagtcactatactctggcacaattttcatttgtatatgagccaaaccacataccttaatgatttgggaagttaggcaaatatgagatatgtagacatatctatgctgattgttgcttgagaaataattactaattctagacaaaactcaatcctgtatcttccatcatgaatcttaaaatcatttcacttcactcctaacatttcttacattgcagaactaatggtaaagtaaattttacggaaaaagttaagatagctttgggaacagagacctttccctaaattgattccatagcagatttgggggaattaacaaagaatttcagtctcatcaatcctttgaatccatcttcaaaacttctgcttttaataactttagaaaatttactaatctatagaactaattgagtaggatataggaaggatacaaggatataatgtcctttttataaaagtttagt

SEQ ID NO: 2679 - protein, 1038 aa, Homo sapiens; identical to SEQ ID NO: 208

SEQ ID NO: 2680 - DNA, 8192 bp, Homo sapiens
gcctcccggagggacgcagggtgtctcgccgcctccctgcccacccccttccccggctaccttcatccgccctcccgccgccccccgccctcggtccgcgacgcccgagttccgtcaggagcccagagctgcgggagaacgaggcggcggcggcggcggcggcggcggcggcggcggcagcagcagcggcttcctcggggggttgtgattcgctcacaggagccattgacgggagaagaggaggctttcttggtggaatttacctcaggcaagatcgagccgcaggaataaaaagcgaggaagggaagggagcgccgccgggaggactagaaggggcagcctctcacacccactccgcctgccgtctcggggagcccggaccggggccgcgaccgcgacccctcccctcccccgctcctacctctcctcagccttcgccagggcctccccaaccctctcacggttgttctgcgaaggcgtggggactgtgagcttgtccatggaggcaggcaccttttttgatccagtcaaggaagaggatttgttgttttcgaaatcagagtgaaggaagcaccgaagcgaaacttaaggaatcctgccttcccggagccgcgggcgatgcgactagggctgccgggcgccgccgccgcccgtccggcttcgtccttcccggcagtcgggaactagttctgaccctcgccccccgaccccggatcgaatccccgccctccgcaccctggatatgttttctcccagacctggatatttttttgatatcgtgaaactacgagggaaataatttgggggatttcttcttggctccctgctttccccacagacatgccttccgtttggagggccgcggcaccccgtccgaggcgaaggaacccccccagccgcgagggagagaaatgaagggaatttctgcagcggcatgaaagctctgcagctaggtcctctcatcagccatttgtcctttcaaactgtattgtgatacgggcaggatcagtccacgggagagaagacgagcctcccggctgtttctccgccggtctacttcccatatttcttttctttgccctcctgattcttggctggcccagggatgacttcctcgctgcagcggccctggcgggtgccctggctaccatggaccatcctgctggtcagcactgcggctgcttcgcagaatcaagaacggctatgtgcgtttaaagatccgtatcagcaagaccttgggataggtgagagtagaatctctcatgaaaatgggacaatattatgctcgaaaggtagcacctgctatggcctttgggagaaatcaaaaggggacataaatcttgtaaaacaaggatgttggtctcacattggagatccccaagagtgtcactatgaagaatgtgtagtaactaccactcctccctcaattcagaatggaacataccgtttctgctgttgtagcacagatttatgtaatgtcaactttactgagaattttccacctcctgacacaacaccactcagtccacctcattcatttaaccgagatgagacaataatcattgctttggcatcagtctctgtattagctgttttgatagttgccttatgctttggatacagaatgttgacaggagaccgtaaacaaggtcttcacagtatgaacatgatggaggcagcagcatccgaaccctctcttgatctagataatctgaaactgttggagctgattggccgaggtcgatatggagcagtatataaaggctccttggatgagcgtccagttgctgtaaaagtgttttcctttgcaaaccgtcagaattttatcaacgaaaagaacatttacagagtgcctttgatggaacatgacaacattgcccgctttatagttggagatgagagagtcactgcagatggacgcatggaatatttgcttgtgatggagtactatcccaatggatctttatgcaagtatttaagtctccacacaagtgactgggtaagctcttgccgtcttgctcattctgttactagaggactggcttatcttcacacagaattaccacgaggagatcattataaacctgcaatttcccatcgagatttaaacagcagaaatgtcctagtgaaaaatgatggaacctgtgttattagtgactttggactgtccatgaggctgactggaaatagactggtgcgcccaggggaggaagataatgcagccataagcgaggttggcactatcagatatatggcaccagaagtgctagaaggagctgtgaacttgagggactgtgaatcagctttgaaacaagtagacatgtatgctcttggactaatctattgggagatatttatgagatgtacagacctcttcccaggggaatccgtaccagagtaccagatggcttttcagacagaggttggaaaccatcccacttttgaggatatgcaggttctcgtgtctagggaaaaacagagacccaagttcccagaagcctggaaagaaaatagcctggcagtgaggtcactcaaggagacaatcgaagactgttgggaccaggatgcagaggctcggcttactgcacagtgtgctgaggaaaggatggctgaacttatgatgatttgggaaagaaacaaatctgtgagcccaacagtcaatccaatgtctactgctatgcagaatgaacgtaggtgagtcaacacaagatggcaaatcaggatcaggtgaaaagatcaagaaacgtgtgaaaactccctattctcttaagcggtggcgcccctccacctgggtcatctccactgaatcgctggactgtgaagtcaacaataatggcagtaacagggcagttcattccaaatccagcactgctgtttaccttgcagaaggaggcactgctacaaccatggtgtctaaagatataggaatgaactgtctgtgaaatgttttcaagcctatggagtgaaattattttttgcatcatttaaacatgcagaagatgtttaaaaataaaaaaaaaactgctttatcctcctgtcagcaccccctcccacccctgcaacaaagacttgctttaaatagatttcagctatgcagaaaaatttagcttatgcttccatatttttaaattttgttttttaagttttgcacttttgtttagtctcgctaaagttatatttgtctgttatgaccacagagttatatgtgtgtgtatcaaaagtggtctcaaaatatttttttaagaaaaaaagcaaaaacaatgtattgctgataatcagtttggaccagtttcttaaggtcattaaaacagaagcaaattaagacaggtttgactgcagtggtgtctggtatccatgttttatttctgggcacaagctagtttttatgttgatacgttcctgaacatattatcttgttggacatcttttctcttgtgttttgtttgaatgtgcaatagtttataggccacaaataagctttcttgtaagctctcttcctaacagggcacatattcttccataatataaacacttttctgccccatctcccatacttttgaaggtcagttctatgacagtgaattttgcacaggagaagcagctacctgatttcttactttctctctccttatcatggagaatacagaaacattgtctgaaagggctctaaagaaggaactaccaaaacctgacttgaaatgccatttcttttaaccttccaaatcctaaatgtttccttcaaggcatcttaataaacttatttgcttctggttttgggagttcataagagagaatagaacaaaatacaggacatcaaatattagccatttcccattttattttatttttctatgtaggttcatgttccatgttcatttatttaagaaatacatttttattggtaagcttatagagctacacttatggaatttttaagtaggtaaataaatggttaagacaaaatagtgttatagccttcattctctgaataggccatctttgactcataaaattacccttactgtttattataacttcagaagtaatttatagttctgaacctatagtatcttttaccctgttcccaagcaaagactggtgactttatctgaaaatgattcctcttcccatgacctaaaacactgtgaggaaaaatcattcaagtggcatgccaagtccctatgaaggaagggctgctatcaaacctaccttttttgagcaaactgagactaaacttctctcttttcaaaattgtgttatcttccttaatcctattttcataatttttccttttgccagtttttcacattatctttgatatgtgagcaacatttattatttacattagagtataccttttagtaataaaatgacttgaaatcatattatttttaaaagccctttgcttctttcattacttataatctcctctaaaacaacctctgcatgttttttttaaataaagcactttctgtcaaataatggacttttttctaaacagaaattattttctattaatttgcaaactgatgatttcacttttttttacttttttttcgattatcagagtacttagtaaatgttatatagtttagttctaagatagttccagggattaaaaggttaagaggaaaacacaaatcaccaaatttctgatttatgtttttatctcctgaacaatattttctcactcatattcctctatcttatcacttagctaaagacagcctaaatttcccaattttctgtccaaaatatttgtgatttacttgtatataagccttctcatttgccatgtgctgtgatcttacaagttagatgttactatacctaccatttattcagctggattgctgaacacagttctggattcatagaattaagaatatcttgttagtgcccaggatttccacgttttgtgttttattggcccttttctttattcagccccttaatctattttcagtcttctggcacgtaatttttttcacagttattattcttctattaacaaattatttttatctttcctagtacattttcacttagttctcttgcccttaaatatctttcacatgcattttaggatattcttttcaaatatttgtaggacaactttgaatcaaaataaattatgttccttctccaatttgaagcattgaggataaatgaccatttgaggtctaactgatcttttcctgccagaagagttatcttacgttctgctatatttgtatttgggccagttgattgtaggttgtccaacattttttaatattgggaaaattatgataaaatgctttaaaaattaatatgccagattaaaataactgaatagtttactatttcattcaagcatgtttaaaacaaataatttcctttcaccagtttttcttagtaaactcctgaaaaagtaggaaaggtggaaagtatatatcatttttataaattttaaattgtacatcagacttttaaaatctgtaatatacaagcaagcaaaattattttaaatgacttaattgtatgctaatactcatctgataataaatgcttcttaaagttgacatttaactgctatcacaaagttttatatgtagaaaagtggggtccttttgaataaaagatcattcaactaaaaatattaaaatttatttcactggatggtaatgtaaccttaaaagcatcataataggtaaagtctaatattagttcccttaacaaaatcctaactgtataccagaattaggtcactgaaagaacttgatttgaattacgtttagacaaaaatgatttaattgtaaattcttaaaactttctaaatgcataattggcaaaaaaaaaaacccactgttaccagtgtaggaagttacaagaaggcacatactgaatgctgaagtatacatatgctatttctcttaaacctcagagcaaccatatgagcattgtaattaatattcccattttacagatgaggaaactgaagctaagagaagctaagtaatatgcccaaggtccacatctagtaacagacaaagctgggatttcagtctatgtctgcctctctccacatctctttcatccataccacactgcctacatgccatatgacaggatgtgtaatgggctaacgtttatttaaaaagttcaggccaggtgcagtggcttatgcctataatccccgcactttgggaggccgagccgggtggatcatgaggtcagacgttcaacaccagcctggccaagatggtgaaaccccgtctctattaaaaatattttttaaaaattaactgagcgtggtggtgggcgcctgtagtcccagctactcaggaggctaaggcaggagaatctcttgaacccgagaggtggaggttgcagtgagctgagatcgcgccactgcactgcagcctaggcgacagagcaagactgcctcaaaaaaaaaacataaaaattcagtcactatactctggcacaattttcatttgtatatgagccaaaccacataccttaatgatttgggaagttaggcaaatatgagatatgtagacatatctatgctgattgttgcttgagaaataattactaattctagacaaaactcaatcctgtatcttccatcatgaatcttaaaatcatttcacttcactcctaacatttcttacattgcagaactaatggtaaagtaaattttacggaaaaagttaagatagctttgggaacagagacctttccctaaattgattccatagcagatttgggggaattaacaaagaatttcagtctcatcaatcctttgaatccatcttcaaaacttctgcttttaataactttagaaaatttactaatctatagaactaattgagtaggatataggaaggatacaaggatataatgtcctttttataaaagtttagtatagcttctttacatgtatccacttgttccagaaaatgtgcattggttctgaatgtgaaaatatttaaagagagaaaggaacactcaagtaagtgtgggcttcagtgggaattatcacaaaacattggcaagtatttttatttaaattattttcaaatttgacttctacagccaagtggaattggtaggctgtagctgttacactgaaatttctagtctttgtaagtgcctcctgaaagtcatttaaaatggaaaaatatttcaatgagcttttccttttttcatatttatggacatgaatattttattggagatcattaactcctagaatttgagattatatttccatacaacattttataaagttatgttgaacttactacctgttatgtgcaggttattatgtaactattcacagattgcttcatatattgctttatcttcccatctaacttcttaaagttaaaatccggacacacatgttgattatctagaccagtcattctggaaattgtaacactcccacataaaccccaggagactttttcagaatgcaatgtttctaaatgtactgttactggcagtttactctccagcatataaggttgcattttaacttttagattatgaactgtgcaaactttacccaaaactatcttgcatgattccctcctaaatatattccttgattaagtaaatctggcaaatcactgtttgagctagttacataaaatttgttatcaagagaaggcttttctacaagtttccagattaacataaagaaaagagggaatcacagggcatttaagtgcaccttcccattactttccttaaatcacctcatagttaggctgggcgcggtggctcacgcctgtaatcccagcactttgggaggccgagacggtggatcacgaggtcaggggactgagatcatcctggctaacacgatgaaacctcatctctactaaaaatacaaataattagccaggcatggtggcacgcgcctgtagtcccagctactcgggaggcagagacaggagaatcgtttgcacccgggaggcggaggttgttgcagtgagccgagatcgcgccaatgcactccagcctgggctacagagtgagactccatctcaaaaaaaaacaaaaaaaatcacctcatagtttatgtctgacttactccaaacctcagttatctgatttgtagtctgtgtcaggaaagttttcttcatatctattctgtctccctcctctttgattttaaatttttttcttttacccag

SEQ ID NO: 2681 - protein, 530 aa, Homo sapiens; identical to SEQ ID NO: 2675

SEQ ID NO: 2682 - DNA, 844 bp, Homo sapiens
gtatacttcattatcatttctacacttcaccatcatcatcgtttaaaaaccctttttaatgggccaggtgcagtggctcacgcctgtaatcccagcaataaaactctgtttgaataagtaacatgaataaattcatctcttcatatcatttgactgtttttaatcttgcctttcttatcactacaatacagtcgtttgtgaagtaactaaataaaagtttttcttcacactagactggccccatggggttttaatcactaagaacacatggaaacattaaaaatgtaacctcaactaaatatgtcatcatcactcttctaatctaactggtgttcttttccaaaactgaagctttgaatcttcaatgaatttttttattatccactgacatttgaatgctacacataaaacaaaacctaagatatttgctgtcatttacagcaaaagaagagactatatctaagacatagttcaatctggacaattattctggcatgatcaaaataccagtaagattttcagatgcctaaaagattccaagtattttatacctttagactaacactttatgtattatatgaatgttttgctttggagccataggggcctgaccttgattcccaagtgtcccacttactcagtttactcatctgcagaataaagaaaaataatagtactgatcagtctgtttagaggataatgagataacacagtaaatatgtaaggcccttagtattagtaactatactaaagatgagaaatgctcatgtgtctcttcacttccccaatatagattaactaattgtagccactgtcaaattagatagaataaggtatcttaaac

SEQ ID NO: 2683 - protein, 30 aa, Homo sapiens
MYYMNVLLWSHRGLTLIPKCPTYSVYSSAE

SEQ ID NO: 2684 - DNA, 477 bp, Homo sapiens
aatgtattttaaatgtttccatgtatctatgactctattatagtacgtctgtatctgaaaccactaaataattattagatgggtaattagtttttgcatatgaaaatacgcagaaaatgctcagtaatcagagagcacattataaggaaatgagacacagttaaggcaggaagagagggacacatggaattggaaatcctaaaaagacaataaaaattgcagttgttgaaataaagacatggaaattatttcatagtctgcaaccaattctgtctagtatttcagaagatatttattaaacactggtcaattccaccatacatgcttgggacttagatttttttttttttttttttttttttttaaccttgagacagagtttcactcttgttgcccaggctggagtgcaatgctgcaatcttggctcactgcaacctccgcctcccaggttcaagcgattctcctgctttggcctcc

SEQ ID NO: 2685 - protein, 58 aa, Homo sapiens
TLVNSTIHAWDLDFFFFFFFFLTLRQSFTLVAQAGVQCCNLGSLQPPPPRFKRFSCFG

SEQ ID NO: 2686 - DNA, 1109 bp, Homo sapiens
cctcaggtgatccacccgcctcagcctcccaaactgggattacaggcgtgagccactgcacccagctgagtctattatttccttatcaccaagaaaaagaaataccatcaagtaattttacaatgccacaaatatgatatatcccactgtaggagattttaaggtgtgatcaatgtatgtattaaaattgatgaaatatgggagttgtcacctatgtaaatgtgaacttgattgttaactctggcagaatgtccactcagcagcaacccttcagtgtttctgtcaacaaaccatatgagaagtcagatgagttgtattgtttgaaaatgtttcattggataacaaaatgttgatggttgctaacgcttagtgatgggcatttggaatttgtatgtacactccacttctgtatatagtagtaagttttttataataaaaagattaaaactagaacaagcaaccttccattggcactttctggcatgatcaagaaagcatctgcattaaaattttcagtgtcgtgttagtggatggaaagaaaattccagagacaaaagtcaaaagaatgttttaaagaaatgttgggttatgatctcagtgatgtttttaatgacacataaggtagaaatgtatggaaaaataggacacagttgacaaatttgaaaagatattcagaagaatctaactctaaatatgaaaaagttttaggaatacctacaccaatttattttgcatctgtttttctttttacaggctgtatgagagtgattttaataatctctgtccaaataagtctaaaggagcttatcaagaagtaaagcataacattctaggggataagtcatagttggtcgtagtttaagcagcatactttttagtatctcttattttgaataaaaaaaaattaagtaccatgtatatagttaatcatttttagtgtttccaagatactgcttttcttcataggctataaaaagcttttgttgcttatattagtaacaaaaacaattttgcaaatggaaacatttctagaaaccttactatttatattagtattatataaatttatccaatttccagaaatttgggtaatgctaaaatcactttcc

SEQ ID NO: 2687 - protein, 51 aa, Homo sapiens [sequence omitted]

SEQ ID NO: 2688 - DNA, 3524 bp, Homo sapiens
caaaacattggcaagtatttttatttaaattattttcaaatttgacttctacagccaagtggaattggtaggctgtagctgttacactgaaatttctagtctttgtaagtgcctcctgaaagtcatttaaaatggaaaaatatttcaatgagcttttccttttttcatatttatggacatgaatattttattggagatcattaactcctagaatttgagattatatttccatacaacattttataaagttatgttgaacttactacctgttatgtgcaggttattatgtaactattcacagattgcttcatatattgctttatcttcccatctaacttcttaaagttaaaatccggacacacatgttgattatctagaccagtcattctggaaattgtaacactcccacataaaccccaggagactttttcagaatgcaatgtttctaaatgtactgttactggcagtttactctccagcatataaggttgcattttaacttttagattatgaactgtgcaaactttacccaaaactatcttgcatgattccctcctaaatatattccttgattaagtaaatctggcaaatcactgtttgagctagttacataaaatttgttatcaagagaaggcttttctacaagtttccagattaacataaagaaaagagggaatcacagggcatttaagtgcaccttcccattactttccttaaatcacctcatagttaggctgggcgcggtggctcacgcctgtaatcccagcactttgggaggccgagacggtggatcacgaggtcaggggactgagatcatcctggctaacacgatgaaacctcatctctactaaaaatacaaataattagccaggcatggtggcacgcgcctgtagtcccagctactcgggaggcagagacaggagaatcgtttgcacccgggaggcggaggttgttgcagtgagccgagatcgcgccaatgcactccagcctgggctacagagtgagactccatctcaaaaaaaaacaaaaaaaatcacctcatagtttatgtctgacttactccaaacctcagttatctgatttgtagtctgtgtcaggaaagttttcttcatatctattctgtctccctcctctttgattttaaatttttttcttttacccagtaggacaaaaaagagcagttggtcatcatccccaatattcttagtcttcagtatgcttcaggcctctcaatgaacacttaagtctcaattcttcagacaaaattgcttaagctcttctcctcagtcctattttaatgatttatattctcattagttataactaaaaagccatgcacacagaattgtatatcattttgccattaaaattttttaacatattgcagcaagcttagttttatgattgagccacaaccttttacatattttttgtatgaaatattaaacactaaatgcaagattaactttcaaaagcaaaccctacattaatcaggtattatctatggacatttttgtagaccacttttgaaatacttattattttgcaacatagactggactatacaactttcatttaacttttaggtgactgatttaagttgagtgtgcatatagagaaaaacctagaaatttatctcatggcagatacatttgaaagtacttcagaagaatttatgctgtatattaaaactaggctcaaaataaatctatcgtatctttaaaagtccaattctgttattactgtgatgtttgtagtgttactattaaacattgtgaacatacacatttttaaaacaacttgaaacccattttaaaatctgggtaagagagaaggaatcttcagaacaaaatcacatcattagggtgtccagtttatgattgaatttttaagcaaattactgtatttgaaactacaacttgatttggttttcagttttaaaaggcaacatgtgggttttatccattttatttatacctttagatttcagaaacatcttcatgttttagatgcattctacagacatcatgttacttaaaaactcagggcccctttcatccctttgtacactgaaaaagttcaattgttagcaagtaagcaattagatccagttgaatatttaaagtgtttgttgcacagttcatttaatgtttcatcttatttgactttttcacatagatataatatcagatttcattaattataaaaagttgcccagttctgtaattactgaacagagggaatgactcaactaattggctacatgttgcaacaaatttaggcctttagagttgaagcactgacttaaaacgacttacatttctgttctttggtcaaatgaccatacatgatatgggacaaattgtttcattttgtttgttttttaataagggaacttggtaaagtagttcctgtcagataggattttctcaagagacaatttaacgttataaagccttctaaaagtgaactaaatattttataactttagtaatagcttggatggttttgagaaaataacctgtatttatcacattgtcaaacagaatttttctttgaatcagacaagttcaagctctaaattgatgtgctatatacttaaaatcctaggaagttatctgtaaccagtctcttgtctcaggctcttcaccttgttaccaatcctcgtaagtatgtaaaggaaacatatttttaaagaagcttaacagtaagaaaaaattactaaaagatgcaattcaaagataggtcccagtttaacactgaattgcttgacttctgtggcttttctttttctggccacatttatttatttaagcaatttttgtatgccttgttatttcatttccatagagattatattgtatcagtgtttatgtaagctggaatcatcctcagttttttgctgataatttttcaaataaagatacatggataattgtaaaatacactaactcttagggtgttgtagtagctgaaacatggagatgcgtagctgtcatgctttttctgaatggacaggagaaacataagctacggagtattcacttctgaggatgcttttccggaaaaagaaaggctagaaaatactcgcacttcctcagaaccctctttcttgttaacgggtatcttttgttggtgtgttttgctcttacattacagatagactatcatatatgactttatgaataatttcagttattttgcttttgtataagctgtctgaagccttgctatgctgtataagttgtgtttgatggatcagtgtgagtataaaataaagcaaatcacttttcttttgtattatctatggatgccactatgaaagctgacattaagccactaaagagttttctatgaataagtgtaagtaaatgctttgatatatataaacctaaataaaaagattgtattgatacagagacattggagaaggagattttaaggcagttctttaggtttaaaaaggcttgctgtaaaatggtgcgttattccgtttattaaagatcatattaatgacaatagta

SEQ ID NO: 2689 - protein, 56 aa, Homo sapiens
MVARACSPSYSGGRDRRIVCTREAEVVAVSRDRANALQPGLQSETPSQKKTKKITS

SEQ ID NO: 2690 - DNA, 1488 bp, Homo sapiens
gggcccctttcatccctttgtacactgaaaaagttcaattgttagcaagtaagcaattagatccagttgaatatttaaagtgtttgttgcacagttcatttaatgtttcatcttatttgactttttcacatagatataatatcagatttcattaattataaaaagttgcccagttctgtaattactgaacagagggaatgactcaactaattggctacatgttgcaacaaatttaggcctttagagttgaagcactgacttaaaacgacttacatttctgttctttggtcaaatgaccatacatgatatgggacaaattgtttcattttgtttgttttttaataagggaacttggtaaagtagttcctgtcagataggattttctcaagagacaatttaacgttataaagccttctaaaagtgaactaaatattttataactttagtaatagcttggatggttttgagaaaataacctgtatttatcacattgtcaaacagaatttttctttgaatcagacaagttcaagctctaaattgatgtgctatatacttaaaatcctaggaagttatctgtaaccagtctcttgtctcaggctcttcaccttgttaccaatcctcgtaagtatgtaaaggaaacatatttttaaagaagcttaacagtaagaaaaaattactaaaagatgcaattcaaagataggtcccagtttaacactgaattgcttgacttctgtggcttttctttttctggccacatttatttatttaagcaatttttgtatgccttgttatttcatttccatagagattatattgtatcagtgtttatgtaagctggaatcatcctcagttttttgctgataatttttcaaataaagatacatggataattgtaaaatacactaactcttagggtgttgtagtagctgaaacatggagatgcgtagctgtcatgctttttctgaatggacaggagaaacataagctacggagtattcacttctgaggatgcttttccggaaaaagaaaggctagaaaatactcgcacttcctcagaaccctctttcttgttaacgggtatcttttgttggtgtgttttgctcttacattacagatagactatcatatatgactttatgaataatttcagttattttgcttttgtataagctgtctgaagccttgctatgctgtataagttgtgtttgatggatcagtgtgagtataaaataaagcaaatcacttttcttttgtattatctatggatgccactatgaaagctgacattaagccactaaagagttttctatgaataagtgtaagtaaatgctttgatatatataaacctaaataaaaagattgtattgatacagagacattggagaaggagattttaaggcagttctttaggtttaaaaaggcttgctgtaaaatggtgcgttattccgtttattaaagatcatattaatgacaataaaaaaaaaataa

SEQ ID NO: 2691 - protein, 50 aa, Homo sapiens
MDRRNISYGVFTSEDAFPEKERLENTRTSSEPSFLLTGIFCWCVLLLHYR

SEQ ID NO: 2692 - DNA, 5462 bp, Homo sapiens
gcggccgcgcgcaccagccccacggtggccacgcagacgggcgcgtccgcgacgtccacgcgaggcaccagccccacgcgcagcgccgcgcctggagctcgcgggagccccccacggccgccgccgccgccgccgctgctgggcaccgtgtcgtcgcccagctcgtcgcccacccacctgtggaccggcgaggtgagcgcggccccacccccagcccgcgtccggcatcggaggaggtctccggagcagagccgaagctcgccggagaagaggagccccagcgccccggtttgcaaagcaggtgacaaaacacgacagccttcttcaagcccctccagtattatccgacgcacttcctccctggatactcttgctgcaccgtatcttgctggacactggcctcgggatagccatgggcaagctgcaccttgcatgagggacaaagctacacagacagagagtgcatgggctgaagaatactctgaaaagaagaaagggtctcacaagcgctcagcatcttggggcagtacagatcaacttaaggagattgcaaaattacgccagcagttgcagagaagtaaacacagcagtcggcatcatcgagataaagaaagacagtctccatttcatggcaaccatgcagctattaaccagtgtcaggctcctgttccaaagagtgcacttattcctgtaattcccatcaccaaatcaacaggctcccggttccggaatagcgtggaaggattgaatcaggagattgaaataataattaaagagactggggaaaaggaagagcaacttataccgcaagatattccagatggccatcgtgctccacccccccttgtacagagaagtagcagcacgcgcagcattgacacacagacgcctggtggggcagacaggggaagcaacaacagcagccgttcccagtccgtgtccccaacatcgttcctcaccatttccaatgaaggtagcgaggagagtccttgctcagcggatgacctgcttgttgatcccagagataaagagaatgggaacaattctcctttgcccaaatatgcaacctcaccaaaacctaacaacagttatatgttcaaaagggaacctcctgagggctgtgaaagggtcaaagtctttgaggaatgctcgccaaaacagcttcatgaaatcccagccttttattgtcctgacaaaaacaaggtgaatttcattcctaaaagtggatctgctttctgcctcgtcagcatcctcaagccactccttcctaccccggatcttacactcaagggctctggccacagcctgacagtcaccactggcatgacaaccactctgctgcagcctattgctgtggcctccctgtctacaaacacagagcaagaccgagtctctcgaggaacaagtacagtcatgccatcagcttctctactcccaccaccagaaccaattgaggaagctgaaggataggtcacagtgcaacgtggctgttgttctgggaaattgggaacctcctcagatcactggattctgatggcatcgtgcgcttctggtcggctgtgatgtgctccagctttccagtgacatgtgacggcgaggcttctggaagaaaggatcccccgtgacggctctgccccacttgtgaacgccaaccctcagtgcttagcctgctttttatcaaagcactgattgaaacaagaaaggtctcattctttacctttggagagacaatatcacgtttttgttttcgaattagacttctttaaaacacacacacacacacacacacacacacacacacacacacacacacccctgatccttgccaacatgattcctaaagggagatgtgactgatgctgcaagaaccatcttttctatgaaaatgactattttataatataccaatgttacattttctgaaacgtagcaaacaggatattcaaaagattctttggtggcctctgtttcttgttccctttctagatgtgtgcttttctcagctgttttcagctttgggaccaaagggattgttgacgttttcccagcaatcttaatctcatgactatgttcttctcccaaacaaggattgataggtaaatgcattgaacaagtatatataaaaagagattaaaaagcaatattcgtacattatgtgatttatgtttttgatgtcaaaagtttgtgctttgggtgaaatatttgtataactgctgttttcttcactactcctgtacacatttcaccatgtggtcagaaaagttgtagtctgaagacaagtgctttaatatgttctcacccatattggaacttgatttaaaagtcagtgagccaaaaggaagctatccagcgttgattgctagctaagagtaaggagcccctttggttttctgtgatatatatatatatcacacgctctccctcctttaccacaggtgtcattctacctttaatcatcactgtatcatagccccaaagagatcctgaaatggctgtgcatggatttcctcctttgcccttgtgatgttgttgtcttgtggatttggttgggctagtagtttgccaggagtgtaatccagtggatagtgatccaaactgtagccgcagaatcctgtgactgacatttttctttgtggtggtggttggccctgagatttgttgcctacagattttgctaatttacccccctaacgcttcacatagtggggaaaatacacaagaagaacttgagtatgaacgataagcacctttgaaaactccatacagttttggattagggctcatcctaatataaatcactgccagtatcacatgacatcagtatgtgatttctgggtatgtggtagtgagattaaggagcagcttttttttttttttttttttgagacggagtttcactcttgttgcccaggctggagtgcaatggcgcaatctcggctcactgcgacctctgtctcccaggttcaagcagttctcctgcctcagcctcccaagtagctgggattacaggcatgcaccaccacacccagctaattttgtatttttagtatatatggggtttcaccatgttggtcaggctgttcttgaactcctggcctcaggtgatctgctcgtcttggcctcccaaagtgctgggattacaggtgtgagccaccacgcccatccaggagcagctctttttttaaaagtgagtttcagcaaacagtattgaataaaagcatccttttcatatcttcatatactactttatgatgcaataatttactgttcctatacatattataaggtagaaaaaagtttttaaatccttataaagaggatgcagtttagaaggttaatatgtcagcttacccagacatattctatcaaggaaaacctagtggtagcaataaatctttggaaaggacttcttatactcatgtacctttaaaacatctaagcaatttaaaataatccctgttgagtttaaattcgagatgcatttaggtaaattggataaattcaacatttgaataaatccgtcaggttttagatggtgggattgatgaactttggtactttctcaatccaaaactaatttatttggaactagtacgttatggcttctcagtcatgaaaagctcagttatttggggtctacattttctcactgagagccttgatattttgccttctttgttatgcattataacttgactgtatcaccactgagtatctgctgtatcagaagttcagaagaaaaggtaaaactgaaatcagaatgggggtagaggaagttaaaaacaagttatttaaaaagaactcttggtttttggatgacttgaattctgttaaatctgtgttcttggccttgcacttccgttcctcttccatctctatccctgctagtcacaatggcattttagaactagaatgccactctgtagaggttttcccttttgctctgttgtgcctatttgtctaattcatatctttctgtggagtttcatatgtccttaatctaaagtaacttaaaattggaatggaagaacaagtttcagaattatttacagtcttatacatagaacttctagtgtaatgtttggttgtaaggagaatgtgaatttgcaggtaaatgaattgtatggcaaccagacagatccctggggtttgggagaaatagagcttgagatttgaaaaaaaggtacaaggtacaaaacaactctaactgccagtgccaaagggctaatttttaagcatgtaagctttaccacagtcttgaaaaaaatattaaccataggttcattcagctgttttatttaacccttagttccctggtggttgattttttttttaaatgggtctccagctttccagtgaaatgtgacactctcaatagaatgcataatgttggtttctaaagttacactccataattattgttattctgtagaaaactgtacagaaggtaaatagaatagcttcaatgggaatataatttaaatttttttaattttataaaaatttatttccattgcattaaaagaaatgggtagcatgtgtctttcagagaaaggagctatttggttattcactttgtcaatcttaggtttttttaaatctttaaacaatttcttctttgtgatgataaaaataatataaatttactgtttctgatcatgactgagtctattacttgtcatggcttttgtacgcaactgtgttttaaaaataccggttttgcctctttggttacatgtggtgagcatggatgtcaagattatttttcaactagattattcaatttgttttatatttcttatacttaatacttatgactacagtccaaatcagtcttttagaaggtgctcttgctaactgtggaatatttgacgacatgaaagtcctttttctttgctttcagtggttggctttcactgaaagaaagtgtaaaaaaagtcagaatttatagctttcactatgtccaagactaggactgggttataaagattttcttttgtgaaggaaaataaaagaaaatttgccactactgcatttactttactattgtaaacttaagattcattccttagtctttggaattttgatgtctcaaaaccagatgagtggaagtgctgaatttgcaaaataaagctaagaatgcttaactctgcactttaagttctactctgaccaaattgaagatgagcagagcagccctgaacagcattttgtttatacagtcttgtttaagaatagaatttttttaactcttcattttttgtctctgtggaagctgtgtaactctttttaaaatgcaatttaaaacattttgttattctaacaattctctcaaaaaacagcatttccaatggtaatcggtattgttacgctgtacttatgtattccctgtacctgaacacttgttgctgcctcacaagaaaatagaacttttatgttaaaaataaagtctgttcttcttg

SEQ ID NO: 2693 - protein, 345 aa, Homo sapiens; identical to SEQ ID NO: 210

SEQ ID NO: 2694 - DNA, 5781 bp, Homo sapiens
gcggccgcgcgcaccagccccacggtggccacgcagacgggcgcgtccgcgacgtccacgcgaggcaccagccccacgcgcagcgccgcgcctggagctcgcgggagccccccacggccgccgccgccgccgccgctgctgggcaccgtgtcgtcgcccagctcgtcgcccacccacctgtggaccggcgaggtgagcgcggccccacccccagcccgcgtccggcatcggaggaggtctccggagcagagccgaagctcgccggagaagaggagccccagcgccccggtttgcaaagcaggtgacaaaacacgacagccttcttcaagcccctccagtattatccgacgcacttcctccctggatactcttgctgcaccgtatcttgctggacactggcctcgggatagccatgggcaagctgcaccttgcatgagggacaaagctacacagacagagagtgcatgggctgaagaatactctgaaaagaagaaagggtctcacaagcgctcagcatcttggggcagtacagatcaacttaaggagattgcaaaattacgccagcagttgcagagaagtaaacacagcagtcggcatcatcgagataaagaaagacagtctccatttcatggcaaccatgcagctattaaccagtgtcaggctcctgttccaaagagtgcacttattcctgtaattcccatcaccaaatcaacaggctcccggttccggaatagcgtggaaggattgaatcaggagattgaaataataattaaagagactggggaaaaggaagagcaacttataccgcaagatattccagatggccatcgtgctccacccccccttgtacagagaagtagcagcacgcgcagcattgacacacagacgcctggtggggcagacaggggaagcaacaacagcagccgttcccagtccgtgtccccaacatcgttcctcaccatttccaatgaaggtagcgaggagagtccttgctcagcggatgacctgcttgttgatcccagagataaagagaatgggaacaattctcctttgcccaaatatgcaacctcaccaaaacctaacaacagttatatgttcaaaagggaacctcctgagggctgtgaaagggtcaaagtctttgaggaatgctcgccaaaacagcttcatgaaatcccagccttttattgtcctgacaaaaacaaggtgaatttcattcctaaaagtggatctgctttctgcctcgtcagcatcctcaagccactccttcctaccccggatcttacactcaagggctctggccacagcctgacagtcaccactggcatgacaaccactctgctgcagcctattgctgtggcctccctgtctacaaacacagagcaagaccgagtctctcgaggaacaagtacagtcatgccatcagcttctctactcccaccaccagaaccaattgaggaagctgaaggataggtcacagtgcaacgtggctgttgttctgggaaattgggaacctcctcagatcactggattctgatggcatcgtgcgcttctggtcggctgtgatgtgctccagctttccagtgacatgtgacggcgaggcttctggaagaaaggatcccccgtgacggctctgccccacttgtgaacgccaaccctcagtgcttagcctgctttttatcaaagcactgattgaaacaagaaaggtctcattctttacctttggagagacaatatcacgtttttgttttcgaattagacttctttaaaacacacacacacacacacacacacacacacacacacacacacacacccctgatccttgccaacatgattcctaaagggagatgtgactgatgctgcaagaaccatcttttctatgaaaatgactattttataatataccaatgttacattttctgaaacgtagcaaacaggatattcaaaagattctttggtggcctctgtttcttgttccctttctagatgtgtgcttttctcagctgttttcagctttgggaccaaagggattgttgacgttttcccagcaatcttaatctcatgactatgttcttctcccaaacaaggattgataggtaaatgcattgaacaagtatatataaaaagagattaaaaagcaatattcgtacattatgtgatttatgtttttgatgtcaaaagtttgtgctttgggtgaaatatttgtataactgctgttttcttcactactcctgtacacatttcaccatgtggtcagaaaagttgtagtctgaagacaagtgctttaatatgttctcacccatattggaacttgatttaaaagtcagtgagccaaaaggaagctatccagcgttgattgctagctaagagtaaggagcccctttggttttctgtgatatatatatatatcacacgctctccctcctttaccacaggtgtcattctacctttaatcatcactgtatcatagccccaaagagatcctgaaatggctgtgcatggatttcctcctttgcccttgtgatgttgttgtcttgtggatttggttgggctagtagtttgccaggagtgtaatccagtggatagtgatccaaactgtagccgcagaatcctgtgactgacatttttctttgtggtggtggttggccctgagatttgttgcctacagattttgctaatttacccccctaacgcttcacatagtggggaaaatacacaagaagaacttgagtatgaacgataagcacctttgaaaactccatacagttttggattagggctcatcctaatataaatcactgccagtatcacatgacatcagtatgtgatttctgggtatgtggtagtgagattaaggagcagcttttttttttttttttttttgagacggagtttcactcttgttgcccaggctggagtgcaatggcgcaatctcggctcactgcgacctctgtctcccaggttcaagcagttctcctgcctcagcctcccaagtagctgggattacaggcatgcaccaccacacccagctaattttgtatttttagtatatatggggtttcaccatgttggtcaggctgttcttgaactcctggcctcaggtgatctgctcgtcttggcctcccaaagtgctgggattacaggtgtgagccaccacgcccatccaggagcagctctttttttaaaagtgagtttcagcaaacagtattgaataaaagcatccttttcatatcttcatatactactttatgatgcaataatttactgttcctatacatattataaggtagaaaaaagtttttaaatccttataaagaggatgcagtttagaaggttaatatgtcagcttacccagacatattctatcaaggaaaacctagtggtagcaataaatctttggaaaggacttcttatactcatgtacctttaaaacatctaagcaatttaaaataatccctgttgagtttaaattcgagatgcatttaggtaaattggataaattcaacatttgaataaatccgtcaggttttagatggtgggattgatgaactttggtactttctcaatccaaaactaatttatttggaactagtacgttatggcttctcagtcatgaaaagctcagttatttggggtctacattttctcactgagagccttgatattttgccttctttgttatgcattataacttgactgtatcaccactgagtatctgctgtatcagaagttcagaagaaaaggtaaaactgaaatcagaatgggggtagaggaagttaaaaacaagttatttaaaaagaactcttggtttttggatgacttgaattctgttaaatctgtgttcttggccttgcacttccgttcctcttccatctctatccctgctagtcacaatggcattttagaactagaatgccactctgtagaggttttcccttttgctctgttgtgcctatttgtctaattcatatctttctgtggagtttcatatgtccttaatctaaagtaacttaaaattggaatggaagaacaagtttcagaattatttacagtcttatacatagaacttctagtgtaatgtttggttgtaaggagaatgtgaatttgcaggtaaatgaattgtatggcaaccagacagatccctggggtttgggagaaatagagcttgagatttgaaaaaaaggtacaaggtacaaaacaactctaactgccagtgccaaagggctaatttttaagcatgtaagctttaccacagtcttgaaaaaaatattaaccataggttcattcagctgttttatttaacccttagttccctggtggttgattttttttttaaatgggtctccagctttccagtgaaatgtgacactctcaatagaatgcataatgttggtttctaaagttacactccataattattgttattctgtagaaaactgtacagaaggtaaatagaatagcttcaatgggaatataatttaaatttttttaattttataaaaatttatttccattgcattaaaagaaatgggtagcatgtgtctttcagagaaaggagctatttggttattcactttgtcaatcttaggtttttttaaatctttaaacaatttcttctttgtgatgataaaaataatataaatttactgtttctgatcatgactgagtctattacttgtcatggcttttgtacgcaactgtgttttaaaaataccggttttgcctctttggttacatgtggtgagcatggatgtcaagattatttttcaactagattattcaatttgttttatatttcttatacttaatacttatgactacagtccaaatcagtcttttagaaggtgctcttgctaactgtggaatatttgacgacatgaaagtcctttttctttgctttcagtggttggctttcactgaaagaaagtgtaaaaaaagtcagaatttatagctttcactatgtccaagactaggactgggttataaagattttcttttgtgaaggaaaataaaagaaaatttgccactactgcatttactttactattgtaaacttaagattcattccttagtctttggaattttgatgtctcaaaaccagatgagtggaagtgctgaatttgcaaaataaagctaagaatgcttaactctgcactttaagttctactctgaccaaattgaagatgagcagagcagccctgaacagcattttgtttatacagtcttgtttaagaatagaatttttttaactcttcattttttgtctctgtggaagctgtgtaactctttttaaaatgcaatttaaaacattttgttattctaacaattctctcaaaaaacagcatttccaatggtaatcggtattgttacgctgtacttatgtattccctgtacctgaacacttgttgctgcctcacaagaaaatagaacttttatgttaaaaataaagtctgttcttcttgagtttttttctgtgaatttttatgaatattgtccaaattcaagttacatttctttttggactggttatttatctagcttttaagcggtacattgtttttctcagactaatagaaaaatttgtttgtgttcagcagcaagttccttgctacccctcacctgccctagaactgaaagtacctgctctttggggtaagtgctaggcacacattaaaatataagcagcacagagagatacccacgcgtgaggaattcactgcttcagagttttgttagaggtaacttagctggggcagtcacttacattcattataaagtaca

SEQ ID NO: 2695 - protein, 345 aa, Homo sapiens; identical to SEQ ID NO: 210

SEQ ID NO: 2696 - DNA, 764 bp, Homo sapiens
cgcgcgcaccagccccacggtggccacgcagacgggcgcgtccgcgacgtccacgcgaggcaccagccccacgcgcagcgccgcgcctggagctcgcgggagccccccacggccgccgccgccgccgccgctgctgggcaccgtgtcgtcgcccagctcgtcgcccacccacctgtggaccggcgaggtgagcgcggccccacccccagcccgcgtccggcatcggaggaggtctccggagcagagccgaagctcgccggagaagaggagccccagcgccccggtttgcaaagcaggtgacaaaacacgacagccttcttcaagcccctccagtattatccgacgcacttcctccctggatactcttgctgcaccgtatcttgctggacactggcctcgggatagccatgggcaagctgcaccttgcatgagggacaaagctacacagacagagagtgcatgggctgaagaatactctgaaaagaagaaagggtctcacaagcgctcagcatcttggggcagtacagatcaacttaaggaggtcagaaaaatggttctaagatagtgggtgtggaaatatgatccttttgttggctatttccttgatattatgggcagcaaggatttgtcgttttccattgatttcttttttctttttggcttctgaaataacaaaaacaattattgtgttgatttaataaagatttcaatagggatatttatatatcacttacctgattatgtatgtttgtctttttttagga

SEQ ID NO: 2697 - protein, 45 aa, Homo sapiens
MRDKATQTESAWAEEYSEKKKGSHKRSASWGSTDQLKEVRKMVLR

SEQ ID NO: 2698 - DNA, 402 bp, Homo sapiens
aggtgaaagatcttgataccacacaggtataattacaatctgcaaacctactcaaggggagttgcaggtgaagataaggaagtcagcctcattccattacctaatcagattctcagccaaagacaaacagcaacatatgggactttaagggtcttgctctgtcacccaggctggagttcactggcatgatcatggctcactgcagcctccatctcctggactcagagacggagcttcaccatgttgcccaggctggtcttgaacatctggactcaagttatctgtcaccttggcctcccaaagtgctgggattacaggcatgagccacagcaccttgcttattcttttgtttgctattaaaatataagcattttctagtcaataaaaattaaccaagaacat

SEQ ID NO: 2699 - protein, 45 aa, Homo sapiens
MIMAHCSLHLLDSETELHHVAQAGLEHLDSSYLSPWPPKVLGLQA

SEQ ID NO: 2700 - DNA, 2589 bp, Homo sapiens
gctactcgggaggctgaggcaggataaactcttgaacccgggatgtggaggttgcaggttgcacgtgacatagccgagatcgcgccattgcactccagcctgggcaacaaaagcgaaactccatctcaaaaaaaaaaaaaaaaaacaaaaaaaacaaaaaaacccagaaaaacaaaaaaacaacaaacaaaaagggaggatggtagataactgtccagatactttccagctttgccgctatatgaactattccttttgtttagttttcagcatgggagcttctggcacttttacgtactttccagcttctggggaccggctgcctagaataacaggcatttgccccagaggccgtggagtggcctcactttggggtcgtgggcagatcgctggctcccacgcctggacttcgggatcgcaggcaggatcccttccagcccaagcactccgcccaggcgcgccaggcagagccccaccccatcccgccgttcccttcagccccggggcgcggatcttgcatctgaaactgagcagagcagggcgccgggcagggccggcgggccacgtgataagcccggaaacagctccgccccctcgcttcctgagccgccacatcccggcagccctcctacctgcgcacgtggtgccgccgctgctgcctcccgctcgccctgaacccagtgcctgcagccatggctcccggccagctcgccttatttagtgtctctgacaaaaccggccttgtggaatttgcaagaaacctgaccgctcttggtttgaatctggtcgcttccggagggactgcaaaagctctcagggatgctggtctggcagtcagagatgtctctgagttgacgggatttcctgaaatgttggggggacgtgtgaaaactttgcatcctgcagtccatgctggaatcctagctcgtaatattccagaagataatgctgacatggccagacttgatttcaatcttataagagttgttgcctgcaatctctatccctttgtaaagacagtggcttctccaggtgtaactgttgaggaggctgtggagcaaattgacattggtggagtaaccttactgagagctgcagccaaaaaccacgctcgagtgacagtggtgtgtgaaccagaggactatgtggtggtgtccacggagatgcagagctccgagagtaaggacacctccttggagactagacgccagttagccttgaaggcattcactcatacggcacaatatgatgaagcaatttcagattatttcaggaaacagtacagcaaaggcgtatctcagatgcccttgagatatggaatgaacccacatcagacccctgcccagctgtacacactgcagcccaagcttcccatcacagttctaaatggagcccctggatttataaacttgtgcgatgctttgaacgcctggcagctggtgaaggaactcaaggaggctttaggtattccagccgctgcctctttcaaacatgtcagcccagcaggtgctgctgttggaattccactcagtgaagatgaggccaaagtctgcatggtttatgatctctataaaaccctcacacccatctcagcggcatatgcaagagcaagaggggctgataggatgtcttcatttggtgattttgttgcattgtccgatgtttgtgatgtaccaactgcaaaaattatttccagagaagtatctgatggtataattgccccaggatatgaagaagaagccttgacaatactttccaaaaagaaaaatggaaactattgtgtccttcagatggaccaatcttacaaaccagatgaaaatgaagttcgaactctctttggtcttcatttaagccagaagagaaataatggtgtcgtcgacaagtcattatttagcaatgttgttaccaaaaataaagatttgccagagtctgccctccgagacctcatcgtagccaccattgctgtcaagtacactcagtctaactctgtgtgctacgccaagaacgggcaggttatcggcattggagcaggacagcagtctcgtatacactgcactcgccttgcaggagataaggcaaactattggtggcttagacaccatccacaagtgctttcgatgaagtttaaaacaggagtgaagagagcagaaatctccaatgccatcgatcaatatgtgactggaaccattggcgaggatgaagatttgataaagtggaaggcactgtttgaggaagtccctgagttactcactgaggcagagaagaaggaatgggttgagaaactgactgaagtttctatcagctctgatgccttcttccctttccgagataacgtagacagagctaaaaggagtggtgtggcgtacattgcggctccctccggttctgctgctgacaaagttgtgattgaggcctgcgacgaactgggaatcatcctcgctcatacgaaccttcggctcttccaccactgattttaccacacactgttttttggcttgcttatgtgtaggtgaacagtcacgcctgaaactttgaggataactttttaaaaaaataaaacagtatctcttaatcactggatccatagtt

SEQ ID NO: 2701 - protein, 592 aa, Homo sapiens; identical to SEQ ID NO: 212

SEQ ID NO: 2702 - DNA, 3948 bp, Homo sapiens
gaagggctgctggagcgcggccagagcggacgccgaggccgaggaggcgccgagagcgagtgagagctgctagccagttgtcacctctcacagagaggtccacatttgctgaaatgtaactcttatctcatgcactgggagtgatgaacttcactaggaaatcatcgttctttctggaattagacgatataagctgcagctcagaatcagagcaggtcaagttgcttcttttcagtgatcataatcaattatccaggaaaagggacagaagaaatcaggaaaaaggagaatagactctttatgcataggagctttaatatatagttgacacttgaacaacatggatctgaactacacaagtccacttattggtggattttcttcagcctctgccacccttgagacaacaagaccaatacctcctctttttccttctcctcagcctactcaacttgaagatggtgagaatgaagacctttatgatcatccacttctacttgttgaatagtaaatatattttttccttatggttttcttaataacactttcttttctcttgattactttattgccagaatacagtacatagtacatataataagcaaagtatgtattagtttactgtttaagtgataggtaaggcttccactcaacagcaggcaacagccaggtgttgtgacacatgcctgtaatcctagcattttgggaggccgaggtggaggatcgcttgagcccaggagttcaagaccagcctaagtaacatagtgagacccccatctccacaaaaaattaaaatacctaatcatggtggtgcatgcctgcaatcccagctactcaggaacctacaataggagccaaaaaggtggaggttacaatgagccattattgcactactgcactgcactcctgcctgggagacagagtgagaccttgtctcaaaacactacaacaaacaacaacaacagcaacaaaaatcagtaggtattaatagttaggttttttgggagtcagaagttatacacagattttgactgtgcaggggatcagcgctcctaacgcctgcattcttcaagggttacctgtattcttgatacaagttctccttcagatttaagtattatagatatttttccagtctatagcttacctattcattttcttaataatgtcttttgattgatttttaatttttaactttggtgaattccagttgtatactttttttatgattagcatttttgtgtcctatgaaactgttgccttcctcaatgtcactaaattctcttaggttttcttctagcaagtttatgtttcaaattttcacccttaggtctataattcgtcccaaatttatttttgtctgtaaagcaatgtcacgattcattttttttctcaatataattacccagttgtttcaaaactggttattaaagtttttctcttaatcattgaattttcttggcaccaaattattaactcttgacaaaaataattgacccttaagtaagcagacagacaagcagtgcttctattttatagcaatgtaaataatacacaacttacacaaagactttttagaagctaactaacagtggtcctatctaagtacgtacaccagattttttataaccacttttaaaataaaagtatttagattttaacacatagattaggacagagaaagcatatggtggaataaactgtatctttttggccagatggtgctatttctaggtcatcttgataaagagaggaggcaaacatgaaaacttaatgaaaaactatttatgatgctggagagaacatcttggctttgagtcacttttaaatcatagaagaggattattccataaaattatttataatgcctaaaattattctttgcccaaatcataaattttcagcattaccaagaagccatttagtatgtatagggtgtttcagcaagtgcagagatgcccaggtggttgggattcaatacaacgagctgtcacgctgcacattcttggagtacaaccttaatgggcattttcccacctgtgcaattcctctgttttcaccccactccattcatatttcacaaactactctaattatagtatttattattgacctcaggaaaaagaagtttgaaagggtggaaaaaacatgcattttgtctccatggatagtaaatcactgagctattgttccttgggaatcccaattcatgagaaattacatagacttttgccctaacactaatcagctgcctgatctgtaaatatttcagatccttgcctgtatctatttctccttgcagaaaactgtaatttatctagatttttctaataattcactgacattttactgctatccaatgagtaaatcattgttgcttttggtatcttatgattttgttcttttgtgtcaaagtttagctagtttcatctatcaggttggaataaaaaatgcaaattatgactataccacttatatagttacatgatctactgaccaaagttaatcatcactttaatcttggtaactcattcagagccctaattgtaatagcctttgcctgagttacctagagagtggtctcaataatccccttttatttttcatgtagagaaaagggcacacaaaatgatattatctcgatcacccagcacatgtattaaactataacagactttttaaatcatgtgtgatcttttattttttgactgaaagggactaagtttgctgcccagagaagtctttagggagcaaggaaaggtaagcaaataaacttatctggagtcaaaggtctcaaggaaaatcttgctttctataaaaggcagacaacgtcaagactcatagattttcccagggctaaaaatcagagccaattgcctcccatcttgaaaagactcattcatcatgctggttgaagtatcacagatcttgtcaaaatattcatgactcacatacgacccatccaaaagacaaaagccaacaaaatattttaccaaattctaaaatagtgtttgttttattattctttgttattcttcaacaattattgttacctttactatatgaaatataatagcaattccttgtcttcatggtctttctgttacagacatgttttacactgattataccactttagtgaaattcatcatacatattcctgatccaaattccttttttattaaccatatatgagagaaagtggatattaaaataattttgatggtaaaataagcgaaaaaataaagcaagcatggttaaaatgattaaattatggaaaagtgacccatgtgtttcagataaactgacgcttgagggtttttgttgttattgtggtttaaattttattttattttaattttaagttccaggatacaagtgcaggatgtgcaggtttcttacataggtaaagatgtgccgaaatggtggtttgctgcacctctcaacctatcacctaggtattaagccctacatgcgttagctccctcccactgcccctgcagcagatcccagtgtttgttgttccctccctgtgtccatgtgttctcattgtccagctcccacttgtaaataagaacctacggtgtttggttttctgttcctgttttagtttgttgaggataatgacttccatgaagcttgagttttcattctacaatttactgaatgacatttgagcagctagctgactttttaatgccttgattttaataattcaatgagttattgggtgagataatttagaacagcatacatgatatcgttattattagtcaataaaatgctatttatcttatttattactcataacaaaaatatgtatatgacccttcgctatgtttgaatatgtgatatattgaattgaattcactgtgaggcttcagtaggtacctataatattcaaatatgttacctgaaagctgtgaaaaatatatttttaaaaattag

SEQ ID NO: 2703 - protein, 49 aa, Homo sapiens; identical to SEQ ID NO: 1319

SEQ ID NO: 2704 - DNA, 405 bp, Homo sapiens
ctgccctcatcatagcagtggaacaggaccagctgggacagggtccttctgtgacacctgctgtgtcaccaggctgtgcgaatggactcagctgcccgaactcacagaatatcagtaacagcaccgaaacttcacaggaaaaatgctccacgaacttcagacttaaaaagcatcactggctcctgaccaggattccagctccatgaacctcaaactagaacaccagcccggcttctctgcaggtctccagctccaaaacctaagacatcagtggcagtacaaactcatcccaggggctccagctccaggaccctcagacttgaaccgcagcaccaactcttccctggatctccatctccatgaccctcagacttaaacagcagcagcaccagttcatctgtgaat

SEQ ID NO: 2705 - protein, 34 aa, Homo sapiens
MDSAARTHRISVTAPKLHRKNAPRTSDLKSITGS

SEQ ID NO: 2706 - DNA, 3699 bp, Homo sapiens
gtgagaaaaaaaaaaaaatggtggtggtagattcagttctaaaatctcaccagatgacacaatcttctacctcgtgaaatactgcagaacttaaaaagagaaaagaaaagaagacctctttcctcctacaggaaaagaatgcagagcctcccaagggtaagaaatactttgtttgcgtatctgtcatatacattctcagcactttcacccacttgggtttcctgtcataagcttttctttagattgagcaactaaagctcagataaatcagaagaattgcctcaaagatgcacagatcatatgttttattgttggaccccatacgagggactatcatagggtttagtgctggaccccatacaagggactatcatagggtttgttatctgtgtgaaatgagagtacatatctgtgtgaatttgatcgggttacatgcatagaatcaagttgtgtttacctatatgcctattaaacccattccagtgtaggtttcaattgagtattgagtagtgaaatctaaagaagatgcatgtgttattttctggtggaataattttattttccctttgtagattggcaaaaaaaaatgatgagaacagcttaaattttgttttggggaaaatcttttaacaaaaagttgttgtcatgaattttgttgctttatgtatctatatatctatatctatatctatatctattacttcttcaaggtcctttagggactcaaccatttttcaataacagatttttagcagtaaagttgcatatattccctatatcatcccttccatgaaaggaagtggatcctaaacaacttgggttgtaggaatgataaatccctaatgtttatgtgactcagcaggtaggggataaaggcttaatttttgaaggtatattaaggtaagtaattagggaaccattatgtgctagaacagtatatctccaaagacaatctacttctacttagctttactgacctgcccagtaaattccacagaagctgatggcgtaatccaaatccagcctattccaagaaacacatttagatataattttagttagagtcattgttgagtttgaaagagatgaacacatttcccttcatcttgaaatgttcccttttggaaaatctaattctccccaagaaaatgattggatacctaaatcatctttgaaaagtaaaatctttccctagatcttatctcatcttttaaagctcatgtgtttgtctctgacaatgctataaatgcattttcaagagaggaatttgtcctactctttaaattacttttatgaatagtcaaagtgattttcctttagtgttcaaacttcctgcagatgattagtccacacttccagaaaccaaaatatataaagacttcttcctaaattagtcatataactttatattgggcaataagtgaatactgtgcaattttgctttgtcagtaatctgacaaatactgaaaaatactgatgtatatcaagattcaacttctgagtgcccagtggctttctaaactgatcagttaaaaagttttgtcagacgcctgtagtcccagccactctggaggctgaggcaggagaagggagtgaacccgggaggcggagcttgcaatgagctgagatggcgccactgcactccagcctgggccacagagggagactccgtctcaaaaataaaaaaattaaaaaaaatttttaaaaaagttttgtcatccaatgacaacaagtttaaaaatattttaagagaagtatgaataagtaaatactgtatcagattgattataaattatagaaaagttaaaataggtcagatttttcattcttcgttttcatagtttgagattcttagattattaaaatagaaaggaactggttttctaaaggaactggattcaaagtcacttctatcttatgaacccattgtatacatgacatctgatgaagaagaccaatatgaaaagcaggggagagtctctggttgaatcagaaagctcctggccaccacaaaacttgtaacttgctccttgtcctggtggctcaagaagtttgtgaggtatagtttgaaaactactgatctagtcaaacagtactttatagagggataaaaaaaaaattctggagatgtggcatgaactgaattatttacgatcacacatagaagtgaaggcaaaatttaaaatggaaatcagcacacctttaaaacagccttctccatggaaacatccctgagaaattttcacccttactgatcattttgtcttcccatcttctcagcaaacacatcatttattggctatgtccacagtaacaatgtaatttgtgaaatgtttcaggtcagtgaagtaatctgggagaattgaaaatgctttgagggtagaactacatagcacagctttttgagtcccatagagtgcttttggtctatataaacaaacaatggataaaaggaagataagaccaacaatacagtattatacagtattgctttggaggcaatatatagcacagaacacttttatacagaacgtgacaagtgtttcaaaggaaaggatttcatgcaaaagtaaacttgataaagtctgcactaaacaaagttaaacagtaatgattgcctcctctgagttttgaatatgctaatgtatattaagaatctgcaataatgggaatttttcgaattttccatagagccttaaaaatatgatagatattgcatgcctcaagttcatggtctgcagaatatatttagtaaaatttaagaaaggaacaagactagaagtcagaagtttgatgttttgaactcaaaccctgtgccacaaaaactttggaaagcaacttctctgatcatcagtctcttcatccataaaatagcattgcctatctgagagttaaatatcaaagaagattaatataaaaggctttgcaaaaagttaagctccactgaaacataaagcatgtttattgtgttgtaagtttacaaatataactttactgattgacttgaatagaggcacaaacagcatcccttcaacaacattttcagaataaaacaatgatatttctagacaatagtgtctcaaataaaaaaccaaagttttattcaaataacttgcaattatgatagatatttttcaattttatttagtagccaggaatttgaatgttaattactttatcgtgaacttatttcttccatgaagaagctaattgaaaaattaccaaattctgtatttttgtaaacataacaaaaagatacattgagtaaatattttaaatctactcaagttacttgaagatttttctttatgagaggttacaaaaattaaacaaattcacatttctaacaaagaacaacatattctctctacaaatatatacattgtataatgtaatactaagtctaaaaagatttgcaaggcatggtggctcacacctgtaatcccagcactttgggagggcaaggtaggaggattgcttgaggccaggagttcaagaccagcctgggaaacacaacgagaccctgtatctgccaaaaaaaaaaaaaaaattgaccagccataatggcaatggcctggggttccagctactcaggaggctgaggtgggaggattgcttgaaccccagagtttgaggctgcagtgagctatgatcacgccactgcactccagcgtggaaaaaacagtaagaccctgtctc

SEQ ID NO: 2707 - protein, 53 aa, Homo sapiens
MDKRKIRPTIQYYTVLLWRQYIAQNTFIQNVTSVSKERISCKSKLDKVCTKQS

SEQ ID NO: 2708 - DNA, 3377 bp, Homo sapiens
cgcaatactcagtggataaaaggcttgcagtcccagctgggaaaaagagtcccattatctcccagctgcatagacattccatacggcttggttctgcctggacgcacagcatgcctggctgagagcttgaaacagagttctgcagaaaaactgtaaagatcccgagacatttccctggtaagatctactcttgagatactgactggaagatagactgttttgttccacctgattgtatgggagaaatttttgaccttagaaagtggaaatgaggttgctatggaaactggtaattctgctgccactcataaactcttctgcaggtgatggtcttttaagccgtcctatttttactcaggagccacatgatgtcatttttcctttggatttatcaaaatctgaggtcatcctgaattgtgctgctaatggttacccttcgcctcattataggtggaagcaaaatggcacagacattgattttactatgagttatcactacaggttggatggaggcagtcttgcaatcaatagcccccacacagatcaagatattggcatgtaccagtgcctggccaccaatcttctggggacaattctgagtcggaaggcaaagctccaatttgcatatattgaagactttgaaactaaaacaagaagcacagtatctgtccgagaaggtcaaggtgtggtgcttctctgtggcccaccgccacattttggagatttatcttatgcatggaccttcaatgataaccccttatacgtccaagaggacaataggcgatttgtatctcaagagacgggaaacttgtacattgccaaagtggaaccatcagatgtgggcaactacacttgctttataactaacaaagaggcccagagaagtgttcaaggtccacccactccattagtgcagcgcactgatggtgtgatgggggaatatgaaccaaagattgaagtgcgttttcctgaaactatacaagctgcaaaggattcatctgtaaaactggaatgttttgcccttggaaatccagtccccgatattagttggagaaggttggacgggagcccgttgccagggaaagtcaagtacagcaaatcccaagctatccttgaaatcccgaacttccaacaagaagatgaaggcttttatgagtgcattgcaagcaaccttcgaggaagaaaccttgcaaagggtcaactcattttttatgctcctccagaatgggaacagaaaatccaaaatacacacctctctatctatgacaacttgctctgggaatgtaaagctagtggaaagccaaacccttggtatacatggttaaaaaatggtgaacgactcaacccagaggagagaattcaaatagaaaatgggacactcatcataacgatgctgaatgtgtcagattctggtgtgtaccaatgtgctgcagaaaacaaatatcagataatttatgcaaatgctgaattgagagttttagcctcagctccagatttctccaaaagtccagttaaaaaaaagtcttttgttcaagttggtggggatattgttatcggatgcaaaccaaatgcttttcccagggcagctatctcttggaaaagaggaacggagacccttagacaaagcaaaagaatatttctcttggaggatggcagcctcaagatatataatattaccaggtcagatgctggatcatatacatgcatagccacaaatcagtttggcactgcaaagaacactggcagcctcattgtaaaagagagaactgtcattaccgtcccaccttccaaaatggatgttacagttggcgagagtatagtgctaccatgccaggtgtcccatgacccctccattgaagtggtatttgtatggtttttcaatggagatgtcatagacttaaaaaaaggagtggctcattttgaaaggattggaggagaatctgttggggatttgatgataaggaatattcagttacatcattcaggaaaatatctctgcacagtacaaacaaccctagaaagtttatctgcagtagccgatatcattgttagaggtccaccaggtcctcctgaggatgtgcaagtggaagacatttccagtactacttctcaactaagttggagagcaggcccagataataacagtcccattcaaatatttactattcagactcggacaccattttctgtgggttggcaggctgttgctacagttccagaaattctcaatggtaagacatacaatgcaacagtggttggtttgagtccttgggtggaatatgaatttcgtgttgttgccggcaacagcattgggattggagaaccaagtgaaccatcagaattgttaagaactaaagcatcagtccctgttgtggcaccagtaaacatccatggaggtggaggaagtcggtctgaactcgtcattacgtgggagtcaattccagaagaactgcagaatggggagggatttggatatatcatcatgttccggccagtgggctcgacaacctggtccaaggagaaagtgtcatctgtggaatcatcaaggtttgtctacagaaatgaaagcatcatcccactgtctccctttgaagtcaaagtgggtgtgtataataatgaaggagaaggatccctgagtactgtgaccattgtctactctggggaagatgaacctcaactggccccaaggggaacttctctccagagtttttctgcttctgaaatggaggtttcatggaatgctattgcctggaatagaaacactggaagagtgctgggctatgaggtcttatactggacagatgactccaaagaatccatgataggtaaaattagagtcagtggaaatgtcacaaccaaaaacatcacggggctgaaagctaataccatctactttgcttccgtaagagcttacaacactgctgggacagggccctcaagccccccagtcaatgttaccaccaaaaagtctcctccaagccaaccaccagcaaacattgcctggaagctgacaaactctaaattatgcttgaactgggagcatgtaaaaaccatggaaaatgagtctgaagttttggggtacaagattctgtaccggcaaaacagacagagtaaaactcatattttggaaacaaacaatacatcagctgagcttctggttccatttgaagaagactacttaattgaaataagaacagtcagtgatggtggagatggaagcagcagtgaggaaattaggattccaaaaatgtcaagtttgagttccagaggaattcaattcttagaacctagcacccattttctttccattgtcattgtgatttttcactgttttgctattcagccacttatctgatgaataaaaccataaatctttg

SEQ ID NO: 2709 - protein, 1028 aa, Homo sapiens; identical to SEQ ID NO: 214

SEQ ID NO: 2710 - DNA, 3531 bp, Homo sapiens
cgcaatactcagtggataaaaggcttgcagtcccagctgggaaaaagagtcccattatctcccagctgcatagacattccatacggcttggttctgcctggacgcacagcatgcctggctgagagcttgaaacagagttctgcagaaaaactgtaaagatcccgagacatttccctggtaagatctactcttgagatactgactggaagatagactgttttgttccacctgattgtatgggagaaatttttgaccttagaaagtggaaatgaggttgctatggaaactggtaattctgctgccactcataaactcttctgcaggtgatggtcttttaagccgtcctatttttactcaggagccacatgatgtcatttttcctttggatttatcaaaatctgaggtcatcctgaattgtgctgctaatggttacccttcgcctcattataggtggaagcaaaatggcacagacattgattttactatgagttatcactacaggttggatggaggcagtcttgcaatcaatagcccccacacagatcaagatattggcatgtaccagtgcctggccaccaatcttctggggacaattctgagtcggaaggcaaagctccaatttgcatatattgaagactttgaaactaaaacaagaagcacagtatctgtccgagaaggtcaaggtgtggtgcttctctgtggcccaccgccacattttggagatttatcttatgcatggaccttcaatgataaccccttatacgtccaagaggacaataggcgatttgtatctcaagagacgggaaacttgtacattgccaaagtggaaccatcagatgtgggcaactacacttgctttataactaacaaagaggcccagagaagtgttcaaggtccacccactccattagtgcagcgcactgatggtgtgatgggggaatatgaaccaaagattgaagtgcgttttcctgaaactatacaagctgcaaaggattcatctgtaaaactggaatgttttgcccttggaaatccagtccccgatattagttggagaaggttggacgggagcccgttgccagggaaagtcaagtacagcaaatcccaagctatccttgaaatcccgaacttccaacaagaagatgaaggcttttatgagtgcattgcaagcaaccttcgaggaagaaaccttgcaaagggtcaactcattttttatgctcctccagaatgggaacagaaaatccaaaatacacacctctctatctatgacaacttgctctgggaatgtaaagctagtggaaagccaaacccttggtatacatggttaaaaaatggtgaacgactcaacccagaggagagaattcaaatagaaaatgggacactcatcataacgatgctgaatgtgtcagattctggtgtgtaccaatgtgctgcagaaaacaaatatcagataatttatgcaaatgctgaattgagagttttagcctcagctccagatttctccaaaagtccagttaaaaaaaagtcttttgttcaagttggtggggatattgttatcggatgcaaaccaaatgcttttcccagggcagctatctcttggaaaagaggaacggagacccttagacaaagcaaaagaatatttctcttggaggatggcagcctcaagatatataatattaccaggtcagatgctggatcatatacatgcatagccacaaatcagtttggcactgcaaagaacactggcagcctcattgtaaaagagagaactgtcattaccgtcccaccttccaaaatggatgttacagttggcgagagtatagtgctaccatgccaggtgtcccatgacccctccattgaagtggtatttgtatggtttttcaatggagatgtcatagacttaaaaaaaggagtggctcattttgaaaggattggaggagaatctgttggggatttgatgataaggaatattcagttacatcattcaggaaaatatctctgcacagtacaaacaaccctagaaagtttatctgcagtagccgatatcattgttagaggtccaccaggtcctcctgaggatgtgcaagtggaagacatttccagtactacttctcaactaagttggagagcaggcccagataataacagtcccattcaaatatttactattcagactcggacaccattttctgtgggttggcaggctgttgctacagttccagaaattctcaatggtaagacatacaatgcaacagtggttggtttgagtccttgggtggaatatgaatttcgtgttgttgccggcaacagcattgggattggagaaccaagtgaaccatcagaattgttaagaactaaagcatcagtccctgttgtggcaccagtaaacatccatggaggtggaggaagtcggtctgaactcgtcattacgtgggagtcaattccagaagaactgcagaatggggagggatttggatatatcatcatgttccggccagtgggctcgacaacctggtccaaggagaaagtgtcatctgtggaatcatcaaggtttgtctacagaaatgaaagcatcatcccactgtctccctttgaagtcaaagtgggtgtgtataataatgaaggagaaggatccctgagtactgtgaccattgtctactctggggaagatgaacctcaactggccccaaggggaacttctctccagagtttttctgcttctgaaatggaggtttcatggaatgctattgcctggaatagaaacactggaagagtgctgggctatgaggtcttatactggacagatgactccaaagaatccatgataggtaaaattagagtcagtggaaatgtcacaaccaaaaacatcacggggctgaaagctaataccatctactttgcttccgtaagagcttacaacactgctgggacagggccctcaagccccccagtcaatgttaccaccaaaaagtctcctccaagccaaccaccagcaaacattgcctggaagctgacaaactctaaattatgcttgaactgggagcatgtaaaaaccatggaaaatgagtctgaagttttggggtacaagattctgtaccggcaaaacagacagagtaaaactcatattttggaaacaaacaatacatcagctgagcttctggttccatttgaagaagactacttaattgaaataagaacagtcagtgatggtggagatggaagcagcagtgaggaaattaggattccaaaaatgtcaagtttgagttccagaggaattcaattcttagaacctagcacccattttctttccattgtcattgtgatttttcactgttttgctattcagccacttatctgatgaataaaaccataaatctttgagagttttttgaaagcaaatcattctgtatatatgctctccagcctctgacacaagatgcgttcttaatacagacttgtttgcaaagaaaaaaaaaagtatattattaaaatcctgtaaatatctatggtatattaataaaacaattttaaaca

SEQ ID NO: 2711 - protein, 1028 aa, Homo sapiens; identical to SEQ ID NO: 214

SEQ ID NO: 2712 - DNA, 745 bp, Homo sapiens
aattaatatatttcaaatgacactgaagacattttagctccttctatgcaaatcatcgaagacttattttttcttttcatgttgatgcatcatactttgaccatgagctaattaacattcatttggatctttgattatctctttaaagctccaagccaaccaccagcaaacattgcctggaagctgacaaactctaaattatgcttgaactgggagcatgtaaaaaccatggaaaatgagtctgaagttttggggtacaagattctgtaccggcaaaacagacagagtaaaactcatattttggaaacaaacaatacatcagctgagcttctggttccatttgaagaagactacttaattgaaataagaacagtcagtgatggtggagatggaagcagcagtgaggaaattaggattccaaaaatgtcaagtaagttgagtcaccattgctgtagtagattctgaacctagacagctgcagcatgaaattcagctccatgaaaccttccagttatggcttaaatgttgggtgataagataaattttcaattgtgagcaaaaggtgatgagccatttttttaagttattctccaaaattataacatacactataaatggttttatgcttcctcatttgaaaaccaaaaagagaacaggaaaaaaaatctttgtgtcattagagcataattgtatcactcattctattatcacaaaaatcagaaagatttttcatagattctttcgg

SEQ ID NO: 2713 - protein, 78 aa, Homo sapiens
MENESEVLGYKILYRQNRQSKTHILETNNTSAELLVPFEEDYLIEIRTVSDGGDGSSSEEIRIPKMSSKLSHHCCSRF

SEQ ID NO: 2714 - DNA, 5216 bp, Homo sapiens
agagcggcgtcgggcctggcgggaaagtcgaaaactacgggcggcgacggcttctcggaagtaatttaagtgcacaagacattggtcaaaatggtttccaaaagaagactgtcaaaatctgaggataaagagagcctgacagaagatgcctccaaaaccaggaagcaaccactttccaaaaagacaaagaaatctcatattgctaatgaagttgaagaaaatgacagcatctttgtaaagcttcttaagatatcaggaattattcttaaaacgggagagagtcagaatcaactagctgtggatcaaatagctttccaaaagaagctctttcagaccctgaggagacacccttcctatcccaaaataatagaagaatttgttagtggcctggagtcttacattgaggatgaagacagtttcaggaactgccttttgtcttgtgagcgtctgcaggatgaggaagccagtatgggtgcatcttattctaagagtctcatcaaactgcttctggggattgacatactgcagcctgccattatcaaaaccttatttgagaagttgccagaatatttttttgaaaacaagaacagtgatgaaatcaacatacctcgactcattgtcagtcaactaaaatggcttgacagagttgtggatggcaaggacctcaccaccaagatcatgcagctgatcagtattgctccagagaacctgcagcatgacatcatcaccagcctacctgagatcctaggggattcccagcacgctgatgtggggaaagaactcagtgacctactgatagagaatacttcactcactgtcccaatcctggatgtcctttcaagcctccgacttgacccaaacttcctattgaaggttcgccagttggtgatggataagttgtcgtctattagattggaggatttacctgtgataataaagttcattcttcattccgtaacagccatggatacacttgaggtaatttctgagcttcgggagaagttggatctgcagcattgtgttttgccatcacggttacaggcttcccaagtaaagttgaaaagtaaaggacgagcaagttcctcaggaaatcaagaaagcagcggtcagagctgtattattctcctctttgatgtaataaagtcagctattagatatgagaaaaccatttcagaagcctggattaaggcaattgaaaacactgcctcagtatctgaacacaaggtgtttgacctggtgatgcttttcatcatctatagcaccaatactcagacaaagaagtacattgacagggtgctaagaaataagattcgatcaggctgcattcaagaacagctgctccagagtacattctctgttcattacttagttcttaaggatatgtgttcatccattctgtcgctggctcagagtttgcttcactctctagaccagagtataatttcatttggcagtctcctatacaaatatgcatttaagttttttgacacgtactgccagcaggaagtggttggtgccttagtgacccatatctgcagtgggaatgaagctgaagttgatactgccttagatgtccttctagagttggtagtgttaaacccatctgctatgatgatgaatgctgtctttgtaaagggcattttagattatctggataacatatcccctcagcaaatacgaaaactcttctatgttctcagcacactggcatttagcaaacagaatgaagccagcagccacatccaggatgacatgcacttggtgataagaaagcagctctctagcaccgtattcaagtacaagctcattgggattattggtgctgtgaccatggctggcatcatggcggcagacagaagtgaatcacctagtttgacccaagagagagccaacctgagcgatgagcagtgcacacaggtgacctccttgttgcagttggttcattcctgcagtgagcagtctcctcaggcctctgcactttactatgatgaatttgccaacctgatccaacatgaaaagctggatccaaaagccctggaatgggttgggcataccatctgtaatgatttccaggatgccttcgtagtggactcctgtgttgttccggaaggtgactttccatttcctgtgaaagcactgtacggactggaagaatacgacactcaggatgggattgccataaacctcctgccgctgctgttttctcaggactttgcaaaagatgggggtccggtgacctcacaggaatcaggccaaaaattggtgtctccgctgtgcctggctccgtatttccggttactgagactttgtgtggagagacagcataacggaaacttggaggagattgatggtctactagattgtcctatattcctaactgacctggagcctggagagaagttggagtccatgtctgctaaagagcgttcattcatgtgttctctcatatttcttactctcaactggttccgagagattgtaaatgccttctgccaggaaacatcacctgagatgaaggggaaggtgctcactcggttaaagcacattgtagaattgcaaataatcctggaaaagtacttggcagtcaccccagactatgtccctcctcttggaaactttgatgtggaaactttagatataacacctcatactgttactgctatttcagcaaaaatcagaaagaaaggaaaaatagaaaggaaacaaaaaacagatggcagcaagacatcctcctctgacacactttcagaagagaaaaattcagaatgtgaccctacgccatctcatagaggccagctaaacaaggagttcacagggaaggaagaaaagacatcattgttactacataattcccatgcttttttccgagagctggacattgaggtcttctctattctacattgtggacttgtgacgaagttcatcttagatactgaaatgcacactgaagctacagaagttgtgcaacttgggccccctgagctgcttttcttgctggaagatctctcccagaagctggagagtatgctgacacctcctattgccaggagagtcccctttctcaagaacaaaggaagccggaatattggattctcacatctccaacagagatctgcccaagaaattgttcattgtgtttttcaactgctgaccccaatgtgtaaccacctggagaacattcacaactattttcagtgtttagctgctgagaatcacggtgtagttgatggaccaggagtgaaagttcaggagtaccacataatgtcttcctgctatcagaggctgctgcagatttttcatgggctttttgcttggagtggattttctcaacctgaaaatcagaatttactgtattcagccctccatgtccttagtagccgactgaaacagggagaacacagccagcctttggaggaactactcagccagagcgtccattacttgcagaatttccatcaaagcattcccagtttccagtgtgctctttatctcatcagacttttgatggttattttggagaaatcaacagcttctgctcagaacaaagaaaaaattgcttcccttgccagacaattcctctgtcgggtgtggccaagtggggataaagagaagagcaacatctctaatgaccagctccatgctctgctctgtatctacctggagcacacagagagcattctgaaggccatagaggagattgctggtgttggtgtcccagaactgatcaactctcctaaagatgcatcttcctccacattccctacactgaccaggcatacttttgttgttttcttccgtgtgatgatggctgaactagagaagacggtgaaaaaaattgagcctggcacagcagcagactcgcagcagattcatgaagagaaactcctctactggaacatggctgttcgagacttcagtatcctcatcaacttgataaaggtatttgatagtcatcctgttctgcatgtatgtttgaagtatgggcgtctctttgtggaagcatttctgaagcaatgtatgccgctcctagacttcagttttagaaaacaccgggaagatgttctgagcttactggaaaccttccagttggacacaaggctgcttcatcacctgtgtgggcattccaagattcaccaggacacgagactcacccaacatgtgcctctgctcaaaaagaccctggaacttttagtttgcagagtcaaagctatgctcactctcaacaattgtagagaggctttctggctgggcaatctaaaaaaccgggacttgcagggtgaagagattaagtcccaaaattcccaggagagcacagcagatgagagtgaggatgacatgtcatcccaggcctccaagagcaaagccactgaggtatctctacaaaacccaccagagtctggcactgatggttgcattttgttaattgttctaagttggtggagcagaactttgcctacttatgtttattgtcaaatgcttctatgcccatttccattccctccataacagcttctgtgcttatataatttttgggacccagaagaaacaacgacacaatcttagaatcactcctgagtatctcgagttgtggcatttgttatagagttgacaattttctgcattatagcctctcattttccatgaattcatatctgaaaccattttagaagggagaagtcatcgaagtattttctgagtgttgagaagaatgagttaaaccatttaaacacatttgaaacatacaaaaatagaaatgtgaaagcatttggtgaaagccaaagcacagagtcagaagctgccaccttagagaactgaaataaaaatagaagttcttacgcttttttgtggtacagatgctttcgacaatttaaagaaagctaaataaaaatgtagacatggctggcgcagtggctcatgcttgtaatcctagcactttttgaggccaaggtaggaggattgcttgagtccgggagctcaaggcaaagctgcacaacataacaagaccctatctccacaaaaaaaatgaaaaataaacctgggtgcggtggctcacacctgtaatcccagcactttgggaggccgatgtgggcagatcacaaggtcaggagttcaagaccagcctggccaacatagtgaaaccccatctctactgaaaatacaaaaattagctgggtgtggtggcacgtgcctgttatctcagctacttgggaggctga

SEQ ID NO: 2715 - protein, 1471 aa, Homo sapiens; identical to SEQ ID NO: 218

SEQ ID NO: 2716 - DNA, 4484 bp, Homo sapiens
agagcggcgtcgggcctggcgggaaagtcgaaaactacgggcggcgacggcttctcggaagtaatttaagtgcacaagacattggtcaaaatggtttccaaaagaagactgtcaaaatctgaggataaagagagcctgacagaagatgcctccaaaaccaggaagcaaccactttccaaaaagacaaagaaatctcatattgctaatgaagttgaagaaaatgacagcatctttgtaaagcttcttaagatatcaggaattattcttaaaacgggagagagtcagaatcaactagctgtggatcaaatagctttccaaaagaagctctttcagaccctgaggagacacccttcctatcccaaaataatagaagaatttgttagtggcctggagtcttacattgaggatgaagacagtttcaggaactgccttttgtcttgtgagcgtctgcaggatgaggaagccagtatgggtgcatcttattctaagagtctcatcaaactgcttctggggattgacatactgcagcctgccattatcaaaaccttatttgagaagttgccagaatatttttttgaaaacaagaacagtgatgaaatcaacatacctcgactcattgtcagtcaactaaaatggcttgacagagttgtggatggcaaggacctcaccaccaagatcatgcagctgatcagtattgctccagagaacctgcagcatgacatcatcaccagcctacctgagatcctaggggattcccagcacgctgatgtggggaaagaactcagtgacctactgatagagaatacttcactcactgtcccaatcctggatgtcctttcaagcctccgacttgacccaaacttcctattgaaggttcgccagttggtgatggataagttgtcgtctattagattggaggatttacctgtgataataaagttcattcttcattccgtaacagccatggatacacttgaggtaatttctgagcttcgggagaagttggatctgcagcattgtgttttgccatcacggttacaggcttcccaagtaaagttgaaaagtaaaggacgagcaagttcctcaggaaatcaagaaagcagcggtcagagctgtattattctcctctttgatgtaataaagtcagctattagatatgagaaaaccatttcagaagcctggattaaggcaattgaaaacactgcctcagtatctgaacacaaggtgtttgacctggtgatgcttttcatcatctatagcaccaatactcagacaaagaagtacattgacagggtgctaagaaataagattcgatcaggctgcattcaagaacagctgctccagagtacattctctgttcattacttagttcttaaggatatgtgttcatccattctgtcgctggctcagagtttgcttcactctctagaccagagtataatttcatttggcagtctcctatacaaatatgcatttaagttttttgacacgtactgccagcaggaagtggttggtgccttagtgacccatatctgcagtgggaatgaagctgaagttgatactgccttagatgtccttctagagttggtagtgttaaacccatctgctatgatgatgaatgctgtctttgtaaagggcattttagattatctggataacatatcccctcagcaaatacgaaaactcttctatgttctcagcacactggcatttagcaaacagaatgaagccagcagccacatccaggatgacatgcacttggtgataagaaagcagctctctagcaccgtattcaagtacaagctcattgggattattggtgctgtgaccatggctggcatcatggcggcagacagaagtgaatcacctagtttgacccaagagagagccaacctgagcgatgagcagtgcacacaggtgacctccttgttgcagttggttcattcctgcagtgagcagtctcctcaggcctctgcactttactatgatgaatttgccaacctgatccaacatgaaaagctggatccaaaagccctggaatgggttgggcataccatctgtaatgatttccaggatgccttcgtagtggactcctgtgttgttccggaaggtgactttccatttcctgtgaaagcactgtacggactggaagaatacgacactcaggatgggattgccataaacctcctgccgctgctgttttctcaggactttgcaaaagatgggggtccggtgacctcacaggaatcaggccaaaaattggtgtctccgctgtgcctggctccgtatttccggttactgagactttgtgtggagagacagcataacggaaacttggaggagattgatggtctactagattgtcctatattcctaactgacctggagcctggagagaagttggagtccatgtctgctaaagagcgttcattcatgtgttctctcatatttcttactctcaactggttccgagagattgtaaatgccttctgccaggaaacatcacctgagatgaaggggaaggtgctcactcggttaaagcacattgtagaattgcaaataatcctggaaaagtacttggcagtcaccccagactatgtccctcctcttggaaactttgatgtggaaactttagatataacacctcatactgttactgctatttcagcaaaaatcagaaagaaaggaaaaatagaaaggaaacaaaaaacagatggcagcaagacatcctcctctgacacactttcagaagagaaaaattcagaatgtgaccctacgccatctcatagaggccagctaaacaaggagttcacagggaaggaagaaaagacatcattgttactacataattcccatgcttttttccgagagctggacattgaggtcttctctattctacattgtggacttgtgacgaagttcatcttagatactgaaatgcacactgaagctacagaagttgtgcaacttgggccccctgagctgcttttcttgctggaagatctctcccagaagctggagagtatgctgacacctcctattgccaggagagtcccctttctcaagaacaaaggaagccggaatattggattctcacatctccaacagagatctgcccaagaaattgttcattgtgtttttcaactgctgaccccaatgtgtaaccacctggagaacattcacaactattttcagtgtttagctgctgagaatcacggtgtagttgatggaccaggagtgaaagttcaggagtaccacataatgtcttcctgctatcagaggctgctgcagatttttcatgggctttttgcttggagtggattttctcaacctgaaaatcagaatttactgtattcagccctccatgtccttagtagccgactgaaacagggagaacacagccagcctttggaggaactactcagccagagcgtccattacttgcagaatttccatcaaagcattcccagtttccagtgtgctctttatctcatcagacttttgatggttattttggagaaatcaacagcttctgctcagaacaaagaaaaaattgcttcccttgccagacaattcctctgtcgggtgtggccaagtggggataaagagaagagcaacatctctaatgaccagctccatgctctgctctgtatctacctggagcacacagagagcattctgaaggccatagaggagattgctggtgttggtgtcccagaactgatcaactctcctaaagatgcatcttcctccacattccctacactgaccaggcatacttttgttgttttcttccgtgtgatgatggctgaactagagaagacggtgaaaaaaattgagcctggcacagcagcagactcgcagcagattcatgaagagaaactcctctactggaacatggctgttcgagacttcagtatcctcatcaacttgataaaggtatttgatagtcatcctgttctgcatgtatgtttgaagtatgggcgtctctttgtggaagcatttctgaagcaatgtatgccgctcctagacttcagttttagaaaacaccgggaagatgttctgagcttactggaaaccttccagttggacacaaggctgcttcatcacctgtgtgggcattccaagattcaccaggacacgagactcacccaacatgtgcctctgctcaaaaagaccctggaacttttagtttgcagagtcaaagctatgctcactctcaacaattgtagagaggctttctggctgggcaatctaaaaaaccgggacttgcagggtgaagagattaagtcccaaaattcccaggagagcacagcagatgagagtgaggatgacatgtcatcccaggcctccaagagcaaagccactgaggatggtgaagaagacgaagtaagtgctggagaaaaggagcaagatagtgatgagagttatgatgactctgattagaccccagataaattgttgcctgcttctgtgtctctgcc

SEQ ID NO: 2717 - protein, 1451 aa, Homo sapiens; identical to SEQ ID NO: 216

SEQ ID NO: 2718 - DNA, 5120 bp, Homo sapiens
agagcggcgtcgggcctggcgggaaagtcgaaaactacgggcggcgacggcttctcggaagtaatttaagtgcacaagacattggtcaaaatggtttccaaaagaagactgtcaaaatctgaggataaagagagcctgacagaagatgcctccaaaaccaggaagcaaccactttccaaaaagacaaagaaatctcatattgctaatgaagttgaagaaaatgacagcatctttgtaaagcttcttaagatatcaggaattattcttaaaacgggagagagtcagaatcaactagctgtggatcaaatagctttccaaaagaagctctttcagaccctgaggagacacccttcctatcccaaaataatagaagaatttgttagtggcctggagtcttacattgaggatgaagacagtttcaggaactgccttttgtcttgtgagcgtctgcaggatgaggaagccagtatgggtgcatcttattctaagagtctcatcaaactgcttctggggattgacatactgcagcctgccattatcaaaaccttatttgagaagttgccagaatatttttttgaaaacaagaacagtgatgaaatcaacatacctcgactcattgtcagtcaactaaaatggcttgacagagttgtggatggcaaggacctcaccaccaagatcatgcagctgatcagtattgctccagagaacctgcagcatgacatcatcaccagcctacctgagatcctaggggattcccagcacgctgatgtggggaaagaactcagtgacctactgatagagaatacttcactcactgtcccaatcctggatgtcctttcaagcctccgacttgacccaaacttcctattgaaggttcgccagttggtgatggataagttgtcgtctattagattggaggatttacctgtgataataaagttcattcttcattccgtaacagccatggatacacttgaggtaatttctgagcttcgggagaagttggatctgcagcattgtgttttgccatcacggttacaggcttcccaagtaaagttgaaaagtaaaggacgagcaagttcctcaggaaatcaagaaagcagcggtcagagctgtattattctcctctttgatgtaataaagtcagctattagatatgagaaaaccatttcagaagcctggattaaggcaattgaaaacactgcctcagtatctgaacacaaggtgtttgacctggtgatgcttttcatcatctatagcaccaatactcagacaaagaagtacattgacagggtgctaagaaataagattcgatcaggctgcattcaagaacagctgctccagagtacattctctgttcattacttagttcttaaggatatgtgttcatccattctgtcgctggctcagagtttgcttcactctctagaccagagtataatttcatttggcagtctcctatacaaatatgcatttaagttttttgacacgtactgccagcaggaagtggttggtgccttagtgacccatatctgcagtgggaatgaagctgaagttgatactgccttagatgtccttctagagttggtagtgttaaacccatctgctatgatgatgaatgctgtctttgtaaagggcattttagattatctggataacatatcccctcagcaaatacgaaaactcttctatgttctcagcacactggcatttagcaaacagaatgaagccagcagccacatccaggatgacatgcacttggtgataagaaagcagctctctagcaccgtattcaagtacaagctcattgggattattggtgctgtgaccatggctggcatcatggcggcagacagaagtgaatcacctagtttgacccaagagagagccaacctgagcgatgagcagtgcacacaggtgacctccttgttgcagttggttcattcctgcagtgagcagtctcctcaggcctctgcactttactatgatgaatttgccaacctgatccaacatgaaaagctggatccaaaagccctggaatgggttgggcataccatctgtaatgatttccaggatgccttcgtagtggactcctgtgttgttccggaaggtgactttccatttcctgtgaaagcactgtacggactggaagaatacgacactcaggatgggattgccataaacctcctgccgctgctgttttctcaggactttgcaaaagatgggggtccggtgacctcacaggaatcaggccaaaaattggtgtctccgctgtgcctggctccgtatttccggttactgagactttgtgtggagagacagcataacggaaacttggaggagattgatggtctactagattgtcctatattcctaactgacctggagcctggagagaagttggagtccatgtctgctaaagagcgttcattcatgtgttctctcatatttcttactctcaactggttccgagagattgtaaatgccttctgccaggaaacatcacctgagatgaaggggaaggtgctcactcggttaaagcacattgtagaattgcaaataatcctggaaaagtacttggcagtcaccccagactatgtccctcctcttggaaactttgatgtggaaactttagatataacacctcatactgttactgctatttcagcaaaaatcagaaagaaaggaaaaatagaaaggaaacaaaaaacagatggcagcaagacatcctcctctgacacactttcagaagagaaaaattcagaatgtgaccctacgccatctcatagaggccagctaaacaaggagttcacagggaaggaagaaaagacatcattgttactacataattcccatgcttttttccgagagctggacattgaggtcttctctattctacattgtggacttgtgacgaagttcatcttagatactgaaatgcacactgaagctacagaagttgtgcaacttgggccccctgagctgcttttcttgctggaagatctctcccagaagctggagagtatgctgacacctcctattgccaggagagtcccctttctcaagaacaaaggaagccggaatattggattctcacatctccaacagagatctgcccaagaaattgttcattgtgtttttcaactgctgaccccaatgtgtaaccacctggagaacattcacaactattttcagtgtttagctgctgagaatcacggtgtagttgatggaccaggagtgaaagttcaggagtaccacataatgtcttcctgctatcagaggctgctgcagatttttcatgggctttttgcttggagtggattttctcaacctgaaaatcagaatttactgtattcagccctccatgtccttagtagccgactgaaacagggagaacacagccagcctttggaggaactactcagccagagcgtccattacttgcagaatttccatcaaagcattcccagtttccagtgtgctctttatctcatcagacttttgatggttattttggagaaatcaacagcttctgctcagaacaaagaaaaaattgcttcccttgccagacaattcctctgtcgggtgtggccaagtggggataaagagaagagcaacatctctaatgaccagctccatgctctgctctgtatctacctggagcacacagagagcattctgaaggccatagaggagattgctggtgttggtgtcccagaactgatcaactctcctaaagatgcatcttcctccacattccctacactgaccaggcatacttttgttgttttcttccgtgtgatgatggctgaactagagaagacggtgaaaaaaattgagcctggcacagcagcagactcgcagcagattcatgaagagaaactcctctactggaacatggctgttcgagacttcagtatcctcatcaacttgataaaggtatttgatagtcatcctgttctgcatgtatgtttgaagtatgggcgtctctttgtggaagcatttctgaagcaatgtatgccgctcctagacttcagttttagaaaacaccgggaagatgttctgagcttactggaaaccttccagttggacacaaggctgcttcatcacctgtgtgggcattccaagattcaccaggacacgagactcacccaacatgtgcctctgctcaaaaagaccctggaacttttagtttgcagagtcaaagctatgctcactctcaacaattgtagagaggctttctggctgggcaatctaaaaaaccgggacttgcagggtgaagagattaagtcccaaaattcccaggagagcacagcagatgagagtgaggatgacatgtcatcccaggcctccaagagcaaagccactgaggatggtgaagaagacgaagtaagtgctggagaaaaggagcaagatagtgatgagagttatgatgactctgattagaccccagataaattgttgcctgcttctgtgtctctgccagcctgtgatcattttgtgttagagtttgaaatccgctgtttgcctttcttactggtaggatccttttttgttcctctttttttttttttttttttttttttaaagacggggactcgctgtgtttcccaggctggagtgcagtgctgcaatcttggctcactgcaacctccatctcctaggttcaagcgattctcctgcctcagcctcctgagtagctgggacgacaggcacatgccaccatgcccagctaatttttgtatttttagtagatacggggttttaccatgtcggccagatggtctcaatctcctgaactcatgatccacctgcctcagcctcccaaagtgctgggattacaggcatgagccaccgctcccagccatattttgttcttaaagtggggtctttattaacttgtggacatcatggattgtctaacaccatcacagtccctggctcaggattctaatgtagcattatttattggtttggataaacccagctgtgctacactgcagagtaaaatctctgagtcatgattctggactttgggagctagttttgaaactctgatttattgtagaacttaggcttgtaccaattttacaaataaattctgttctaagttctgcctc

SEQ ID NO: 2719 - protein, 1451 aa, Homo sapiens; identical to SEQ ID NO: 216

SEQ ID NO: 2720 - DNA, 5305 bp, Homo sapiens
agtggagcaatggtcgtagtctctcgaggccccgctcccctgcggcctaatctctaagtccgggccgcggtcggcgttctcctctggggctccgcgccccgaaccttggcttcctcatctgccctgagatgggataatccccacaggaagtaatttaagtgcacaagacattggtcaaaatggtttccaaaagaagactgtcaaaatctgaggataaagagagcctgacagaagatgcctccaaaaccaggaagcaaccactttccaaaaagacaaagaaatctcatattgctaatgaagttgaagaaaatgacagcatctttgtaaagcttcttaagatatcaggaattattcttaaaacgggagagagtcagaatcaactagctgtggatcaaatagctttccaaaagaagctctttcagaccctgaggagacacccttcctatcccaaaataatagaagaatttgttagtggcctggagtcttacattgaggatgaagacagtttcaggaactgccttttgtcttgtgagcgtctgcaggatgaggaagccagtatgggtgcatcttattctaagagtctcatcaaactgcttctggggattgacatactgcagcctgccattatcaaaaccttatttgagaagttgccagaatatttttttgaaaacaagaacagtgatgaaatcaacatacctcgactcattgtcagtcaactaaaatggcttgacagagttgtggatggcaaggacctcaccaccaagatcatgcagctgatcagtattgctccagagaacctgcagcatgacatcatcaccagcctacctgagatcctaggggattcccagcacgctgatgtggggaaagaactcagtgacctactgatagagaatacttcactcactgtcccaatcctggatgtcctttcaagcctccgacttgacccaaacttcctattgaaggttcgccagttggtgatggataagttgtcgtctattagattggaggatttacctgtgataataaagttcattcttcattccgtaacagccatggatacacttgaggtaatttctgagcttcgggagaagttggatctgcagcattgtgttttgccatcacggttacaggcttcccaagtaaagttgaaaagtaaaggacgagcaagttcctcaggaaatcaagaaagcagcggtcagagctgtattattctcctctttgatgtaataaagtcagctattagatatgagaaaaccatttcagaagcctggattaaggcaattgaaaacactgcctcagtatctgaacacaaggtgtttgacctggtgatgcttttcatcatctatagcaccaatactcagacaaagaagtacattgacagggtgctaagaaataagattcgatcaggctgcattcaagaacagctgctccagagtacattctctgttcattacttagttcttaaggatatgtgttcatccattctgtcgctggctcagagtttgcttcactctctagaccagagtataatttcatttggcagtctcctatacaaatatgcatttaagttttttgacacgtactgccagcaggaagtggttggtgccttagtgacccatatctgcagtgggaatgaagctgaagttgatactgccttagatgtccttctagagttggtagtgttaaacccatctgctatgatgatgaatgctgtctttgtaaagggcattttagattatctggataacatatcccctcagcaaatacgaaaactcttctatgttctcagcacactggcatttagcaaacagaatgaagccagcagccacatccaggatgacatgcacttggtgataagaaagcagctctctagcaccgtattcaagtacaagctcattgggattattggtgctgtgaccatggctggcatcatggcggcagacagaagtgaatcacctagtttgacccaagagagagccaacctgagcgatgagcagtgcacacaggtgacctccttgttgcagttggttcattcctgcagtgagcagtctcctcaggcctctgcactttactatgatgaatttgccaacctgatccaacatgaaaagctggatccaaaagccctggaatgggttgggcataccatctgtaatgatttccaggatgccttcgtagtggactcctgtgttgttccggaaggtgactttccatttcctgtgaaagcactgtacggactggaagaatacgacactcaggatgggattgccataaacctcctgccgctgctgttttctcaggactttgcaaaagatgggggtccggtgacctcacaggaatcaggccaaaaattggtgtctccgctgtgcctggctccgtatttccggttactgagactttgtgtggagagacagcataacggaaacttggaggagattgatggtctactagattgtcctatattcctaactgacctggagcctggagagaagttggagtccatgtctgctaaagagcgttcattcatgtgttctctcatatttcttactctcaactggttccgagagattgtaaatgccttctgccaggaaacatcacctgagatgaaggggaaggtgctcactcggttaaagcacattgtagaattgcaaataatcctggaaaagtacttggcagtcaccccagactatgtccctcctcttggaaactttgatgtggaaactttagatataacacctcatactgttactgctatttcagcaaaaatcagaaagaaaggaaaaatagaaaggaaacaaaaaacagatggcagcaagacatcctcctctgacacactttcagaagagaaaaattcagaatgtgaccctacgccatctcatagaggccagctaaacaaggagttcacagggaaggaagaaaagacatcattgttactacataattcccatgcttttttccgagagctggacattgaggtcttctctattctacattgtggacttgtgacgaagttcatcttagatactgaaatgcacactgaagctacagaagttgtgcaacttgggccccctgagctgcttttcttgctggaagatctctcccagaagctggagagtatgctgacacctcctattgccaggagagtcccctttctcaagaacaaaggaagccggaatattggattctcacatctccaacagagatctgcccaagaaattgttcattgtgtttttcaactgctgaccccaatgtgtaaccacctggagaacattcacaactattttcagtgtttagctgctgagaatcacggtgtagttgatggaccaggagtgaaagttcaggagtaccacataatgtcttcctgctatcagaggctgctgcagatttttcatgggctttttgcttggagtggattttctcaacctgaaaatcagaatttactgtattcagccctccatgtccttagtagccgactgaaacagggagaacacagccagcctttggaggaactactcagccagagcgtccattacttgcagaatttccatcaaagcattcccagtttccagtgtgctctttatctcatcagacttttgatggttattttggagaaatcaacagcttctgctcagaacaaagaaaaaattgcttcccttgccagacaattcctctgtcgggtgtggccaagtggggataaagagaagagcaacatctctaatgaccagctccatgctctgctctgtatctacctggagcacacagagagcattctgaaggccatagaggagattgctggtgttggtgtcccagaactgatcaactctcctaaagatgcatcttcctccacattccctacactgaccaggcatacttttgttgttttcttccgtgtgatgatggctgaactagagaagacggtgaaaaaaattgagcctggcacagcagcagactcgcagcagattcatgaagagaaactcctctactggaacatggctgttcgagacttcagtatcctcatcaacttgataaaggtatttgatagtcatcctgttctgcatgtatgtttgaagtatgggcgtctctttgtggaagcatttctgaagcaatgtatgccgctcctagacttcagttttagaaaacaccgggaagatgttctgagcttactggaaaccttccagttggacacaaggctgcttcatcacctgtgtgggcattccaagattcaccaggacacgagactcacccaacatgtgcctctgctcaaaaagaccctggaacttttagtttgcagagtcaaagctatgctcactctcaacaattgtagagaggctttctggctgggcaatctaaaaaaccgggacttgcagggtgaagagattaagtcccaaaattcccaggagagcacagcagatgagagtgaggatgacatgtcatcccaggcctccaagagcaaagccactgaggtatctctacaaaacccaccagagtctggcactgatggttgcattttgttaattgttctaagttggtggagcagaactttgcctacttatgtttattgtcaaatgcttctatgcccatttccattccctccataacagcttctgtgcttatataatttttgggacccagaagaaacaacgacacaatcttagaatcactcctgagtatctcgagttgtggcatttgttatagagttgacaattttctgcattatagcctctcattttccatgaattcatatctgaaaccattttagaagggagaagtcatcgaagtattttctgagtgttgagaagaatgagttaaaccatttaaacacatttgaaacatacaaaaatagaaatgtgaaagcatttggtgaaagccaaagcacagagtcagaagctgccaccttagagaactgaaataaaaatagaagttcttacgcttttttgtggtacagatgctttcgacaatttaaagaaagctaaataaaaatgtagacatggctggcgcagtggctcatgcttgtaatcctagcactttttgaggccaaggtaggaggattgcttgagtccgggagctcaaggcaaagctgcacaacataacaagaccctatctccacaaaaaaaatgaaaaataaacctgggtgcggtggctcacacctgtaatcccagcactttgggaggccgatgtgggcagatcacaaggtcaggagttcaagaccagcctggccaacatagtgaaaccccatctctactgaaaatacaaaaattagctgggtgtggtggcacgtgcctgttatctcagctacttgggaggctga

SEQ ID NO: 2721 - protein, 1471 aa, Homo sapiens; identical to SEQ ID NO: 218

SEQ ID NO: 2722 - DNA, 5209 bp, Homo sapiens
agtggagcaatggtcgtagtctctcgaggccccgctcccctgcggcctaatctctaagtccgggccgcggtcggcgttctcctctggggctccgcgccccgaaccttggcttcctcatctgccctgagatgggataatccccacaggaagtaatttaagtgcacaagacattggtcaaaatggtttccaaaagaagactgtcaaaatctgaggataaagagagcctgacagaagatgcctccaaaaccaggaagcaaccactttccaaaaagacaaagaaatctcatattgctaatgaagttgaagaaaatgacagcatctttgtaaagcttcttaagatatcaggaattattcttaaaacgggagagagtcagaatcaactagctgtggatcaaatagctttccaaaagaagctctttcagaccctgaggagacacccttcctatcccaaaataatagaagaatttgttagtggcctggagtcttacattgaggatgaagacagtttcaggaactgccttttgtcttgtgagcgtctgcaggatgaggaagccagtatgggtgcatcttattctaagagtctcatcaaactgcttctggggattgacatactgcagcctgccattatcaaaaccttatttgagaagttgccagaatatttttttgaaaacaagaacagtgatgaaatcaacatacctcgactcattgtcagtcaactaaaatggcttgacagagttgtggatggcaaggacctcaccaccaagatcatgcagctgatcagtattgctccagagaacctgcagcatgacatcatcaccagcctacctgagatcctaggggattcccagcacgctgatgtggggaaagaactcagtgacctactgatagagaatacttcactcactgtcccaatcctggatgtcctttcaagcctccgacttgacccaaacttcctattgaaggttcgccagttggtgatggataagttgtcgtctattagattggaggatttacctgtgataataaagttcattcttcattccgtaacagccatggatacacttgaggtaatttctgagcttcgggagaagttggatctgcagcattgtgttttgccatcacggttacaggcttcccaagtaaagttgaaaagtaaaggacgagcaagttcctcaggaaatcaagaaagcagcggtcagagctgtattattctcctctttgatgtaataaagtcagctattagatatgagaaaaccatttcagaagcctggattaaggcaattgaaaacactgcctcagtatctgaacacaaggtgtttgacctggtgatgcttttcatcatctatagcaccaatactcagacaaagaagtacattgacagggtgctaagaaataagattcgatcaggctgcattcaagaacagctgctccagagtacattctctgttcattacttagttcttaaggatatgtgttcatccattctgtcgctggctcagagtttgcttcactctctagaccagagtataatttcatttggcagtctcctatacaaatatgcatttaagttttttgacacgtactgccagcaggaagtggttggtgccttagtgacccatatctgcagtgggaatgaagctgaagttgatactgccttagatgtccttctagagttggtagtgttaaacccatctgctatgatgatgaatgctgtctttgtaaagggcattttagattatctggataacatatcccctcagcaaatacgaaaactcttctatgttctcagcacactggcatttagcaaacagaatgaagccagcagccacatccaggatgacatgcacttggtgataagaaagcagctctctagcaccgtattcaagtacaagctcattgggattattggtgctgtgaccatggctggcatcatggcggcagacagaagtgaatcacctagtttgacccaagagagagccaacctgagcgatgagcagtgcacacaggtgacctccttgttgcagttggttcattcctgcagtgagcagtctcctcaggcctctgcactttactatgatgaatttgccaacctgatccaacatgaaaagctggatccaaaagccctggaatgggttgggcataccatctgtaatgatttccaggatgccttcgtagtggactcctgtgttgttccggaaggtgactttccatttcctgtgaaagcactgtacggactggaagaatacgacactcaggatgggattgccataaacctcctgccgctgctgttttctcaggactttgcaaaagatgggggtccggtgacctcacaggaatcaggccaaaaattggtgtctccgctgtgcctggctccgtatttccggttactgagactttgtgtggagagacagcataacggaaacttggaggagattgatggtctactagattgtcctatattcctaactgacctggagcctggagagaagttggagtccatgtctgctaaagagcgttcattcatgtgttctctcatatttcttactctcaactggttccgagagattgtaaatgccttctgccaggaaacatcacctgagatgaaggggaaggtgctcactcggttaaagcacattgtagaattgcaaataatcctggaaaagtacttggcagtcaccccagactatgtccctcctcttggaaactttgatgtggaaactttagatataacacctcatactgttactgctatttcagcaaaaatcagaaagaaaggaaaaatagaaaggaaacaaaaaacagatggcagcaagacatcctcctctgacacactttcagaagagaaaaattcagaatgtgaccctacgccatctcatagaggccagctaaacaaggagttcacagggaaggaagaaaagacatcattgttactacataattcccatgcttttttccgagagctggacattgaggtcttctctattctacattgtggacttgtgacgaagttcatcttagatactgaaatgcacactgaagctacagaagttgtgcaacttgggccccctgagctgcttttcttgctggaagatctctcccagaagctggagagtatgctgacacctcctattgccaggagagtcccctttctcaagaacaaaggaagccggaatattggattctcacatctccaacagagatctgcccaagaaattgttcattgtgtttttcaactgctgaccccaatgtgtaaccacctggagaacattcacaactattttcagtgtttagctgctgagaatcacggtgtagttgatggaccaggagtgaaagttcaggagtaccacataatgtcttcctgctatcagaggctgctgcagatttttcatgggctttttgcttggagtggattttctcaacctgaaaatcagaatttactgtattcagccctccatgtccttagtagccgactgaaacagggagaacacagccagcctttggaggaactactcagccagagcgtccattacttgcagaatttccatcaaagcattcccagtttccagtgtgctctttatctcatcagacttttgatggttattttggagaaatcaacagcttctgctcagaacaaagaaaaaattgcttcccttgccagacaattcctctgtcgggtgtggccaagtggggataaagagaagagcaacatctctaatgaccagctccatgctctgctctgtatctacctggagcacacagagagcattctgaaggccatagaggagattgctggtgttggtgtcccagaactgatcaactctcctaaagatgcatcttcctccacattccctacactgaccaggcatacttttgttgttttcttccgtgtgatgatggctgaactagagaagacggtgaaaaaaattgagcctggcacagcagcagactcgcagcagattcatgaagagaaactcctctactggaacatggctgttcgagacttcagtatcctcatcaacttgataaaggtatttgatagtcatcctgttctgcatgtatgtttgaagtatgggcgtctctttgtggaagcatttctgaagcaatgtatgccgctcctagacttcagttttagaaaacaccgggaagatgttctgagcttactggaaaccttccagttggacacaaggctgcttcatcacctgtgtgggcattccaagattcaccaggacacgagactcacccaacatgtgcctctgctcaaaaagaccctggaacttttagtttgcagagtcaaagctatgctcactctcaacaattgtagagaggctttctggctgggcaatctaaaaaaccgggacttgcagggtgaagagattaagtcccaaaattcccaggagagcacagcagatgagagtgaggatgacatgtcatcccaggcctccaagagcaaagccactgaggatggtgaagaagacgaagtaagtgctggagaaaaggagcaagatagtgatgagagttatgatgactctgattagaccccagataaattgttgcctgcttctgtgtctctgccagcctgtgatcattttgtgttagagtttgaaatccgctgtttgcctttcttactggtaggatccttttttgttcctctttttttttttttttttttttttttaaagacggggactcgctgtgtttcccaggctggagtgcagtgctgcaatcttggctcactgcaacctccatctcctaggttcaagcgattctcctgcctcagcctcctgagtagctgggacgacaggcacatgccaccatgcccagctaatttttgtatttttagtagatacggggttttaccatgtcggccagatggtctcaatctcctgaactcatgatccacctgcctcagcctcccaaagtgctgggattacaggcatgagccaccgctcccagccatattttgttcttaaagtggggtctttattaacttgtggacatcatggattgtctaacaccatcacagtccctggctcaggattctaatgtagcattatttattggtttggataaacccagctgtgctacactgcagagtaaaatctctgagtcatgattctggactttgggagctagttttgaaactctgatttattgtagaacttaggcttgtaccaattttacaaataaattctgttctaagttctgcctc

SEQ ID NO: 2723 - protein, 1451 aa, Homo sapiens; identical to SEQ ID NO: 216

SEQ ID NO: 2724 - DNA, 427 bp, Homo sapiens
agaccctcgggatctccgtttacagttcaggacctcagctgcactttggcgctaacgccctgtttcccagggctgtgagggaccaaccaaatatgaagctgttgatttctccaaaataaccatcaaaagtctgatgagataaagagcacactggaaactgggaatgctttgatggaaattctgcaagtaatggacgctctggcttgccttggtgactgtcaaataaaagcaagtatatactcagttctctccacacttcccacatacttaccaagcaaaaagcccatgaaaaatctgcagcagcctctgatagcaggaagacattatgtggtactcctgaactttcactcctggtccatcaactacaccgtgattctcagcagctaaacactaaaaataaaaatgattttaggacagttgcttcagt

SEQ ID NO: 2725 - protein, 71 aa, Homo sapiens
MEILQVMDALACLGDCQIKASIYSVLSTLPTYLPSKKPMKNLQQPLIAGRHYVVLLNFHSWSINYTVILSS

SEQ ID NO: 2726 - DNA, 1025 bp, Homo sapiens
cccggatggtgggactgggcccaggttcccaccgcatcgtccgcctcagccagaaccttctggtccccgcccccggatagggacccaggaggcccaagccccttcttccggcggggagtgggagcctctcgcactctcggcagctccagaccctcgggatctccgtttacagttcaggacctcagctgcactttggcgctaacgccctgtttcccaggactgtcaatggcaggataccagctctggtcaccatggaccccactggatgagagtttccaatggctgcggcacacgacacctacaccttcctccaagcacccattcaaggcctccccctgcttcccacacacaccgtccgaccttgaagtgcagctgtgctttcaagaggtcactctagtcctagacagcccattcctggaatctggagtgagtcccaagttaccctgccacacatcagagttgcgcacgatgaacaacaaaggactggtcaggaagccccagcccatccgcctcagtggagtagattctgtctttggcagggttatcacagctcagccaccaaagtggaccgggactttcagagtttcagacaagtcagccttttgcaaaatcattagcagggagcaccagtggcccattggactgaaggagcctcagattcagatgacagtcactatgtgcaaacagatgctgcgctctatcctcttgctgtatgcaacttacaaaaagtgcacctttgccttgcagcactccaagtaaagggtcctcatttgatccccatttactcacaccatgccctttgtgccttggtgactgtcaaataaaagcaagtatatactcagttctctccacacttcccacatacttaccaagcaaaaagcccatgaaaaatctgcagcagcctctgatagcaggaagacattatgtggtactcctgaactttcactcctggtccatcaactacaccgtgattctcagcagctaaacactaaaaataaaaatgattttaggacagttgcttcagt

SEQ ID NO: 2727 - protein, 90 aa, Homo sapiens
MQLTKSAPLPCSTPSKGSSFDPHLLTPCPLCLGDCQIKASIYSVLSTLPTYLPSKKPMKNLQQPLIAGRHYVVLLNFHSWSINYTVILSS

SEQ ID NO: 2728 - DNA, 1103 bp, Homo sapiens
tttgatagtcatcctgttctgcatgtatgtttgaaggaagatgttctgagcttactggaaaccttccagttggacacaaggctgcttcatcacctgtgtgggcattccaagattcaccaggacacgagactcacccaacatgtgcctctgctcaaaaagaccctggaacttttagtttgcagagtcaaagctatgctcactctcaacaattgtagagaggctttctggctgggcaatctaaaaaaccgggacttgcagggtgaagagattaagtcccaaaattcccaggagagcacagcagatgagagtgaggatgacatgtcatcccaggcctccaagagcaaagccactgaggatggtgaagaagacgaagtaagtgctggagaaaaggagcaagatagtgatgagagttatgatgactctgattagaccccagataaattgttgcctgcttctgtgtctctgccagcctgtgatcattttgtgttagagtttgaaatccgctgtttgcctttcttactggtaggatccttttttgttcctctttttttttttttttttttttttttaaagacggggactcgctgtgtttcccaggctggagtgcagtgctgcaatcttggctcactgcaacctccatctcctaggttcaagcgattctcctgcctcagcctcctgagtagctgggacgacaggcacatgccaccatgcccagctaatttttgtatttttagtagatacggggttttaccatgtcggccagatggtctcaatctcctgaactcatgatccacctgcctcagcctcccaaagtgctgggattacaggcatgagccaccgctcccagccatattttgttcttaaagtggggtctttattaacttgtggacatcatggattgtctaacaccatcacagtccctggctcaggattctaatgtagcattatttattggtttggataaacccagctgtgctacactgcagagtaaaatctctgagtcatgattctggactttgggagctagttttgaaactctgatttattgtagaacttaggcttgtaccaattttacaaataaattctgttctaagttctgcctc

SEQ ID NO: 2729 - protein, 78 aa, Homo sapiens
MLTLNNCREAFWLGNLKNRDLQGEEIKSQNSQESTADESEDDMSSQASKSKATEDGEEDEVSAGEKEQDSDESYDDSD

SEQ ID NO: 2730 - DNA, 380 bp, Homo sapiens
ggataccagctctggtcaccatggaccccactggatgagagtttccaatggctgcggcacacgacacctacaccttcctccaagcacccattcaaggcctccccctgcttcccacacacaccgtccgaccttgaagtgcagctgtgctttcaagaggtcactctagtcctagacagcccattcctggaatctggaagatggagtttcaccacattgcccaagctggtcttgaactcctggactcaagcaatgccttggcctcggcctcccaaagtgttgggattacagcggtgacccacaatatctggcctttgtagcgttcttgtaactaggttaggtataactcagaaaatggaaataaacattacatatacaaagtt

SEQ ID NO: 2731 - protein, 43 aa, Homo sapiens
MRVSNGCGTRHLHLPPSTHSRPPPASHTHRPTLKCSCAFKRSL

SEQ ID NO: 2732 - DNA, 1057 bp, Homo sapiens
gtgggactgggcccaggttcccaccgcatcgtccgcctcagccagaaccttctggtccccgcccccggatagggacccaggaggcccaagccccttcttccggcggggagtgggagcctctcgcactctcggcagctccagaccctcgggatctccgtttacagttcaggacctcagctgcactttggcgctaacgccctgtttcccaggactgtcaatggcaggataccagctctggtcaccatggaccccactggatgagagtttccaatggctgcggcacacgacacctacaccttcctccaagcacccattcaaggcctccccctgcttcccacacacaccgtccgaccttgaagtgcagctgtgctttcaagaggtcactctagtcctagacagcccattcctggaatctggagtgagtcccaagttaccctgccacacatcagagttgcgcacgatgaacaacaaaggactggtcaggaagccccagcccatccgcctcagtggagtagattctgtctttggcagggttatcacagctcagccaccaaagtggaccgggactttcagagtttcagacaagtcagccttttgcaaaatcattagcagggagcaccagtggcccattggactgaaggagcctcagattcagatgacagtcactatgtgcaaacagatgctgcgctctatcctcttgctgtatgcaacttacaaaaagtgcacctttgccttgcagcactccaagtaaagggtcctcatttgatccccatttactcacaccatgccctttggtatgtacctaaagcttacagaaacctgtccatgtaaatgaaactgtgacattgtcccagccatcttgcttttgtttcaagcagtgatgattcaggagcccctttcatcccttcccctccaaaaaaggaccaatgatagagaacaaggaagaacattcccattgtaaggttgaaccatttagagtcaaactagcattgacatgtccatgtgataaccgttaaacaaatgatataaaccaatgagcctagtgtgaactcacata

SEQ ID NO: 2733 - protein, 177 aa, Homo sapiens; identical to SEQ ID NO: 220

SEQ ID NO: 2734 - DNA, 961 bp, Homo sapiens
ccgagaattcgtgggtgctcaagaggatgggtgtggcctggcagcgcaggcgcactagaggcctgtagggtcggggcgcctgcgcagtcgctcttcctcaggcggcggccatggcgggacaggaggatccggtgcagcgggagattcaccaggactgggctaaccgggagtacattgagataatcaccagcagcatcaagaaaatcgcagactttctcaactcgttcgatatgtcttgtcgttcaagacttgcaacactaaacgagaaattgacagcccttgaacggagaatagagtacattgaagctcgggtgacaaaaggtgagacactcacctagaacagtgccgtgctgctgctgggaagttgctttacacaacacaggccacatgggaaaggccccagcagccttcagctccttcctttctccttaaagagcaacagggcttattcttgtttttcttttttcaaaagtgtggcctttgggctctgccatctggggtgtggtgtggtatgtgggaagaagttcagaggaaccgttggaaacgacgttaggcattttaccttttcagtaacattttatacatctacttgtcaatgtatttgagacattcacagccaaaagcctgggactctttgtgaaggtcctcctcacctctatctttctttctctctctctcaaactttccttaaagttctcattgcctttgcactgcttctgtgaacagtctttgtctcctccccacctttggtgggaagtgcggggcagtcctggtcaagacactcatgccctggcaatgtggctgccagagaatgttgttgctaacccaccagtttcttgttgatttggagaggtcaaggccaggcccccacttggcttgaagggacattttcagacttttctttctgtcacttggagtgtctatgcctctcatatttccctaataaactcctcaacttttt

SEQ ID NO: 2735 - protein, 75 aa, Homo sapiens; identical to SEQ ID NO: 222

SEQ ID NO: 2736 - DNA, 1235 bp, Homo sapiens
ccgagaattcgtgggtgctcaagaggatgggtgtggcctggcagcgcaggcgcactagaggcctgtagggtcggggcgcctgcgcagtcgctcttcctcaggcggcggccatggcgggacaggaggatccggtgcagcgggagattcaccaggactgggctaaccgggagtacattgagataatcaccagcagcatcaagaaaatcgcagactttctcaactcgttcgatatgtcttgtcgttcaagacttgcaacactaaacgagaaattgacagcccttgaacggagaatagagtacattgaagctcgggtgacaaaaggtgagacactcacctagaacagtgccgtgctgctgctgggaagttgctttacacaacacaggccacatgggaaaggccccagcagccttcagctccttcctttctccttaaagagcaacagggcttattcttgtttttcttttttcaaaagtgtggcctttgggctctgccatctggggtgtggtgtggtatgtgggaagaagttcagaggaaccgttggaaacgacgttaggcattttaccttttcagtaacattttatacatctacttgtcaatgtatttgagacattcacagccaaaagcctgggactctttgtgaaggtcctcctcacctctatctttctttctctctctctcaaactttccttaaagttctcattgcctttgcactgcttctgtgaacagtctttgtctcctccccacctttggtgggaagtgcggggcagtcctggtcaagacactcatgccctggcaatgtggctgccagagaatgttgttgctaacccaccagtttcttgttgatttggagaggtcaaggccaggcccccacttggcttgaagggacattttcagacttttctttctgtcacttggagtgtctatgcctctcatatttccctaataaactcctcaactttttatctgactgctgtgattatggtggggagaggagctagagatgggttcacttattgcacagaaatgtaatacatggcgttattattctaacataaaactttcagatgtagctgtttgattcaaagcctaggtggcttaccagcccaagtccccatgtttggactttcagctgactagctcatcttgggaatcatttggtcattcagcacatttaccaagtatttactatgtaggcatgttaaactccaataaaacatacagcattgaatcagaca

SEQ ID NO: 2737 - protein, 75 aa, Homo sapiens; identical to SEQ ID NO: 222

SEQ ID NO: 2738 - DNA, 950 bp, Homo sapiens
cgcctgcgcagtcgctcttcctcaggcggcggccatggcgggacaggaggatccggtgcagcgggagattcaccaggactgggctaaccgggagtacattgagataatcaccagcagcatcaagaaaatcgcagactttctcaactcgttcgcctactcagcaggaagacaatgaggatgaagacctttatgatgatccactgccatttaatgaataatatgtcttgtcgttcaagacttgcaacactaaacgagaaattgacagcccttgaacggagaatagagtacattgaagctcgggtgacaaaaggtgagacactcacctagaacagtgccgtgctgctgctgggaagttgctttacacaacacaggccacatgggaaaggccccagcagccttcagctccttcctttctccttaaagagcaacagggcttattcttgtttttcttttttcaaaagtgtggcctttgggctctgccatctggggtgtggtgtggtatgtgggaagaagttcagaggaaccgttggaaacgacgttaggcattttaccttttcagtaacattttatacatctacttgtcaatgtatttgagacattcacagccaaaagcctgggactctttgtgaaggtcctcctcacctctatctttctttctctctctctcaaactttccttaaagttctcattgcctttgcactgcttctgtgaacagtctttgtctcctccccacctttggtgggaagtgcggggcagtcctggtcaagacactcatgccctggcaatgtggctgccagagaatgttgttgctaacccaccagtttcttgttgatttggagaggtcaaggccaggcccccacttggcttgaagggacattttcagacttttctttctgtcacttggagtgtctatgcctctcatatttccctaataaactcctcaacttttt

SEQ ID NO: 2739 - protein, 51 aa, Homo sapiens
MRMKTFMMIHCHLMNNMSCRSRLATLNEKLTALERRIEYIEARVTKGETLT

SEQ ID NO: 2740 - DNA, 1224 bp, Homo sapiens
cgcctgcgcagtcgctcttcctcaggcggcggccatggcgggacaggaggatccggtgcagcgggagattcaccaggactgggctaaccgggagtacattgagataatcaccagcagcatcaagaaaatcgcagactttctcaactcgttcgcctactcagcaggaagacaatgaggatgaagacctttatgatgatccactgccatttaatgaataatatgtcttgtcgttcaagacttgcaacactaaacgagaaattgacagcccttgaacggagaatagagtacattgaagctcgggtgacaaaaggtgagacactcacctagaacagtgccgtgctgctgctgggaagttgctttacacaacacaggccacatgggaaaggccccagcagccttcagctccttcctttctccttaaagagcaacagggcttattcttgtttttcttttttcaaaagtgtggcctttgggctctgccatctggggtgtggtgtggtatgtgggaagaagttcagaggaaccgttggaaacgacgttaggcattttaccttttcagtaacattttatacatctacttgtcaatgtatttgagacattcacagccaaaagcctgggactctttgtgaaggtcctcctcacctctatctttctttctctctctctcaaactttccttaaagttctcattgcctttgcactgcttctgtgaacagtctttgtctcctccccacctttggtgggaagtgcggggcagtcctggtcaagacactcatgccctggcaatgtggctgccagagaatgttgttgctaacccaccagtttcttgttgatttggagaggtcaaggccaggcccccacttggcttgaagggacattttcagacttttctttctgtcacttggagtgtctatgcctctcatatttccctaataaactcctcaactttttatctgactgctgtgattatggtggggagaggagctagagatgggttcacttattgcacagaaatgtaatacatggcgttattattctaacataaaactttcagatgtagctgtttgattcaaagcctaggtggcttaccagcccaagtccccatgtttggactttcagctgactagctcatcttgggaatcatttggtcattcagcacatttaccaagtatttactatgtaggcatgttaaactccaataaaacatacagcattgaatcagaca

SEQ ID NO: 2741 - protein, 51 aa, Homo sapiens; identical to SEQ ID NO: 2739

SEQ ID NO: 2742 - DNA, 749 bp, Homo sapiens
gcagtcgctcttcctcaggcggcggccatggcgggacaggaggatccggtgcagcgggagattcaccaggactgggctaaccgggagtacattgagataatcaccagcagcatcaagaaaatcgcagactttctcaactcgttcgatatgtcttgtcgttcaagacttgcaacactaaacgagaaattgacagcccttcagctccttcctttctccttaaagagcaacagggcttattcttgtttttcttttttcaaaagtgtggcctttgggctctgccatctggggtgtggtgtggtatgtgggaagaagttcagaggaaccgttggaaacgacgttaggcattttaccttttcagtaacattttatacatctacttgtcaatgtatttgagacattcacagccaaaagcctgggactctttgtgaaggtcctcctcacctctatctttctttctctctctctcaaactttccttaaagttctcattgcctttgcactgcttctgtgaacagtctttgtctcctccccacctttggtgggaagtgcggggcagtcctggtcaagacactcatgccctggcaatgtggctgccagagaatgttgttgctaacccaccagtttcttgttgatttggagaggtcaaggccaggcccccacttggcttgaagggacattttcagacttttctttctgtcacttggagtgtctatgcctctcatatttccctaataaactcctcaacttttt

SEQ ID NO: 2743 - protein, 121 aa, Homo sapiens
MAGQEDPVQREIHQDWANREYIEIITSSIKKIADFLNSFDMSCRSRLATLNEKLTALQLLPFSLKSNRAYSCFSFFKSVAFGLCHLGCGVVCGKKFRGTVGNDVRHFTFSVTFYTSTCQCI

SEQ ID NO: 2744 - DNA, 1023 bp, Homo sapiens
gcagtcgctcttcctcaggcggcggccatggcgggacaggaggatccggtgcagcgggagattcaccaggactgggctaaccgggagtacattgagataatcaccagcagcatcaagaaaatcgcagactttctcaactcgttcgatatgtcttgtcgttcaagacttgcaacactaaacgagaaattgacagcccttcagctccttcctttctccttaaagagcaacagggcttattcttgtttttcttttttcaaaagtgtggcctttgggctctgccatctggggtgtggtgtggtatgtgggaagaagttcagaggaaccgttggaaacgacgttaggcattttaccttttcagtaacattttatacatctacttgtcaatgtatttgagacattcacagccaaaagcctgggactctttgtgaaggtcctcctcacctctatctttctttctctctctctcaaactttccttaaagttctcattgcctttgcactgcttctgtgaacagtctttgtctcctccccacctttggtgggaagtgcggggcagtcctggtcaagacactcatgccctggcaatgtggctgccagagaatgttgttgctaacccaccagtttcttgttgatttggagaggtcaaggccaggcccccacttggcttgaagggacattttcagacttttctttctgtcacttggagtgtctatgcctctcatatttccctaataaactcctcaactttttatctgactgctgtgattatggtggggagaggagctagagatgggttcacttattgcacagaaatgtaatacatggcgttattattctaacataaaactttcagatgtagctgtttgattcaaagcctaggtggcttaccagcccaagtccccatgtttggactttcagctgactagctcatcttgggaatcatttggtcattcagcacatttaccaagtatttactatgtaggcatgttaaactccaataaaacatacagcattgaatcagaca

SEQ ID NO: 2745 - protein, 121 aa, Homo sapiens; identical to SEQ ID NO: 2743

SEQ ID NO: 2746 - DNA, 561 bp, Homo sapiens
ggtgacaaaaggtgagacactcacctagaacagtgccgtgctgctgctgggaagttgctttacacaacacaggccacatgggaaaggccccagcagccttcagctccttcctttctccttaaagagcaacagggcttattcttgtttttcttttttcaaaagtgtggcctttgggctctgccatctggggtgtggtgtggtatgtgggaagaagttcagaggaaccgttggaaacgacgttaggcattttaccttttcagtaacattttatacatctacttgtcaatgtatttgagacattcacagccaaaagcctgggactctttgtgaaggtcctcctcacctctatctttctttctctctctctcaaactttccttaaagttctcattgcctttgcactgcttctgtgaacagtctttgtctcccaccagtttcttgttgatttggagaggtcaaggccaggcccccacttggcttgaagggacattttcagacttttctttctgtcacttggagtgtctatgcctctcatatttccctaataaactcctcaactttt

SEQ ID NO: 2747 - protein, 98 aa, Homo sapiens
HFIHLLVNVFETFTAKSLGLFVKVLLTSIFLSLSLKLSLKFSLPLHCFCEQSLSPTSFLLIWRGQGQAPTWLEGTFSDFSFCHLECLCLSYFPNKLLN

SEQ ID NO: 2748 - DNA, 3394 bp, Homo sapiens
gagatgcgccaccctcgaaccttgttacgacgtcggcacattgcgcgtctgacatgaagaaaaaaaaaattcagttagtccaccaggcacagtggctaaggcctgtaatccctgcactttgagaggccaaggcaggaggatcacttgaacccaggagttcgagaccagcctaggcaacatagcgagactccgtttcaaacaacaaataaaaataattagtcgggcatggtggtgcgcgcctacagtaccaactactcgggaggctgaggcgagacgatcgcttgagccagggaggtcaaggctgcagtgagccaagctcgcgccactgcactccagcccgggcgacagagtgagaccctgtctcaaaaaaaaaaaaaacaccaaaccttagaggggcgaaaaaaaattttatagtggaaatacagtaacgagttggcctagcctcgcctccgttacaacggcctacggtgctggaggatccttctgcgcacgcgcacagcctccggccggctatttccgcgagcgcgttccatcctctaccgagcgcgcgcgaagactacggaggtcgactcgggagcgcgcacgcagctccgccccgcgtccgacccgcggatcccgcggcgtccggcccgggtggtctggatcgcggagggaatgccccggagggcggagaactgggacgaggccgaggtaggcgcggaggaggcaggcgtcgaagagtacggccctgaagaagacggcggggaggagtcgggcgccgaggagtccggcccggaagagtccggcccggaggaactgggcgccgaggaggagatggaggccgggcggccgcggcccgtgctgcgctcggtgaactcgcgcgagccctcccaggtcatcttctgcaatcgcagtccgcgcgtcgtgctgcccgtatggctcaacttcgacggcgagccgcagccctacccaacgctgccgcctggcacgggccgccgcatccacagctaccgaggtcacctttggctcttcagagatgcagggacacacgatgggcttctggttaaccaaactgaattatttgtgccatctctcaatgttgacggacagcctatttttgccaatatcacactgccagtgtatactctgaaagagcgatgcctccaggttgtccggagcctagtcaagcctgagaattacaggagactggacatcgtcaggtcgctctacgaagatctggaagaccacccaaatgtgcagaaagacctggagcggctgacacaggagcgcattgcacatcaacggatgggagattgaagatttctgttgaaacttacactgtttcatctcagcttttgatggtactgatgagtcttgatctagatacaggactggttccttccttagtttcaaagtgtctcattctcagagtaaaataggcaccattgcttaaaagaaagttaactgacttcactaggcattgtgatgtttaggggcaaacatcacaaaatgtaatttaatgcctgcccattagagaagtatttatcaggagaaggtggtggcatttttgcttcctagtaagtcaggacagcttgtatgtaaggaggtttgtataagtaattcagtgggaattgcagcatatcgtttaattttaagaaggcattggcatctgcttttaatggatgtataatacatccattctacatccgtagcggttggtgacttgtctgcctcctgctttgggaagactgaggcatccgtgaggcagggacaagtctttctcctctttgagaccccagtgcctgcacatcatgagccttcagtcagggtttgtcagaggaacaaaccaggggacactttgttagaaagtgcttagaggttctgcctctatttttgttggggggtgggagaggggaccttaaaatgtgtacagtgaacaaatgtcttaaagggaatcatttttgtaggaagcattttttataattttctaagtcgtgcactttctcggtccactcttgttgaagtgctgttttattactgtttctaaactaggattgacattctacagttgtgataatagcatttttgtaacttgccatccgcacagaaaatacgagaaaatctgcatgtttgattatagtattaatggacaaataagtttttgctaaatgtgagtatttctgttcctttttgtaaatatgtgacattcctgattgatttgggtttttttgttgttgttgttttgttttgttttgtttttttgagatggagtctcactcttgtcacccaggctggagtgcagtggcgccatctcggctcactgcaacctctgcctcctgggttcacgtaatcctcctgagtagctgggattacaggcgcctgccaccacgctggccaatttttgtacttttagtagagacagtgtttcgtcatgttggccaggctggtttcaaactcctgacctcaggtgatccgcccacctcagcctcccaaaatggtgggattacaggtgtgtgggccaccgtgcctggctgattcagcattttttatcaggcaggaccaggtggcacttccacctccagcctctggtcctaccaatggattcatggagtagcctggactgtttcatagttttctaaatgtacaaattcttataggctagacttagattcattaactcaaattcaatgcttctatcagactcagttttttgtaactaatagatttttttttccacttttgttctactccttccctaatagctttttaaaaaaatctccccagtagagaaacatttggaaaagacagaaaactaaaaaggaagaaaaaagatccctattagatacacttcttaaatacaatcacattaacattttgagctatttccttccagcctttttagggcagattttggttggtttttacatagttgagattgtactgttcatacagttttataccctttttcatttaactttataacttaaatattgctctatgttagtataagcttttcacaaacattagtatagtctcccttttataattaatgtttgtgggtatttcttggcatgcatctttaattccttatcctagcctttgggcacaattcctgtgctcaaaaatgagagtgacggctggcatggtggctcccgcctgtaatcccagtactttggaaagccaaggtaagaggattgcttgagcccagaacttcaagatgagcctgggctcatagtgagaacccatctatacaaaaaatttttaaaaattagcatggcggcacacatctgtaatcctagctacttggcaggctgaggtgagaagatcattggagtttaggaattggaggctgcagtgagccatgagtatgccactgcactccagcctgggggacagagcaagaccctgcctcaaa

SEQ ID NO: 2749 - protein, 213 aa, Homo sapiens; identical to SEQ ID NO: 224

SEQ ID NO: 2750 - DNA, 3271 bp, Homo sapiens
gagatgcgccaccctcgaaccttgttacgacgtcggcacattgcgcgtctgacatgaagaaaaaaaaaattcagttagtccaccaggcacagtggctaaggcctgtaatccctgcactttgagaggccaaggcaggaggatcacttgaacccaggagttcgagaccagcctaggcaacatagcgagactccgtttcaaacaacaaataaaaataattagtcgggcatggtggtgcgcgcctacagtaccaactactcgggaggctgaggcgagacgatcgcttgagccagggaggtcaaggctgcagtgagccaagctcgcgccactgcactccagcccgggcgacagagtgagaccctgtctcaaaaaaaaaaaaaacaccaaaccttagaggggcgaaaaaaaattttatagtggaaatacagtaacgagttggcctagcctcgcctccgttacaacggcctacggtgctggaggatccttctgcgcacgcgcacagcctccggccggctatttccgcgagcgcgttccatcctctaccgagcgcgcgcgaagactacggaggtcgactcgggagcgcgcacgcagctccgccccgcgtccgacccgcggatcccgcggcgtccggcccgggtggtctggatcgcggagggaatgccccggagggcggagaactgggacgaggccgaggtaggcgcggaggaggcaggcgtcgaagagtacggccctgaagaagacggcggggaggagtcgggcgccgaggagtccggcccggaagagtccggcccggaggaactgggcgccgaggaggagatggaggccgggcggccgcggcccgtgctgcgctcggtgaactcgcgcgagccctcccaggtcatcttctgcaatcgcagtccgcgcgtcgtgctgcccgtatggctcaacttcgacggcgagccgcagccctacccaacgctgccgcctggcacgggccgccgcatccacagctaccgagtgtatactctgaaagagcgatgcctccaggttgtccggagcctagtcaagcctgagaattacaggagactggacatcgtcaggtcgctctacgaagatctggaagaccacccaaatgtgcagaaagacctggagcggctgacacaggagcgcattgcacatcaacggatgggagattgaagatttctgttgaaacttacactgtttcatctcagcttttgatggtactgatgagtcttgatctagatacaggactggttccttccttagtttcaaagtgtctcattctcagagtaaaataggcaccattgcttaaaagaaagttaactgacttcactaggcattgtgatgtttaggggcaaacatcacaaaatgtaatttaatgcctgcccattagagaagtatttatcaggagaaggtggtggcatttttgcttcctagtaagtcaggacagcttgtatgtaaggaggtttgtataagtaattcagtgggaattgcagcatatcgtttaattttaagaaggcattggcatctgcttttaatggatgtataatacatccattctacatccgtagcggttggtgacttgtctgcctcctgctttgggaagactgaggcatccgtgaggcagggacaagtctttctcctctttgagaccccagtgcctgcacatcatgagccttcagtcagggtttgtcagaggaacaaaccaggggacactttgttagaaagtgcttagaggttctgcctctatttttgttggggggtgggagaggggaccttaaaatgtgtacagtgaacaaatgtcttaaagggaatcatttttgtaggaagcattttttataattttctaagtcgtgcactttctcggtccactcttgttgaagtgctgttttattactgtttctaaactaggattgacattctacagttgtgataatagcatttttgtaacttgccatccgcacagaaaatacgagaaaatctgcatgtttgattatagtattaatggacaaataagtttttgctaaatgtgagtatttctgttcctttttgtaaatatgtgacattcctgattgatttgggtttttttgttgttgttgttttgttttgttttgtttttttgagatggagtctcactcttgtcacccaggctggagtgcagtggcgccatctcggctcactgcaacctctgcctcctgggttcacgtaatcctcctgagtagctgggattacaggcgcctgccaccacgctggccaatttttgtacttttagtagagacagtgtttcgtcatgttggccaggctggtttcaaactcctgacctcaggtgatccgcccacctcagcctcccaaaatggtgggattacaggtgtgtgggccaccgtgcctggctgattcagcattttttatcaggcaggaccaggtggcacttccacctccagcctctggtcctaccaatggattcatggagtagcctggactgtttcatagttttctaaatgtacaaattcttataggctagacttagattcattaactcaaattcaatgcttctatcagactcagttttttgtaactaatagatttttttttccacttttgttctactccttccctaatagctttttaaaaaaatctccccagtagagaaacatttggaaaagacagaaaactaaaaaggaagaaaaaagatccctattagatacacttcttaaatacaatcacattaacattttgagctatttccttccagcctttttagggcagattttggttggtttttacatagttgagattgtactgttcatacagttttataccctttttcatttaactttataacttaaatattgctctatgttagtataagcttttcacaaacattagtatagtctcccttttataattaatgtttgtgggtatttcttggcatgcatctttaattccttatcctagcctttgggcacaattcctgtgctcaaaaatgagagtgacggctggcatggtggctcccgcctgtaatcccagtactttggaaagccaaggtaagaggattgcttgagcccagaacttcaagatgagcctgggctcatagtgagaacccatctatacaaaaaatttttaaaaattagcatggcggcacacatctgtaatcctagctacttggcaggctgaggtgagaagatcattggagtttaggaattggaggctgcagtgagccatgagtatgccactgcactccagcctgggggacagagcaagaccctgcctcaaa

SEQ ID NO: 2751 - protein, 172 aa, Homo sapiens; identical to SEQ ID NO: 226

SEQ ID NO: 2752 - DNA, 1479 bp, Homo sapiens
cgcggatcccgcggcgtccggcccgggtggtctggatcgcggagggaatgccccggagggcggagaactgggacgaggccgaggtaggcgcggaggaggcaggcgtcgaagagtacggccctgaagaagacggcggggaggagtcgggcgccgaggagtccggcccggaagagtccggcccggaggaactgggcgccgaggaggagatggaggccgggcggccgcggcccgtgctgcgctcggtgaactcgcgcgagccctcccaggtcatcttctgcaatcgcagtccgcgcgtcgtgctgcccgtatggctcaacttcgacggcgagccgcagccctacccaacgctgccgcctggcacgggccgccgcatccacagctaccgagtcctcatgactccagtgggccagttctgcgtagtccctgccctcgtggagaacacattcctcctggggagactgacagatgcaaagacaggaacaagccagggtcatgttggcgccggaagagccgaccgtgtgtggcgtgggaaattgacttacctgcctgctgggagatggaggggttgcggttgtgtgtgggccaccgtgcctggctgattcagcattttttatcaggcaggaccaggtggcacttccacctccagcctctggtcctaccaatggattcatggagtagcctggactgtttcatagttttctaaatgtacaaattcttataggctagacttagattcattaactcaaattcaatgcttctatcagactcagttttttgtaactaatagatttttttttccacttttgttctactccttccctaatagctttttaaaaaaatctccccagtagagaaacatttggaaaagacagaaaactaaaaaggaagaaaaaagatccctattagatacacttcttaaatacaatcacattaacattttgagctatttccttccagcctttttagggcagattttggttggtttttacatagttgagattgtactgttcatacagttttataccctttttcatttaactttataacttaaatattgctctatgttagtataagcttttcacaaacattagtatagtctcccttttataattaatgtttgtgggtatttcttggcatgcatctttaattccttatcctagcctttgggcacaattcctgtgctcaaaaatgagagtgacggctggcatggtggctcccgcctgtaatcccagtactttggaaagccaaggtaagaggattgcttgagcccagaacttcaagatgagcctgggctcatagtgagaacccatctatacaaaaaatttttaaaaattagcatggcggcacacatctgtaatcctagctacttggcaggctgaggtgagaagatcattggagtttaggaattggaggctgcagtgagccatgagtatgccactgcactccagcctgggggacagagcaagaccctgcctcaaa

SEQ ID NO: 2753 - protein, 183 aa, Homo sapiens
MPRRAENWDEAEVGAEEAGVEEYGPEEDGGEESGAEESGPEESGPEELGAEEEMEAGRPRPVLRSVNSREPSQVIFCNRSPRVVLPVWLNFDGEPQPYPTLPPGTGRRIHSYRVLMTPVGQFCVVPALVENTFLLGRLTDAKTGTSQGHVGAGRADRVWRGKLTYLPAGRWRGCGCVWATVPG

SEQ ID NO: 2754 - DNA, 441 bp, Homo sapiens
agtgcaaaaacatgtcgagagaaaactcatcaaaccctaagatctgtgcattttactgtatgtaaattataccagaattttcttttctttttcttttttttttttttgagatgcagtcttgctctgtcggcttacgagcagcgtcaccctggatgtgtcctgcctcaaggggcctcagttccccgtctgcaaaatggaccccggggcggtagaggggcttcagaccgtgctatcgtccctgctgggtcgggcctaagcgccgggcccgtacctcggtagctgtggatgcggcggcccgtgccaggcggcagcgttgggtagggctgcggctcgccgtcgaagttgagccatacgggcagcacgacgcgcggactgcgattgcagaagatgacctgggagggctcgcgcgagttcaccgagcgcagcacgggccgcggccgc

SEQ ID NO: 2755 - protein, 33 aa, Homo sapiens
MQSCSVGLRAASPWMCPASRGLSSPSAKWTPGR

SEQ ID NO: 2756 - DNA, 221 bp, Homo sapiens
caatcgcagtccgcgcgtcgtgctgcccgtatggctcaacttcgacggcgagccgcagccctacccaacgctgccgcctggcacgggccgccgcatccacagctaccgagagtctcactgtgtcacccaggctggagtgcagtggcgtgtgatcttggctcactgcaacctctgcctctcgggttcaagcgattctcctgcttcagcagctgggactacag

SEQ ID NO: 2757 - protein, 62 aa, Homo sapiens
MAQLRRRAAALPNAAAWHGPPHPQLPRVSLCHPGWSAVACDLGSLQPLPLGFKRFSCFSSWD

SEQ ID NO: 2758 - DNA, 728 bp, Homo sapiens
ggtcaggagtttgaaaccagcctggccaacatgacgaaacactgtctctactaaaagtacaaaaattggccagcgtggtggcaggcgcctgtaatcccagctactcaggaggattacgtgaacccaggaggcagaggttgcagtgagccgagatggcgccactgcactccagcctgggtgacaagagtgagactccatctcaaaaaaacaaaacaaaacaaaacaacaacaacaaaaaaacccaaatcaatcaggaatgtcacatatttacaaaaaggaacagaaatactcacatttagcaaaaacttatttgtccattaatactataatcaaacatgcagattttctcgtattttctgtgcggatggcaagttacaaaaatgctattatcacaactgtagaatgtcaatccatcaaaagctgagatgaaacagtgtaagtttcaacagaaatcttcaatctcccatccgttgatgtgcaatgcgctcctgtgtcagccgctccaggtctttctgcacatttgggtggtcttccagatcttcgtagagcgacctgacgatgtccagtctcctgtaattctcaggcttgactaggctccggacaacctggaggcatcgctctttcagagtatacactggaagggcaaaaaccaaatcctcagtggcagactagggtctcagtacaaggaacgaacaagaggctttgccaacaactacctgtactactga

SEQ ID NO: 2759 - protein, 55 aa, Homo sapiens [sequence omitted]

SEQ ID NO: 2760 - DNA, 1015 bp, Homo sapiens
cgtagcggttggtgacttgtctgcctcctgctttgggaagactgaggcatccgtgaggcagggacaagtctttctcctctttgagaccccagtgcctgcacatcatgagccttcagtcagggtttgtcagaggaacaaaccaggggacactttgttagaaagtgcttagaggttctgcctctatttttgttggggggtgggagaggggaccttaaaatgtgtacagtgaacaaatgtcttaaagggaatcatttttgtaggaagcattttttataattttctaagtcgtgcactttctcggtccactcttgttgaagtgctgttttattactgtttctaaactaggattgacattctacagttgtgataatagcatttttgtaacttgccatccgcacagaaaatacgagaaaatctgcatgtttgattatagtattaatggacaaataagtttttgctaaatgtgagtatttctgttcctttttgtaaatatgtgacattcctgattgatttgggtttttttgttgttgttgttttgttttgttttgtttttttgagatggagtctcactcttatggtgccactgcactctaacctgggcgacagagtgagacaccgtctcaaaaaaaaaaacaaaaaacaaaaattatccaggtgtggcggtgggcgcctgtgaggcaggcgaatctcttgaacccgggaggcggaggttgcagtgagccaagatcacaccattgcactccagcctgggcaacaagagtgaaattccatctcaaaaagaaaccaaaaaaacaaaaaaaaaacatgccgtttgagtactgtgtttttggtgttgtccaaggaaaattaaaaacctgtagcatgaataatgtttgtttttcatttcgaatcttgtgaatgtattaaatatatcgctcttaagagacggtgaagttcctatttcaagtttttttttttttttttttttttaaagctgttttttaatacattaaatggtgctgagtaaaggaaatag

SEQ ID NO: 2761 - protein, 33 aa, Homo sapiens
MVPLHSNLGDRVRHRLKKKNKKQKLSRCGGGRL

SEQ ID NO: 2762 - DNA, 820 bp, Homo sapiens
cgtagcggttggtgacttgtctgcctcctgctttgggaagactgaggcatccgtgaggcagggacaagtctttctcctctttgagaccccagtgcctgcacatcatgagccttcagtcagggtttgtcagaggaacaaaccaggggacactttgttagaaagtgcttagaggttctgcctctatttttgttggggggtgggagaggggaccttaaaatgtgtacagtgaacaaatgtcttaaagggaatcatttttgtaggaagcattttttataattttctaagtcgtgcactttctcggtccactcttgttgaagtgctgttttattactgtttctaaactaggattgacattctacagttgtgataatagcatttttgtaacttgccatccgcacagaaaatacgagaaaatctgcatgtttgattatagtattaatggacaaataagtttttgctaaatgtgagtatttctgttcctttttgtaaatatgtgacattcctgattgatttgggtttttttgttgttgttgttttgttttgttttgtttttttgagatggagtctcactcttgtcacccaggctggagtgcagtggcgccatctcggctcactgcaacctctgcctcctgggttcacgtaatcctcctgagtagctgggattacaggtgtgagccaccgcgtccagccagctttattattttttttaagctgtctttgtgtcaaaatgatagttcatgctcctcttgttaaaacctgcaggccgagcacagtggctcatgcctgtaatcccagcattttgggagaccaaggcggatgg

SEQ ID NO: 2763 - protein, 64 aa, Homo sapiens
MESHSCHPGWSAVAPSRLTATSASWVHVILLSSWDYRCEPPRPASFIIFFKLSLCQNDSSCSSC

SEQ ID NO: 2764 - DNA, 895 bp, Homo sapiens
cgtagcggttggtgacttgtctgcctcctgctttgggaagactgaggcatccgtgaggcagggacaagtctttctcctctttgagaccccagtgcctgcacatcatgagccttcagtcagggtttgtcagaggaacaaaccaggggacactttgttagaaagtgcttagaggttctgcctctatttttgttggggggtgggagaggggaccttaaaatgtgtacagtgaacaaatgtcttaaagggaatcatttttgtaggaagcattttttataattttctaagtcgtgcactttctcggtccactcttgttgaagtgctgttttattactgtttctaaactaggattgacattctacagttgtgataatagcatttttgtaacttgccatccgcacagaaaatacgagaaaatctgcatgtttgattatagtattaatggacaaataagtttttgctaaatgtgagtatttctgttcctttttgtaaatatgtgacattcctgattgatttgggtttttttgttgttgttgttttgttttgttttgtttttttgagatggagtctcactcttgtcacccaggctggagttgcagtgagccaagatcacaccattgcactccagcctgggcaacaagagtgaaattccatctcaaaaagaaaccaaaaaaacaaaaaaaaaacatgccgtttgagtactgtgtttttggtgttgtccaaggaaaattaaaaacctgtagcatgaataatgtttgtttttcatttcgaatcttgtgaatgtattaaatatatcgctcttaagagacggtgaagttcctatttcaagtttttttttttttttttttttttaaagctgttttttaatacattaaatggtgctgagtaaaggaaatag

SEQ ID NO: 2765 - protein, 72 aa, Homo sapiens
MESHSCHPGWSCSEPRSHHCTPAWATRVKFHLKKKPKKQKKNMPFEYCVFGVVQGKLKTCSMNNVCFSFRIL

SEQ ID NO: 2766 - DNA, 1537 bp, Homo sapiens
catgagccttcagtcagggtttgtcagaggaacaaaccaggggacactttgttagaaagtgcttagaggttctgcctctatttttgttggggggtgggagaggggaccttaaaatgtgtacagtgaacaaatgtcttaaagggaatcatttttgtaggaagcattttttataattttctaagtcgtgcactttctcggtccactcttgttgaagtgctgttttattactgtttctaaactaggattgacattctacagttgtgataatagcatttttgtaacttgccatccgcacagaaaatacgagaaaatctgcatgtttgattatagtattaatggacaaataagtttttgctaaatgtgagtatttctgttcctttttgtaaatatgtgacattcctgattgatttgggtttttttgttgttgttgttttgttttgttttgtttttttgagatggagtctcactcttgtcacccaggctggagtgcagtggcgccatctcggctcactgcaacctctgcctcctgggttcacgtaatcctcctgagtagctgggattacaggcgcctgccaccacgctggccaatttttgtacttttagtagagacagtgtttcgtcatgttggccaggctggtttcaaactcctgacctcaggtgatccgcccacctcagcctcccaaaatggtgggattacaggtgtgtgggccaccgtgcctggctgattcagcattttttatcaggcaggaccaggtggcacttccacctccagcctctggtcctaccaatggattcatggagtagcctggactgtttcatagttttctaaatgtacaaattcttataggctagacttagattcattaactcaaattcaatgcttctatcagactcagttttttgtaactaatagatttttttttccacttttgttctactccttccctaatagctttttaaaaaaatctccccagtagagaaacatttggaaaagacagaaaatatttccttccagcctttttagggcagattttggttggtttttacatagttgagattgtactgttcatacagttttataccctttttcatttaactttataacttaaatattgctctatgttagtataagcttttcacaaacattagtatagtctcccttttataattaatgtttgtgggtatttcttggcatgcatctttaattccttatcctagcctttgggcacaattcctgtgctcaaaaatgagagtgacggctggcatggtggctcccgcctgtaatcccagtactttggaaagccaaggtaagaggattgcttgagcccagaacttcaagatgagcctgggctcatagtgagaacccatctatacaaaaaatttttaaaaattagcatggcggcacacatctgtaatcctagctacttggcaggctgaggtgagaagatcattggagtttaggaattggaggctgcagtgagccatgagtatgccactgcactccagcctgggggacagagcaagaccctgcctcaaa

SEQ ID NO: 2767 - protein, 89 aa, Homo sapiens
MESHSCHPGWSAVAPSRLTATSASWVHVILLSSWDYRRLPPRWPIFVLLVETVFRHVGQAGFKLLTSGDPPTSASQNGGITGVWATVPG

SEQ ID NO: 2768 - DNA, 504 bp, Homo sapiens
aggccgagcacagtggctcatgcctgtaatcccagcattttgggagaccaaggcggatggatcacgaggtcaggaaatcgagaccatcctggctaacacgggtgaaaccccgtctctattaaaaaatagaaaaaattaggcgggcgtggtggtgagcgcctgtgaggcaggcgaatctcttgaacccgggaggcggaggttgcagtgagccaagatcacaccattgcactccagcctgggcaacaagagtgaaattccatctcaaaaagaaaccaaaaaaacaaaaaaaaaacatgccgtttgagtactgtgtttttggtgttgtccaaggaaaattaaaaacctgtagcatgaataatgtttgtttttcatttcgaatcttgtgaatgtattaaatatatcgctcttaagagacggtgaagttcctatttcaagtttttttttttttttttttttttaaagctgttttttaatacattaaatggtgctgagtaaaggaaatag

SEQ ID NO: 2769 - protein, 39 aa, Homo sapiens
MPVIPAFWETKADGSRGQEIETILANTGETPSLLKNRKN

SEQ ID NO: 2770 - DNA, 628 bp, Homo sapiens
agcattttgggagaccaaggcggatggatcacctgaggtcaggagctgaagaccagcctggctaacatggtgaaacctcatctccacttaaaatacaaaaattgccggccgcggcggctcatgcctgtaatcccagcactttgggaggcctaggcgggtggatcacgaggtcaggaaatcgagaccatcctggctaacacgggtgaaaccccgtctctattaaaaaatagaaaaaattaggcgggcgtggtggtgagcgcctgtagtcccagctactcgagagcctgaggcaggagaatggcatgaacctggaaggcggagcttgcagtgagctgagatggtgccactgcacttccagcctgggcaacaagagtgaaattccatctcaaaaagaaaccaaaaaaacaaaaaaaaaacatgccgtttgagtactgtgtttttggtgttgtccaaggaaaattaaaaacctgtagcatgaataatgtttgtttttcatttcgaatcttgtgaatgtattaaatatatcgctcttaagagacggtgaagttcctatttcaagtttttttttttttttttttttttaaagctgttttttaatacattaaatggtgctgagtaaaggaaatag

SEQ ID NO: 2771 - protein, 41 aa, Homo sapiens
MNLEGGACSELRWCHCTSSLGNKSEIPSQKETKKTKKKHAV

SEQ ID NO: 2772 - DNA, 3474 bp, Homo sapiens
gtccgcccctggctagagaagccgcagcccgcagtgtccgacccagtcgtcccgcgccggagccggccccgtagcgtgccatggcctgctacatctaccagctgccctcctgggtgctggacgacctgtgccgcaacatggacgcgctcagcgagtgggactggatggagttcgcctcctacgtgatcacagacctgacccagctgcggaagatcaagtccatggagcgggtgcagggtgtgagcatcacgcgggagctgctgtggtggtggggcatgcggcaggccaccgtccagcaacttgtggacctcctgtgccgcctggagctctaccgggctgcccagatcatcctgaactggaaaccggctcctgaaatcaggtgtcccattccagccttccctgactctgtgaagccagaaaagcctttggcagcttctgtaagaaaggctgaggatgaacaggaagaggggcagcctgtgaggatggccacctttccaggcccagggtcctctccagccagagcccaccagccggcctttctccagcctcctgaagaagatgcccctcattccttgagaagcgacctccccacttcgtctgattcaaaggacttcagcacctccattcctaagcaggaaaaacttttgagcttggctggagacagccttttctggagtgaggcagacgtggtccaggcaaccgatgacttcaatcaaaaccgcaaaatcagccaggggacctttgctgacgtctacagagggcacaggcacgggaagccattcgtcttcaagaagctcagagagacagcctgttcaagtccaggatcaatcgaaagattcttccaggcagagttgcagatttgtcttagatgctgccaccccaatgtcttacctgtgctgggcttctgtgctgcaagacagtttcacagcttcatctacccctacatggcaaatggttccctacaggacagactgcagggtcagggtggctcggaccccctcccctggccccagcgtgtcagcatctgctcagggctgctctgtgccgtcgagtacctgcatggtctggagatcatccacagcaacgtcaagagctctaatgtcttgctggaccaaaatctcacccccaaacttgctcacccaatggctcatctgtgtcctgtcaacaaaaggtcaaaatacaccatgatgaagactcacctgctccggacgtcagccgcgtatctgccagaggatttcatccgggtggggcagctgacaaagcgagtggacatcttcagctgtggaatagtgttggccgaggtcctcacgggcatccctgcaatggataacaaccgaagcccggtttacctgaaggacttactcctcagtgatattccaagcagcaccgcctcgctctgctccaggaagacgggcgtggagaacgtgatggcaaaggagatctgccagaagtacctggagaagggcgcagggaggcttccggaggactgcgccgaggccctggccacggctgcctgcctgtgcctgcggaggcgtaacaccagcctgcaggaggtgtgtggctctgtggctgctgtggaagagcggctccgaggtcgggagacgttgctcccttggagtgggctttctgagggtacaggctcttcttccaacaccccagaggaaacagacgacgttgacaattccagccttgatgcctcctcctccatgagtgtggcaccctgggcaggggctgccaccccacttctccccacagagaatggggaaggaaggctgcgggtcatcgtgggaagggaggctgactcctcctctgaggcctgtgttggcctggagcctccccaggatgttacagaaacttcgtggcaaattgagatcaatgaggccaaaaggaaactgatggagaatattctgctctacaaagaggaaaaagtggacagcattgagctctttggcccctgatgaccggaacacagctgaggacccttgtcctcagttggaaagatgagcatcagatcaagaaaaaggtctgaggcagaatccaagatctgccaggaaacacacaacaaaacatctgctgtcctgggtgggagggaaacttcatttcactggaatgagttgggagagaaaggccctcagcttttagagacacaaaaatccatgaagtctcttcctttctgggctttgttagtcagagcaggggatcagaggagactgaagcagaaaccctgcacacgggcccaggatgtggctgattttgtggttccggggagtatgtgatgataatcacccccagcagattccattacctcagcagctcttgttcccccgccactggcagttctgcaatgccatagcattttccagagctaagatctctgggttgtatttgctgacagcctgcaagcttgcatgctctgaaagattttttttagtttttaatttttttgtagagatggggtctcgctttgttggcgcaatcctcccacctcagactcccaaagtgctggaattacagttgggagccactgtgcctggcctggaagactttcaacttgtgtctcagtgcagttcttgactcacctctctgggcctcaggttctacaaatgccagacacctagcgaagagctctgcaggctttccactgcctgtattggaaatcttgcaattcacataattattcagtcactgcctggtacctttatcttcccatcccactaatgttagtgttttttaatggagcttttattctgagaatatgtgtttgtctgtttgtttgttttttgagacagagtctcactttgtcacccaggctggagtgcagtggcacgatctcagctcactgcaagctctgcctctcaggttcaagtgattctcctgcctcagcctcctgagtagatgggactgtaggcacctgccactatgcctggctaatttttgtgtttttagtagagacagggtttcaccatattggccaggctggtctcgaactactgacctcgtgatctgcccgccttggcctatcaaagtgttgggattacaggcttgagccaccgcacccggccgagaatatgtgttgttatttatgactggattatgaagaatcaggagaatgcatttcatgtctgattctgctgctaattaagtcaatcatttaatttttgggacctcagtttctttgtaagtaaaataacacctgcttgttcttcatccctgggctgttgggaggaacagatgagacagtggctatagaagcacttggaaaatgcacttgtcctgttttgtaaaataaaaaggtattaaatgtgtatttctgccatgtacctaatgattattcagtgcgtatatatctgaaaagtcatgttgcaaatctttctgtgaaacagatgctattttaaattcactgggagaaatatcctatttaaagtaatctatagtaatttctttttatataataaaaatatatttgtaaagtcg

SEQ ID NO: 2773 - protein, 625 aa, Homo sapiens; identical to SEQ ID NO: 228

SEQ ID NO: 2774 - DNA, 4688 bp, Homo sapiens
ggcggaggccgggccaggcggggctgtagggctggggcaggcggcgcccgggtctggccctggcctacgggctaagcgcccggccccggggccgcggatccggcagccatgtgtggatcttgaagcgccatgtggtcttctgaagcgcttgacagttctaaagggctttatattgcaaactgatcaaagcgcttcgtagccccggaagcgcttaggcatctccgaagtagcgctgggcaaagtgaaggcttcctgatctcagaagcacgttgtgggcttggaaaccgacggcagcctttagtcaattttggatcgctttgacttctccaacacggtttggcatctctgaaaccttgagaactgtgatgggcagtggaaagaagagggaaaggtgcccatggcgtccgagcggggcaaggtcaagcacaactggagcagcacgtcggaagggtgtccccgcaagcgcagctgcctccgggagccctgtgatgtggccccctccagccggccagctcagaggtctgcgtcgcgttctggagggcccagcagccccaagcgcctgaaagcccagaaggaggacgatgtggcttgctcgcggaggttatcctggggctcatcccgccgcagaaataactcctcctcctccttctccccacatttcttgggccctggtgtgggcggggccgcctccaaaggctgcctgattcggaacactcgggggttcctgtcttcagggggatcccctctgcgtcctgccaacgcctctttggaagaaatggcttctctagaggaggaagcctgcagccttaaggttgattccaaagatagttctcataactccacaaactctgaatttgcagctgaagctgagggtcagaatgatacaattgaggaacccaacaaggtccagaaaaggaagagggatagacttcgagaccagggctccacaatgatctacctgaaggctatccagggcatcctggggaaatcgatgccaaaaaggaagggagaggctgccactcgggcaaaaccaagcgcagcagagcatcccagccatggagaaggaccagccaggagtgaaggaccagccaagactgcagaaggagcagccaggagtgtcacagtcactgctgctcagaaggagaaagacgcaaccccagaggtcagcatggaggaggataagacagtgccagagaggagcagcttctatgacaggagagtagttatagaccctcaagagaaacccagtgaggagccccttggggaccgaaggactgtcattgacaaatgctctccacccctagagttcttggatgactctgactctcatttagaaatccaaaagcataaagatagggaggtggtgatggagcacccctcttctggaagtgactggtctgatgttgaggagatctccacagtcagattctctcaggaggaacctgtctccctgaaaccttcagccgttccggagccttcttccttcaccaccgactatgtcatgtaccctcctcatttgtacagtagtccttggtgtgactacgccagctattggaccagcagccccaagccttctagctacccctccacaggcagcagcagcaacgatgcagcccaggttgggaagagcagccggagccgcatgagtgattattcccccaactctacagggagtgtccaaaacacctccagagacatggaggcctcagaggaaggctggtcccagaattctcgttcatttcgcttctccagaagctcagaagaaagagaggtgaaggagaaaagaacattccaagaggagatgcctccgcgtccttgtggaggacacgcatccagctccctgccaaagagccacctggagccaagcctagaggagggcttcattgacactcattgtcacctggacatgctctattccaagctatctttccaagggacctttacaaagttcagaaaaatttacagcagctccttccctaaggaatttcagggctgcatctctgacttctgtgatccccgcaccctgacagattgcctatgggaggagctgttgaaagaggatctggtctggggggcctttggctgtcaccctcattttgcacgttactacagtgagagtcaagaaagaaatcttttgcaagccttaaggcaccctaaggctgtggcatttggagaaatgggcttggattactcttacaagtgcaccacgcctgtcccagaacagcacaaggtatttgagagacagctgcagctggctgtgtctctaaagaagcccttggtgatccactgccgagaagctgatgaagatctgctagaaatcatgaaaaagtttgtgccccctgactacaagatccataggcattgcttcaccggcagctacccggtcattgagcccctgctgaagtactttcccaacatgtctgtgggcttcacggcagtgctgacatactcctctgcctgggaggcccgggaagccttgaggcagatcccactggagagaatcatcgtggaaacggatgctccctatttcctccctcgccaggttcccaaaagcctttgccagtatgcccacccgggcctggccttgcatacggtccgagagattgccagagtcaaagatcagccactctccctcaccttggctgccttgcgtgagaacaccagtcgcctctacagtctttaagcagagaagggcgaccagcagcctgacagaacacaggctggcttgaagtctgtgtctcaggtcgaggatgtgtttagagagctgattggaacacagaaaaccaggacaggatgttttcctccaagcgggtcataaggcttcagcttctgggtggtgggtggggtggggtgggcatggaatgaggggtatggggactgcctgtaatagcactgggattttgcctcccagccaaaatgctccagggtaggcagcaaagaagaaagagtgcgatatgagggtacagtgagtttggcagtccaaattctgttctctgcagcctgtttttgagtagttggtgaataaagtcacccgcctacttgtctaagcacatgtgggtgtgtaactcagttcctggttctcggttctaaaaacagacttccaactgggaaactttttgggggaaattaactggacacctatctcggaggtttattttcttgcaaccagtgaagtcgtcctcctcccttccctggataactcttcagtttgactgtcactgttctggtgtcaactccagcgtcggcacaggcagaaggacttcagctgctggtctcattggttccactgccattgatatgggggggtgcagaggagcactcattgtccatgatggagatccaggacagactgggggactccgggaagaggctttcttggggaagaggaccccaaaggaggtacttcctcctcactgatgccctcagggctgctgtgtgggtgtgttaagctgataaggttcagtttgcggcggaaactacctgctagtcttgtgtcaggggctgccagcctccttttgtttcacttttgcccccttcttgggaacatttgaccaaaaataatcctcatttcatcttgtgtacagtcctttgtgtaccccgcccaggttgagaggtgaatcagcgtaattctccgaagctctgctgggcagctcagccatgttacattgtctatgcagaataagcaggcctggtgtctgcaaatgtaccagtccttctcccgcatctcctgggtgcccccttggctttgcctctcctgtgtcctgtctttctgcgttttagaagtgagagcctctccttcaccttttgagcaactgagtcatctcaagtcctgagctctgctctgccgcctgctggtgccttgtaaaggtatactcgttacaggccctagaggttctaatggtccagggttaagtgagaggagactgtactttgtttcaaaggatccttcaccctgatctgcagtgaggtggatagatcacctggagtccctcgtctgtggtcttggaggcttaaattgtaaaatacatcccttatggaatcctaaattcctctaggtgtttttggaaggcgcatttgagccttgtgagctaaaatggaatggatttaatatttcctatctggcatttccatcttgcccctggtacacaagtcactggcctggaactcagccttgattcactgtccgtcttcacggattagctgtgctgttatgttgtctgtgctgcagattggcccatgtgggaagtcgggggggacctgatttcctgcttggaagacttgggggactgccgagcatatcaaagtgtttatagtcaccaagtgaactgcagcacaaccatctcctctccagcaagccctgaagtcagtagtgcctgcaggtgaaaccaaccagccctgtgttagaggaggaaaagcggagatgacatggaagtctccaagcctgtgccatccacctgccaaggaaaagcacaaggtgctatctacttttctctctaggatttagattatcatttatgtgctgttgcacagtgaaacctcacctgtgtgggcgtgaaagctgattggcattgtttttgattcagctttttggatggctaattgttttcactgtgctgtgggaatgcctctgtattttttcccctctttggccatctttttctgaaaataaagtgatggatcctctagcc

SEQ ID NO: 2775 - protein, 761 aa, Homo sapiens
MASERGKVKHNWSSTSEGCPRKRSCLREPCDVAPSSRPAQRSASRSGGPSSPKRLKAQKEDDVACSRRLSWGSSRRRNNSSSSFSPHFLGPGVGGAASKGCLIRNTRGFLSSGGSPLRPANASLEEMASLEEEACSLKVDSKDSSHNSTNSEFAAEAEGQNDTIEEPNKVQKRKRDRLRDQGSTMIYLKAIQGILGKSMPKRKGEAATRAKPSAAEHPSHGEGPARSEGPAKTAEGAARSVTVTAAQKEKDATPEVSMEEDKTVPERSSFYDRRVVIDPQEKPSEEPLGDRRTVIDKCSPPLEFLDDSDSHLEIQKHKDREVVMEHPSSGSDWSDVEEISTVRFSQEEPVSLKPSAVPEPSSFTTDYVMYPPHLYSSPWCDYASYWTSSPKPSSYPSTGSSSNDAAQVGKSSRSRMSDYSPNSTGSVQNTSRDMEASEEGWSQNSRSFRFSRSSEEREVKEKRTFQEEMPPRPCGGHASSSLPKSHLEPSLEEGFIDTHCHLDMLYSKLSFQGTFTKFRKIYSSSFPKEFQGCISDFCDPRTLTDCLWEELLKEDLVWGAFGCHPHFARYYSESQERNLLQALRHPKAVAFGEMGLDYSYKCTTPVPEQHKVFERQLQLAVSLKKPLVIHCREADEDLLEIMKKFVPPDYKIHRHCFTGSYPVIEPLLKYFPNMSVGFTAVLTYSSAWEAREALRQIPLERIIVETDAPYFLPRQVPKSLCQYAHPGLALHTVREIARVKDQPLSLTLAALRENTSRLYSL

SEQ ID NO: 2776 - DNA, 4803 bp, Homo sapiens
ggcggaggccgggccaggcggggctgtagggctggggcaggcggcgcccgggtctggccctggcctacgggctaagcgcccggccccggggccgcggatccggcagccatgtgtggatcttgaagcgccatgtggtcttctgaagcgcttgacagttctaaagggctttatattgcaaactgatcaaagcgcttcgtagccccggaagcgcttaggcatctccgaagtagcgctgggcaaagtgaaggcttcctgatctcagaagcacgttgtgggcttggaaaccgacggcagcctttagtcaattttggatcgctttgacttctccaacacggtttggcatctctgaaaccttgagaactgtgatgggcagtggaaagaagagggaaaggtgcccatggcgtccgagcggggcaaggtcaagcacaactggagcagcacgtcggaagggtgtccccgcaagcgcagctgcctccgggagccctgtgatgtggccccctccagccggccagctcagaggtctgcgtcgcgttctggagggcccagcagccccaagcgcctgaaagcccagaaggaggacgatgtggcttgctcgcggaggttatcctggggctcatcccgccgcagaaataactcctcctcctccttctccccacatttcttgggccctggtgtgggcggggccgcctccaaaggctgcctgattcggaacactcgggggttcctgtcttcagggggatcccctctgcgtcctgccaacgcctctttggaagaaatggcttctctagaggaggaagcctgcagccttaaggttgattccaaagatagttctcataactccacaaactctgaatttgcagctgaagctgagggtcagaatgatacaattgaggaacccaacaaggtccagaaaaggaagagggatagacttcgagaccagggctccacaatgatctacctgaaggctatccagggcatcctggggaaatcgatgccaaaaaggaagggagaggctgccactcgggcaaaaccaagcgcagcagagcatcccagccatggagaaggaccagccaggagtgaaggaccagccaagactgcagaaggagcagccaggagtgtcacagtcactgctgctcagaaggagaaagacgcaaccccagaggtcagcatggaggaggataagacagtgccagagaggagcagcttctatgacaggagagtagttatagaccctcaagagaaacccagtgaggagccccttggggaccgaaggactgtcattgacaaatgctctccacccctagagttcttggatgactctgactctcatttagaaatccaaaagcataaagatagggaggtggtgatggagcacccctcttctggaagtgactggtctgatgttgaggagatctccacagtcagattctctcaggaggaacctgtctccctgaaaccttcagccgttccggagccttcttccttcaccaccgactatgtcatgtaccctcctcatttgtacagtagtccttggtgtgactacgccagctattggaccagcagccccaagccttctagctacccctccacaggcagcagcagcaacgatgcagcccaggttgggaagagcagccggagccgcatgagtgattattcccccaactctacagggagtgtccaaaacacctccagagacatggaggcctcagaggaaggctggtcccagaattctcgttcatttcgcttctccagaagctcagaagaaagagaggtgaaggagaaaagaacattccaagaggagatgcctccgcgtccttgtggaggacacgcatccagctccctgccaaagagccacctggagccaagcctagaggagggcttcattgacactcattgtcacctggacatgctctattccaagctatctttccaagggacctttacaaagttcagaaaaatttacagcagctccttccctaaggaatttcagggctgcatctctgacttctgtgatccccgcaccctgacagattgcctatgggaggagctgttgaaagaggatctggtctggggggcctttggctgtcaccctcattttgcacgttactacagtgagagtcaagaaagaaatcttttgcaagccttaaggcaccctaaggctgtggcatttggagaaatgggcttggattactcttacaagtgcaccacgcctgtcccagaacagcacaaggtatttgagagacagctgcagctggctgtgtctctaaagaagcccttggtgatccactgccgagaagctgatgaagatctgctagaaatcatgaaaaagtttgtgccccctgactacaagatccataggcattgcttcaccggcagctacccggtcattgagcccctgctgaagtactttcccaacatgtctgtgggcttcacggcagtgctgacatactcctctgcctgggaggcccgggaagccttgaggcagatcccactggagagaatcatcgtggaaacggatgctccctatttcctccctcgccaggttcccaaaagcctttgccagtatgcccacccgggcctggccttgcatacggtccgagagattgccagagtcaaagatcagccactctccctcaccttggctgccttgcgtgagaacaccagtcgcctctacagtctttaagcagagaagggcgaccagcagcctgacagaacacaggctggcttgaagtctgtgtctcaggtcgaggatgtgtttagagagctgattggaacacagaaaaccaggacaggatgttttcctccaagcgggtcataaggcttcagcttctgggtggtgggtggggtggggtgggcatggaatgaggggtatggggactgcctgtaatagcactgggattttgcctcccagccaaaatgctccagggtaggcagcaaagaagaaagagtgcgatatgagggtacagtgagtttggcagtccaaattctgttctctgcagcctgtttttgagtagttggtgaataaagtcacccgcctacttgtctaagcacatgtgggtgtgtaactcagttcctggttctcggttctaaaaacagacttccaactgggaaactttttgggggaaattaactggacacctatctcggaggtttattttcttgcaaccagtgaagtcgtcctcctcccttccctggataactcttcagtttgactgtcactgttctggtgtcaactccagcgtcggcacaggcagaaggacttcagctgctggtctcattggttccactgccattgatatgggggggtgcagaggagcactcattgtccatgatggagatccaggacagactgggggactccgggaagaggctttcttggggaagaggaccccaaaggaggtacttcctcctcactgatgccctcagggctgctgtgtgggtgtgttaagctgataaggttcagtttgcggcggaaactacctgctagtcttgtgtcaggggctgccagcctccttttgtttcacttttgcccccttcttgggaacatttgaccaaaaataatcctcatttcatcttgtgtacagtcctttgtgtaccccgcccaggttgagaggtgaatcagcgtaattctccgaagctctgctgggcagctcagccatgttacattgtctatgcagaataagcaggcctggtgtctgcaaatgtaccagtccttctcccgcatctcctgggtgcccccttggctttgcctctcctgtgtcctgtctttctgcgttttagaagtgagagcctctccttcaccttttgagcaactgagtcatctcaagtcctgagctctgctctgccgcctgctggtgccttgtaaaggtatactcgttacaggccctagaggttctaatggtccagggttaagtgagaggagactgtactttgtttcaaaggatccttcaccctgatctgcagtgaggtggatagatcacctggagtccctcgtctgtggtcttggaggcttaaattgtaaaatacatcccttatggaatcctaaattcctctaggtgtttttggaaggcgcatttgagccttgtgagctaaaatggaatggatttaatatttcctatctggcatttccatcttgcccctggtacacaagtcactggcctggaactcagccttgattcactgtccgtcttcacggattagctgtgctgttatgttgtctgtgctgcagattggcccatgtgggaagtcgggggggacctgatttcctgcttggaagacttgggggactgccgagcatatcaaagtgtttatagtcaccaagtgaactgcagcacaaccatctcctctccagcaagccctgaagtcagtagtgcctgcaggtgaaaccaaccagccctgtgttagaggaggaaaagcggagatgacatggaagtctccaagcctgtgccatccacctgccaaggaaaagcacaaggtgctatctacttttctctctaggatttagattatcatttatgtgctgttgcacagtgaaacctcacctgtgtgggcgtgaaagctgattggcattgtttttgattcagctttttggatggctaattgttttcactgtgctgtgggaatgcctctgtattttttcccctctttggccatctttttctgaaaataaagtgatggatcctctagccaacccagtctctccgtgtttgtatagacttacctgagtgatgcagtggtttagtctggttgttggccagcattgtaacccaagaatccaggtagctggagactttttttctttct

SEQ ID NO: 2777 - protein, 761 aa, Homo sapiens; identical to SEQ ID NO: 2775

SEQ ID NO: 2778 - DNA, 831 bp, Homo sapiens
acaggcagcagcagcaacgatgcagcccaggttgggaagagcagccggagccgcatgagtgattattcccccaactctacagggagtgtccaaaacacctccagagacatggaggcctcagaggaaggctggtcccagaattctcgttcatttcgcttctccagaagctcagaagaaagagaggtgaaggagaaaagaacattccaagaggagatgcctccgcgtccttgtggaggacacgcatccagctccctgccaaagagccacctggagccaagcctagaggagggcttcattgacactcattgtcacctggacatgctctattccaagctatctttccaagggacctttacaaagttcagaaaaatttacagcagctccttccctaaggaatttcagggctgcatctctgacttctccctgtgttagaggaggaaaagcggagatgacatggaagtctccaagcctgtgccatccacctgccaaggaaaagcacaaggtgctatctacttttctctctaggatttagattatcatttatgtgctgttgcacagtgaaacctcacctgtgtgggcgtgaaagctgattggcattgtttttgattcagctttttggatggctaattgttttcactgtgctgtgggaatgcctctgtattttttcccctctttggccatctttttctgaaaataaagtgatggatcctctagccaacccagtctctccgtgtttgtatagacttacctgagtgatgcagtggtttagtctggttgttggccagcattgtaacccaagaatccaggtagctggagactttttttctttct

SEQ ID NO: 2779 - protein, 125 aa, Homo sapiens
MSDYSPNSTGSVQNTSRDMEASEEGWSQNSRSFRFSRSSEEREVKEKRTFQEEMPPRPCGGHASSSLPKSHLEPSLEEGFIDTHCHLDMLYSKLSFQGTFTKFRKIYSSSFPKEFQGCISDFSLC

SEQ ID NO: 2780 - DNA, 1047 bp, Homo sapiens
tttcaccatgtttgttagactagtctcgagctcctgacctcaagtaatccacctgcctcggcgtccgaaaagtgctgggattacagacctgagccactgcgcccgccccctgttaatattttttttcctcccaatattttttgagcatagtgctttggcagggtaagagttgtagtattttagaatttcttttctttttttttcagagataaggtctttgtcgcccacactggagttcagtggtgcagccacagctcactgcagccttgacctcctgggctcaagtgatcctcccacctcagcctcccaagtagctgggactgcaggtgcacaccaccacgcctggctaattaaaaataaaaatttttttgagatggagtcttgctgtgtcacccaggctggagggcagcggtacgatctcagctcactgctacctccacctccccagttcaagtgattctcctggctcagcctctcaggaggctgaggcaggaggattgcttgagcctgggaggttgagctgcagtgacccatgattatgctccagcctgggtgacagagtgagaccctgtctcaagacaaaattatcagggtctcaggtctgcacttaaaggtccatggggcgacctgcacaacaaactgaactagaagcgataggcatagggggataaacacagtcttgaagatgtcatttggcttggtgagatttgactcaagactggaagataatgagtctgaggagttgctggctgggagagggctaagctgcctgtaaaggggaggaagactagaaaatatttgtcaacaccagagactcctaggctgggtgggggatatggacactgttttgatgtaaataaaaaatttggcacccaaatgaggtgaatggtggtgactggcaactgcacctagttggatgtcagtgctgagttgcatttacctaaaagagcagttagcaagttctggatgtgtcctgctgaatgttttatcttgtgaagggaagaagaagaacctatagagggctgggcgaggtggctcacgcctgta

SEQ ID NO: 2781 - protein, 33 aa, Homo sapiens
MSVLSCIYLKEQLASSGCVLLNVLSCEGKKKNL

SEQ ID NO: 2782 - DNA, 347 bp, Homo sapiens
tggaggtgctgccaggagacaggttggatggtggcttctgcctacatagcatgtgggactgggtggtcataggtgctgtgggagccacagcaggggcccattatcatagcccagccagaagactcaggaggtgatgcctggccggctccttaaagatggttgagaggggttggctgaataacaaggactctagcacccaaatcggcctttgccagtatgcccacccgggcctggccttgcatacggtccgagagattgccagagtcaaagatcagccactctccctcaccttggctgccttgcgtgagaacaccagtcgcctctacagtctttaagcagagaaggta

SEQ ID NO: 2783 - protein, 59 aa, Homo sapiens
MVERGWLNNKDSSTQIGLCQYAHPGLALHTVREIARVKDQPLSLTLAALRENTSRLYSL

SEQ ID NO: 2784 - DNA, 1555 bp, Homo sapiens
tcctcccttccctggataactcttcagtttgactgtcactgttctggtgtcaactccagcgtcggcacaggcagaaggacttcagctgctggtctcattggttccactgccattgatatgggggggtgcagaggagcactcattgtccatgatggagatccaggacagactgggggactccgggaagaggctttcttggggaagaggaccccaaaggaggtacttcctcctcactgatgccctcagggctgctgtgtgggtgtgttaagctgataaggttcagtttgcggcggaaactacctgctagtcttgtgtcaggggctgccagcctccttttgtttcacttttgcccccttcttgggaacatttgaccaaaaataatcctcatttcatcttgtgtacagtcctttgtgtaccccgcccaggttgagaggtgaatcagcgtaattctccgaagctctgctgggcagctcagccatgttacattgtctatgcagaataagcaggcctggtgtctgcaaatgtaccagtccttctcccgcatctcctgggtgcccccttggctttgcctctcctgtgtcctgtctttctgcgttttagaagtgagagcctctccttcaccttttgagcaactgagtcatctcaagtcctgagctctgctctgccgcctgctggtgccttgtaaaggtatactcgttacaggccctagaggttctaatggtccagggttaagtgagaggagactgtactttgtttcaaaggatccttcaccctgatctgcagtgaggtggatagatcacctggagtccctcgtctgtggtcttggaggcttaaattgtaaaatacatcccttatggaatcctaaattcctctaggtgtttttggaaggcgcatttgagccttgtgagctaaaatggaatggatttaatatttcctatctggcatttccatcttgcccctggtacacaagtcactggcctggaactcagccttgattcactgtccgtcttcacggattagctgtgctgttatgttgtctgtgctgcagattggcccatgtgggaagtcgggggggacctgatttcctgcttggaagacttgggggactgccgagcatatcaaagtgtttatagtcaccaagtgaactgcagcacaaccatctcctctccagcaagccctgaagtcagtagtgcctgtgccatccacctgccaaggaaaagcacaaggtgctatctacttttctctctaggatttagattatcatttatgtgctgttgcacagtgaaacctcacctgtgtgggcgtgaaagctgattggcattgtttttgattcagctttttggatggctaattgttttcactgtgctgtgggaatgcctctgtattttttcccctctttggccatctttttctgaaaataaagtgatggatcctctagccaacccagtctctccgtgtttgtatagacttacctgagtgatgcagtggtttagtctggttgttggccagcattgtaacccaagaatccaggtagctggagactttttttctttct

SEQ ID NO: 2785 - protein, 85 aa, Homo sapiens
MWEVGGDLISCLEDLGDCRAYQSVYSHQVNCSTTISSPASPEVSSACAIHLPRKSTRCYLLFSLGFRLSFMCCCTVKPHLCGRES

SEQ ID NO: 2786 - DNA, 1010 bp, Homo sapiens
tacagtcctttgtgtaccccgcccaggttgagaggtgaatcagcgtaattctccgaagctctgctgggcagctcagccatgttacattgtctatgcagaataagcaggcctggtgtctgcaaatgtaccagtccttctcccgcatctcctgggtgcccccttggctttgcctctcctgtgtcctgtctttctgcgttttagaagtgagagcctctccttcaccttttgagcaactgagtcatctcaagtcctgagctctgctctgccgcctgctggtgccttgtaaaggtatactcgttacaggccctagaggttctaatggtccagggttaagtgagaggagactgtactttgtttcaaaggatccttcaccctgatctgcagtgaggtggatagatcacctggagtccctcgtctgtggtcttggaggcttaaattgtaaaatacatcccttatggaatcctaaattcctctaggtgtttttggaaggcgcatttgagccttgtgagctaaaatggaatggatttaatatttcctatctggcatttccatcttgcccctggtacacaagtcactggcctggaactcagccttgattcactgtccgtcttcacggattagctgtgctgttatgttgtctgtgctgcagattggcccatgtgggaagtcgggggggacctgatttcctgcttggaagacttgggggactgccgagcatatcaaagtgtttatagtcaccaagtgaactgcagcacaaccatctcctctccagcaagccctgaagtcagtagtgcctgcaggtgaaaccaaccagccctgtgttagaggaggaaaagcggagatgacatggaagtctccaagcctgtgccatccacctgccaaggaaaagcacaaggtgctatctacttttctctctaggatttagattatcatttatgtgtgtgggaatgcctctgtattttttcccctctttggccatctttttctgaaaataaagtgatggatcctct

SEQ ID NO: 2787 - protein, 53 aa, Homo sapiens
MQNKQAWCLQMYQSFSRISWVPPWLCLSCVLSFCVLEVRASPSPFEQLSHLKS

SEQ ID NO: 2788 - DNA, 719 bp, Homo sapiens
gaacatttttagttcccaaggaatgtacatcagccccacggaagctaggccacctctgggatggggttgctggtttagaacaaacgccagtcatcctatataaggacctgacagccaccaggcaccacctccgccaggaactgcaggcccacctgtctgcaacccagctgaggccatgccctccccagggaccgtctgcagcctcctgctcctcggcatgctctggctggacttggccatggcaggctccagcttcctgagccctgaacaccagagagtccagcagagaaaggagtcgaagaagccaccagccaagctgcagccccgagctctagcaggctggctccgcccggaagatggaggtcaagcagaaggggcagaggatgaactggaagtccggttcaacgccccctttgatgttggaatcaagctgtcaggggttcagtaccagcagcacagccaggccctggggaagtttcttcaggacatcctctgggaagaggccaaagaggccccagccgacaagtgatcgcccacaagccttactcacctctctctaagtttagaagcgctcatctggcttttcgcttgcttctgcagcaactcccacgactgttgtacaagctcaggaggcgaataaatgttcaaactgtatgctgatgttccaaatgggaatttatttcaaagaggaaaagttaatattttactttaaaaaaatc

SEQ ID NO: 2789 - protein, 117 aa, Homo sapiens; identical to SEQ ID NO: 232

SEQ ID NO: 2790 - DNA, 401 bp, Homo sapiens
caggcccacctgtctgcaacccagctgaggccatgccctccccagggaccgtctgcagcctcctgctcctcggcatgctctggctggacttggccatggcaggctccagcttcctgagccctgaacaccagagagtccagcagagaaaggagtcgaagaagccaccagccaagctgcagccccgagctctagcaggctggctccgcccggaagatggaggtcaagcagaaggggcagaggatgaactggaagtccggaggccccagccgacaagtgatcgcccacaagccttactcacctctctctaagtttagaagcgctcatctggcttttcgcttgcttctgcagcaactcccacgactgttgtacaagctcaggaggcgaataaatgttcaaactgt

SEQ ID NO: 2791 - protein, 91 aa, Homo sapiens
MPSPGTVCSLLLLGMLWLDLAMAGSSFLSPEHQRVQQRKESKKPPAKLQPRALAGWLRPEDGGQAEGAEDELEVRRPQPTSDRPQALLTSL

SEQ ID NO: 2792 - DNA, 655 bp, Homo sapiens
tgggaggtggaagcgggggtcctctctacacagcagtcaggaccccagatggtaaagcccttcacgccatctgctgggctcctacctgagcaagctcagaggcacatgagaaggggaggcagctgcctggagaccctctctcccccaggcccacctgtctgcaacccagctgaggccatgccctccccagggaccgtctgcagcctcctgctcctcggcatgctctggctggacttggccatggcaggctccagcttcctgagccctgaacaccagagagtccagcagagaaaggagtcgaagaagccaccagccaagctgcagccccgagctctagcaggctggctccgcccggaagatggaggtcaagcagaaggggcagaggatgaactggaagtccggttcaacgccccctttgatgttggaatcaagctgtcaggggttcagtaccagcagcacagccaggccctggggaagtttcttcaggacatcctctgggaagaggccaaagaggccccagccgacaagtgatcgcccacaagccttactcacctctctctaagtttagaagcgctcatctggcttttcgcttgcttctgcagcaactcccacgactgttgtacaagctcaggaggcgaataaatgttcaaactgt

SEQ ID NO: 2793 - protein, 160 aa, Homo sapiens
MVKPFTPSAGLLPEQAQRHMRRGGSCLETLSPPGPPVCNPAEAMPSPGTVCSLLLLGMLWLDLAMAGSSFLSPEHQRVQQRKESKKPPAKLQPRALAGWLRPEDGGQAEGAEDELEVRFNAPFDVGIKLSGVQYQQHSQALGKFLQDILWEEAKEAPADK

SEQ ID NO: 2794 - DNA, 660 bp, Homo sapiens
aggacaagaacatttttagttcccaaggaatgtacatcagccccacggaagctaggccacctctgggatggggttgctggtttagaacaaacgccagtcatcctatataaggacctgacagccaccaggcaccacctccgccaggaactgcaggcccacctgtctgcaacccagctgaggccatgccctccccagggaccgtctgcagcctcctgctcctcggcatgctctggctggacttggccatggcaggctccagcttcctgagccctgaacaccagagagtccagcagagaaaggagtcgaagaagccaccagccaagctgcagccccgagctctagcaggctggctccgcccggaagatggaggtcaagcagaaggggcagaggatgaactggaagtccggttcaacgccccctttgatgttggaatcaagctgtcaggggttcagtaccagcagcacagccaggccctggggaagtttcttcaggacatcctctgggaagaggccaaagaggccccagccgacaagtgatcgcccacaagccttactcacctctctctaagtttagaagcgctcatctggcttttcgcttgcttctgcagcaactcccacgactgttgtacaagctcaggaggcgaataaatgttcaaactgt

SEQ ID NO: 2795 - protein, 117 aa, Homo sapiens; identical to SEQ ID NO: 232

SEQ ID NO: 2796 - DNA, 569 bp, Homo sapiens
agcaattccgcagggcatctgacctccactgttgacttctacccagaggacaagaacatttttagttcccaaggaatgtacatcagccccacggaagctaggccacctctgggatggggttgctggtttagaacaaacgccagtcatcctatataaggacctgacagccaccaggcaccacctccgccaggaactgcagcagagaaaggagtcgaagaagccaccagccaagctgcagccccgagctctagcaggctggctccgcccggaagatggaggtcaagcagaaggggcagaggatgaactggaagtccggttcaacgccccctttgatgttggaatcaagctgtcaggggttcagtaccagcagcacagccaggccctggggaagtttcttcaggacatcctctgggaagaggccaaagaggccccagccgacaagtgatcgcccacaagccttactcacctctctctaagtttagaagcgctcatctggcttttcgcttgcttctgcagcaactcccacgactgttgtacaagctcaggaggcgaataaatgttcaaactgt

SEQ ID NO: 2797 - protein, 67 aa, Homo sapiens
MEVKQKGQRMNWKSGSTPPLMLESSCQGFSTSSTARPWGSFFRTSSGKRPKRPQPTSDRPQALLTSL

SEQ ID NO: 2798 - DNA, 1677 bp, Homo sapiens
acagtcgtgggagttgctgcagaagcaagcgaaaagccagatgagcgcttctaaacttagagagagggagagcgcctcatctcttccattttccaggtattcctgagatgatttattggagctcaaagctttgggagagttggggccttccattccctccagtaaatacttgtttttcttccaccgctgaggcaaatgcggggtggctgatcacctggcagacatcttaggaaacaggagcaccggtctgggaaactgctggcctggcctaacacctggcgctgtggtgcaggcaaggcagccactgaggattcttgaggagagagagaccatagaatgaatgaaagagttggaaagactttaaagctctgggaggctgaatcctttatttcgctggaagaaaaactgaatgccaagagggcctcactttccccaaagctatacagccatcaggggcaatgctgggattcccccatggatctcttgactcctaatacagtgctctttctgatatgccatctggctccataatgaacattgtgttccaggaaaatcagtctgcgctgaacaggatggaattggggcaggacgtccagtgaggaggacattgaggcagtagagcagttgattgccgaatgaccacctaccctgacttaaaagatcaacctcagggaggattggagctttctagagtctcttgggacagcagaagcacaggccgggttggactgaatctttaagtggacatgagggacaaagtacctcctgttggtaaacatctcaccaccaacccactgtggtggctaaaatcccacctttagtcccagcaacatatgagcatgtcaccaggaggtcttcacaggcctgtctgccacctgagtgtagacatcttttggccctggagcccagagaggctgaatgtggagagggtggagagaggtctgtagtcctcagagaagacttgcagctttttcagagccaccaacccataaaaaaaaaaatccccaaacagaaaaatcctaactgtggtgaccaggtacctcctgagacatgaagcctccacttacctggaccctggaggcctctccgggcacagctgccaatgttgatcttagataagaccaccagcaagtaaacatccactgtgcaaagctgtgttatctttggggaactgaaatgtcccctgggagttggaaactcccctagccacataccacagagttgaggaaggaagagctgatggacggaagaaccatggcgggaggagtcatccggaagctacctcgctgccctgtcagttacggaacagaggagagatgccggctggaggacacagcaaatttgaaccaagaggagcttggaggaagcccgagcgacctggaggggactggctgaccttcctcattcttttcaagtgtgaataataaccaagcccagtttggcaactccttgagggtgaggacgaagccccattctcctttttggaacttggtggggctcaggaagcaggttctctccagtcggtggctttcctttctgttgcgggtctcttgagggcctgccttcatgaaggcacatgagtgactcatcatttgtgaattaattgctatatgtgaagggcatctgagaacaaattatcttcatagacttttcattataattttatttgtactgata

SEQ ID NO: 2799 - protein, 40 aa, Homo sapiens
MIYWSSKLWESWGLPFPPVNTCFSSTAEANAGWLITWQTS

SEQ ID NO: 2800 - DNA, 1036 bp, Homo sapiens
gctggggaccaggcggagatccgtactgtggtggcactcatgcacctgttgttggtagtgaacttctggctgccattcagtcagcagctgttaactactaaggtgccaggacaaaatgaaatgcaaccaagaagtcatgccccatcacaaagtgcaatttgaggaaaacaagaaggcagatgttttgccattgagccagaattaagttttcttctaggactatcaaggactatgtggatctgacaggcacttctgctcagctctcctctagagactcctagaacatcatcgtttcctgatttctttgctggctgcttttataaccaaactccaaacatcaaaattatcatcttagtcctgggtgttctgtcctaatgtgttaactgcaaaaatgacctcaattcttaggaacttctgccatcagtagctggagtctattgggtttcaagtctgggcctcaagaggcattgcaaactttcatcctctcttttgagatttcagcaccatcaccaaatgaacaagtcccaggtagcctgctggaggatgtacaaccatgtggaacgccgatgagccatcacagctgagttgttttggacctgctagctctaaaccaatgtcgcagctgtctgtagaagcacgaatgagatatggccaagctccattgagcctggcccagataagcagaactgtttcacggagcccaggacaaattgccaaaccccagtattgtgtattcaataatttctagttgttctaagccactaagtttcagggtgacttgttaagtggttataactacctaataagtacattttgtatttcctttttattatcatctaccatagcctgttattattttctttgtttgtttatttatttattagctgtttctctgcaaatgtaggacaattgcattgtcttgtcctctgatgtattcaaaacagttggtgactggcacgtcaaagacacttattgaaaagttactgaataaatgaacacatgattggatgaataaatgtttataggtaaaacttcc

SEQ ID NO: 2801 - protein, 40 aa, Homo sapiens
MHLLLVVNFWLPFSQQLLTTKVPGQNEMQPRSHAPSQSAI

SEQ ID NO: 2802 - DNA, 2090 bp, Homo sapiens
ccgcaccgagcactctttcgcccggcctccggttctcgccggctctcggacccgcctccgaagacgtggagcgctgcggcggctgatttgtcaaagatgaaagtgaccttatcagctttggatacttctgagagttctttcacacctttggtggtcatagaacttgctcaggatgtcaaagaagaaaccaaagaatggctgaaaaacagaattatagctaaaaaaaaagatggaggtgcccagttgttgtttagaccattgttaaataaatatgaacaagaaacactagaaaatcagaacttatatcttgttggtgcctccaagattagaatgttactaggggcagaagcagtgggattggtaaaagagtgcaatgataacaccatgagagccttcacatacagaaccagacagaacttcaaaggttttgatgataacaatgatgatttcctgacaatggcagaatgtcaattcattatcaaacatgaacttgaaaatcttagagctaaagatgaaaaaatgatccctggttaccctcaggcaaagttgtatccaggaaaatcattgttgagaagattgctcacgtctggcatcgtgattcaggtgtttccactgcatgacagtgaagccctgaagaagcttgaggacacctggtacactcggtttgctttgaagtatcagcccatagagaatcacagattggaatctgcctatcagaaccatctaattctgaaagttttagtgttcaacttcctcaattgctttgcctcactcttctatattgcctttgtcttgaaagatatgaagcttttgcgccagagcttggccactctcctaattacctcccagatcctcaaccaaattatggaatcttttcttccttattggctccaaaggaagcatggtgtgcgggtgaagaggaaggtgcaggctttaaaggcagacattgatgctacattatatgaacaagtcatcctggaaaaagaaatgggaacttatttgggcacctttgatgattacttggagttattcctgcagtttggttatgtgagccttttctcctgtgtttacccattagcagctgcctttgctgtgttaaataacttcactgaagtaaattcagatgccttaaaaatgtgcagggtcttcaaacgtccattctcagaaccttcagccaatattggtgtgtggcagttggcttttgaaacgatgagtgttatatctgtggtcactaactgtgcgctgattggaatgtcaccacaagtgaatgcagtctttccagaatcaaaagcagacctcattttgattgtagtagcagtggagcacgcactcctggctttaaagtttatacttgcatttgccatacctgataagccacggcatatccagatgaaactagccagactggaatttgagtctttggaggcactcaagcagcagcaaatgaagctcgtgaccgagaacctgaaggaggaaccaatggaaagcgggaaggagaaggcaacctgagtgcccagcgtgcccagctgccctgttggcagaggcctgtgtctgtgccacacctgccacggtggcagggggggtacccggggcagcatcgtggctcctgaacccagacccaatgcttagccaaacgaagtggctcccatgtggcaagcacccttctcagtttcgcagtggcttggctcgggatccttggcagttcccccagccccaccctgtctgctccttcccagttccttcccgggccccacacgctgctccagctgccaactttgctgcagagccactgccgcccttgagcctctcaccatgagtgagccaccagctctccacgttcccctcatagcagtgtcactcccaaccccaccatggcccagggacccgtggacaggttggggatggggtgtgtgcccactgtgctcatcacaggagcctcagttgagagtgagcggggtacagtaaggcagtgcttcccacactggacctctttcctggttctcttttgcaatacattaacagaccctttatcaacataaacaatagtaactgagctattaaaggcaacctctctgactccttctgcctac

SEQ ID NO: 2803 - protein, 470 aa, Homo sapiens
MKVTLSALDTSESSFTPLVVIELAQDVKEETKEWLKNRIIAKKKDGGAQLLFRPLLNKYEQETLENQNLYLVGASKIRMLLGAEAVGLVKECNDNTMRAFTYRTRQNFKGFDDNNDDFLTMAECQFIIKHELENLRAKDEKMIPGYPQAKLYPGKSLLRRLLTSGIVIQVFPLHDSEALKKLEDTWYTRFALKYQPIENHRLESAYQNHLILKVLVFNFLNCFASLFYIAFVLKDMKLLRQSLATLLITSQILNQIMESFLPYWLQRKHGVRVKRKVQALKADIDATLYEQVILEKEMGTYLGTFDDYLELFLQFGYVSLFSCVYPLAAAFAVLNNFTEVNSDALKMCRVFKRPFSEPSANIGVWQLAFETMSVISVVTNCALIGMSPQVNAVFPESKADLILIVVAVEHALLALKFILAFAIPDKPRHIQMKLARLEFESLEALKQQQMKLVTENLKEEPMESGKEKAT

SEQ ID NO: 2804 - DNA, 2735 bp, Homo sapiens
gaccgcatctaggccccgccgcgtccgccacgcccagcgctcggcggcgcccgccccactggcctggcccgccccccgcaccgagcactctttcgcccggcctccggttctcgccggctctcggacccgcctccgaagacgtggagcgctgcggcggctgatttgtcaaagatgaaagtgaccttatcagctttggatacttctgagagttctttcacacctttggtggtcatagaacttgctcaggatgtcaaagaagaaaccaaagaatggctgaaaaacagaattatagctaaaaaaaaagatggaggtgcccagttgttgtttagaccattgttaaataaatatgaacaagaaacactagaaaatcagaacttatatcttgttggtgcctccaagattagaatgttactaggggcagaagcagtgggattggtaaaagagtgcaatgataacaccatgagagccttcacatacagaaccagacagaacttcaaaggttttgatgataacaatgatgatttcctgacaatggcagaatgtcaattcattatcaaacatgaacttgaaaatcttagagctaaagatgaaaaaatgatccctggttaccctcaggcaaagttgtatccaggaaaatcattgttgagaagattgctcacgtctggcatcgtgattcaggtgtttccactgcatgacagtgaagccctgaagaagcttgaggacacctggtacactcggtttgctttgaagtatcagcccatagacagtattcgtggctactttggggaaacaattgctctgtactttggatttttggagtatttcacttttgcattaatccccatggctgtcattgggttaccttactacttgtttgtgtgggaagactatgacaagtacgtgatctttgcctcgttcaacctcatctggtccacggtgattctggaactgtggaagcgtggctgtgccaacatgacctacaggtgggggacactgctcatgaagagaaagtttgaggagccccggccaggatttcatggtgtcttgggtatcaattccatcactgggaaggaggagcctctgtaccccagctacaagagacagttgcgcatttacctggtctccctgccattcgtgtgcctctgcctctatttctcactgtatgtcatgatgatttacttcgacatggaggtttgggccttgggtctacatgagaacagcgggtctgagtggaccagtgtcctgttgtatgtgcccagcatcatctatgccattgtgattgagatcatgaatcgtctctatcgatatgctgccgagtttttaacttcatgggagaatcacagattggaatctgcctatcagaaccatctaattctgaaagttttagtgttcaacttcctcaattgctttgcctcactcttctatattgcctttgtcttgaaagatatgaagcttttgcgccagagcttggccactctcctaattacctcccagatcctcaaccaaattatggaatcttttcttccttattggctccaaaggaagcatggtgtgcgggtgaagaggaaggtgcaggctttaaaggcagacattgatgctacattatatgaacaagtcatcctggaaaaagaaatgggaacttatttgggcacctttgatgattacttggagttattcctgcagtttggttatgtgagccttttctcctgtgtttacccattagcagctgcctttgctgtgttaaataacttcactgaagtaaattcagatgccttaaaaatgtgcagggtcttcaaacgtccattctcagaaccttcagccaatattggtgtgtggcagttggcttttgaaacgatgagtgttatatctgtggtcactaactgtgcgctgattggaatgtcaccacaagtgaatgcagtctttccagaatcaaaagcagacctcattttgattgtagtagcagtggagcacgcactcctggctttaaagtttatacttgcatttgccatacctgataagccacggcatatccagatgaaactagccagactggaatttgagtctttggaggcactcaagcagcagcaaatgaagctcgtgaccgagaacctgaaggaggaaccaatggaaagcgggaaggagaaggcaacctgagtgcccagcgtgcccagctgccctgttggcagaggcctgtgtctgtgccacacctgccacggtggcagggggggtacccggggcagcatcgtggctcctgaacccagacccaatgcttagccaaacgaagtggctcccatgtggcaagcacccttctcagtttcgcagtggcttggctcgggatccttggcagttcccccagccccaccctgtctgctccttcccagttccttcccgggccccacacgctgctccagctgccaactttgctgcagagccactgccgcccttgagcctctcaccatgagtgagccaccagctctccacgttcccctcatagcagtgtcactcccaaccccaccatggcccagggacccgtggacaggttggggatggggtgtgtgcccactgtgctcatcacaggagcctcagttgagagtgagcggggtacagtaaggcagtgcttcccacactggacctctttcctggttctcttttgcaatacattaacagaccctttatcaacataaacaatagtaactgagctattaaaggcaacctctctgactccttctgcctac

SEQ ID NO: 2805 - protein, 660 aa, Homo sapiens; identical to SEQ ID NO: 234

SEQ ID NO: 2806 - DNA, 272 bp, Homo sapiens
gaaaaaatgatccctggttaccctcaggcaaagttgtatccaggaaaatcattgttgagaagattgctcacgtctggcatcgtgattcaggtgtttccactgcatgacagtgaagccctgaagaagcttgaggacacctggtacactcggtttgctttgaagtatcagcccatagatggagtcttgctctgtggcccatgccggagtgcaatggtgtgatctcagttcactgcaatctccacttcccaggttcaagtgattttcctgcctca

SEQ ID NO: 2807 - protein, 70 aa, Homo sapiens
MIPGYPQAKLYPGKSLLRRLLTSGIVIQVFPLHDSEALKKLEDTWYTRFALKYQPIDGVLLCGPCRSAMV

SEQ ID NO: 2808 - DNA, 659 bp, Homo sapiens
agcgccgccccttcctacggctacgggaaggatcgtccagtggctgaggctggacagagcacaggaattcctggttgtttcatgaaagggccgtatattcaaagtgacctccaaatacagaaggagctgagaaactaaagaatgaaggagacaaatccagcttgtcagcaaaaggtgatttattagggaacttacggacagaagcatggtcttggacagcagcaagacaggaagcccatgccatgtcctgaggacgggtgagcagcctggtggagagatctatctggtggggaactgagactgcctgcagtcatgtgagggagccaccttagaggcagaccctccagcctgagtcaagccttcagatgactgcaggtgacatcttgaccacaacctcaggatcaattctgagccagaaccactcagctaagccactcccacattcctgtcagaaactgagtgacataatgactctgtggtttttaggctgctatatctgggagcaatatgttcaacaggagtggtacctaccttgagtattaataattgttgagagtcacctttctcaccccttcacttgatggcgctgtggtgcaactgcaaactcctgtggcaacgacttgtctcgctgtacagcagacaaaagataaaaagcaaga

SEQ ID NO: 2809 - protein, 30 aa, Homo sapiens
MVLDSSKTGSPCHVLRTGEQPGGEIYLVGN

SEQ ID NO: 2810 - DNA, 1440 bp, Homo sapiens
agtgcgcggaagacgcatgcgctggcggcctgcgccgccttaagtgccgcgccagcccggggcggcccagtcggcctgtcagccggcttcgagataagtcccggcgcttgcgcggcggcggctatggcggcggaggaggaggaggtggactctgccgacaccggagagaggtcaggatggctaactggttggctccccacatggtgccctacgtctatatcacaccttaaagaagctgaagagaagatgttaaaatgtgtgccttgcacatacaaaaaagaacctgttcgtatatctaatggaaataaaatatggacactgaagttctctcataatatttcaaataagactccacttgtccttctccatggttttggaggaggtcttgggctctgggcactgaattttggagatctttgcaccaacagacctgtctatgcttttgacctattgggttttggacgaagtagtagacccaggtttgacagtgatgcagaagaagtggagaatcagtttgtggaatccattgaagagtggagatgtgccctaggattggacaaaatgatcttgcttgggcacaacctaggtggattcttggctgctgcttactcgctgaagtacccatcaagggttaatcatctcattttagtggagccttggggtttccctgaacgaccagaccttgctgatcaagacagaccaattccagtttggatcagagccttgggagcagcattgactccctttaaccctttagctggcctaaggattgcaggaccctttggtttaagtctagtgcagcgtttaaggcctgatttcaaacgaaagtattcttcaatgttcgaagacgatactgtgacagaatacatctaccactgtaatgtgcagactccaagtggtgagacagctttcaagaatatgactattccttatggatgggcaaaaaggccaatgctccagcgaattggtaaaatgcaccctgacattccagtttcagtgatctttggcgcccgatcctgcatagatggcaattctggcaccagcatccagtccttacgaccacattcatatgtgaagacaatagctattcttggggcaggacattatgtatatgcagatcaaccagaagaattcaaccagaaagtaaaggagatctgcgacactgtggactgaacacactgaagctctgatgggaaaacctggtgactgatatagttgttcagcaataattcatagtctgtgatgaagagtagtgaatacaacacacaaccaggcagccttcttgactatactttgcacatgttttctttaggaattcactcacacatttaaaccagttagtgccttctagaagaatggctttcctttctcctacacaaaattgaaatatacaagtctctaaatataatacctttaaataaaaggttatttgtccctctg

SEQ ID NO: 2811 - protein, 349 aa, Homo sapiens; identical to SEQ ID NO: 236

SEQ ID NO: 2812 - DNA, 1253 bp, Homo sapiens
agtgcgcggaagacgcatgcgctggcggcctgcgccgccttaagtgccgcgccagcccggggcggcccagtcggcctgtcagccggcttcgagataagtcccggcgcttgcgcggcggcggctatggcggcggaggaggaggaggtggactctgccgacaccggagagaggtcaggatggctaactggttggctccccacatggtgccctacgtctatatcacaccttaaagaagctgaagagaagatgttaaaatgtgtgccttgcacatacaaaaaagaacctgttcgtatatctaatggaaataaaatatggacactgaagttctctcataatatttcaaataagactccacttgtccttctccatggttttggaggaggtcttgggctctgggcactgaattttggagatctttgcaccaacagacctgtctatgcttttgacctattgggttttggacgaagtagtagacccaggtttgacagtgatgcagaagaagtggagaatcagtttgtggaatccattgaagagtggagatgtgccctaggattggacaaaatgatcttgcttgggcacaacctaggtggattcttggctgctgcttactcgctgaagtacccatcaagggttaatcatctcattttagtggagccttggggtttccctgaacgaccagaccttgctgatcaagacagaccaattccagtttggatcagagccttgggagcagcattgactccctttaaccctttagctggcctaaggattgcaggaccctttggtttaagtctagtgcagcgtttaaggcctgatttcaaacgaaagtattcttcaatgttcgaagacgatactgtgacagaatacatctaccactgtaatgtgcagactccaaggctattcttggggcaggacattatgtatatgcagatcaaccagaagaattcaaccagaaagtaaaggagatctgcgacactgtggactgaacacactgaagctctgatgggaaaacctggtgactgatatagttgttcagcaataattcatagtctgtgatgaagagtagtgaatacaacacacaaccaggcagccttcttgactatactttgcacatgttttctttaggaattcactcacacatttaaaccagttagtgccttctagaagaatggctttcctttctcctacacaaaattgaaatatacaagtctctaaatataatacctttaaataaaaggttatttgtccctctg

SEQ ID NO: 2813 - protein, 278 aa, Homo sapiens
MAAEEEEVDSADTGERSGWLTGWLPTWCPTSISHLKEAEEKMLKCVPCTYKKEPVRISNGNKIWTLKFSHNISNKTPLVLLHGFGGGLGLWALNFGDLCTNRPVYAFDLLGFGRSSRPRFDSDAEEVENQFVESIEEWRCALGLDKMILLGHNLGGFLAAAYSLKYPSRVNHLILVEPWGFPERPDLADQDRPIPVWIRALGAALTPFNPLAGLRIAGPFGLSLVQRLRPDFKRKYSSMFEDDTVTEYIYHCNVQTPRLFLGQDIMYMQINQKNSTRK

SEQ ID NO: 2814 - DNA, 2447 bp, Homo sapiens
agtgcgcggaagacgcatgcgctggcggcctgcgccgccttaagtgccgcgccagcccggggcggcccagtcggcctgtcagccggcttcgagataagtcccggcgcttgcgcggcggcggctatggcggcggaggaggaggaggtggactctgccgacaccggagagaggtcaggatggctaactggttggctccccacatggtgccctacgtctatatcacaccttaaagaagctgaagagaagatgttaaaatgtgtgccttgcacatacaaaaaagaacctgttcgtatatctaatggaaataaaatatggacactgaagttctctcataatatttcaaataagactccacttgtccttctccatggttttggaggaggtcttgggctctgggcactgaattttggagatctttgcaccaacagacctgtctatgcttttgacctattgggttttggacgaagtagtagacccaggtttgacagtgatgcagaagaagtggagaatcagtttgtggaatccattgaagagtggagatgtgccctaggattggacaaaatgatcttgcttgggcacaacctaggtggattcttggctgctgcttactcgctgaagtacccatcaagggttaatcatctcattttagtggagccttggggtttccctgaacgaccagaccttgctgatcaagacagaccaattccagtttggatcagagccttgggagcagcattgactccctttaaccctttagctggcctaaggattgcaggaccctttggtttaagtctagtgcagcgtttaaggcctgatttcaaacgaaagtattcttcaatgttcgaagacgatactgtgacagaatacatctaccactgtaatgtgcagactccaagtggtgagacagctttcaagaatatgactattccttatggatgggcaaaaaggccaatgctccagcgaattggtaaaatgcaccctgacattccagtttcagtgatctttggcgcccgatcctgcatagatggcaattctggcaccagcatccagtccttacgaccacattcatatgtgaagacaatagctattcttggggcaggacattatgtatatgcagatcaaccagaagaattcaaccagaaagtaaaggagatctgcgacactgtggactgaacacactgaagctctgatgggaaaacctggtgactgatatagttgttcagcaataattcatagtctgtgatgaagagtagtgaatacaacacacaaccaggcagccttcttgactatactttgcacatgttttctttaggaattcactcacacatttaaaccagttagtgccttctagaagaatggctttcctttctcctacacaaaattgaaatatacaagtctctaaatataatacctttaaataaaaggttatttgtccctctgatgtactgaaaaactgtaatttttcagctgaaaattttttaatctaactttgctagttatttttatattgcaatctatattaccaatttaggaagtgatttctgagtctcttacactgtaaaggtgcactttattttctttgtcttccccatcatgtatttattgtgtcttgataactgatattaatctaaattcaatgtgtttttatgtaaaaatttgtcagttgtttagaatatttcactttgtttttgaaacggagtgacaaggcagatttttggttagaggacgggagttgatcactatcattactttttctagtttacctgttttttatatttaaggctgctaagccatgttcagcattttaaatgtggtctatcctgacatacagtgtataacaacataactccttggaacctcctatgtgtggtataattctactcttccaaggaacatgacttcaatactttcagtgattcaggtactgaaaagccttacctaaaaggctgttctttgtttccccctttcatactattcttttccatgacccaggatgcagcaaatgaaacagatttcttctcttaaggggatattaagactgttacttcctagtaagccaagtaataccatatttttattaacatctaacttttgtagatgggtgctaaaattgcatacattttaaccactaaaatagaaaaacaagtggtgctattatgtctcatggcaccagaaatgagctagcacttgggtttgttgttgctgttgtttattaagagtattgtgttaattaaatcattacatacttgaagttatattacaaaaattctagaaggttgattgaactatttttttaggaactaccatcaagtgtagcattttcttgcagttttaaaatgaggaaaacttctttgaaactgtgaaatgctccatgtggtaactggctgctgagaaaacccttcaccaaaaaaataaataaaaattgaataggattgtcatcaagaagg

SEQ ID NO: 2815 - protein, 349 aa, Homo sapiens; identical to SEQ ID NO: 236

SEQ ID NO: 2816 - DNA, 2260 bp, Homo sapiens
agtgcgcggaagacgcatgcgctggcggcctgcgccgccttaagtgccgcgccagcccggggcggcccagtcggcctgtcagccggcttcgagataagtcccggcgcttgcgcggcggcggctatggcggcggaggaggaggaggtggactctgccgacaccggagagaggtcaggatggctaactggttggctccccacatggtgccctacgtctatatcacaccttaaagaagctgaagagaagatgttaaaatgtgtgccttgcacatacaaaaaagaacctgttcgtatatctaatggaaataaaatatggacactgaagttctctcataatatttcaaataagactccacttgtccttctccatggttttggaggaggtcttgggctctgggcactgaattttggagatctttgcaccaacagacctgtctatgcttttgacctattgggttttggacgaagtagtagacccaggtttgacagtgatgcagaagaagtggagaatcagtttgtggaatccattgaagagtggagatgtgccctaggattggacaaaatgatcttgcttgggcacaacctaggtggattcttggctgctgcttactcgctgaagtacccatcaagggttaatcatctcattttagtggagccttggggtttccctgaacgaccagaccttgctgatcaagacagaccaattccagtttggatcagagccttgggagcagcattgactccctttaaccctttagctggcctaaggattgcaggaccctttggtttaagtctagtgcagcgtttaaggcctgatttcaaacgaaagtattcttcaatgttcgaagacgatactgtgacagaatacatctaccactgtaatgtgcagactccaaggctattcttggggcaggacattatgtatatgcagatcaaccagaagaattcaaccagaaagtaaaggagatctgcgacactgtggactgaacacactgaagctctgatgggaaaacctggtgactgatatagttgttcagcaataattcatagtctgtgatgaagagtagtgaatacaacacacaaccaggcagccttcttgactatactttgcacatgttttctttaggaattcactcacacatttaaaccagttagtgccttctagaagaatggctttcctttctcctacacaaaattgaaatatacaagtctctaaatataatacctttaaataaaaggttatttgtccctctgatgtactgaaaaactgtaatttttcagctgaaaattttttaatctaactttgctagttatttttatattgcaatctatattaccaatttaggaagtgatttctgagtctcttacactgtaaaggtgcactttattttctttgtcttccccatcatgtatttattgtgtcttgataactgatattaatctaaattcaatgtgtttttatgtaaaaatttgtcagttgtttagaatatttcactttgtttttgaaacggagtgacaaggcagatttttggttagaggacgggagttgatcactatcattactttttctagtttacctgttttttatatttaaggctgctaagccatgttcagcattttaaatgtggtctatcctgacatacagtgtataacaacataactccttggaacctcctatgtgtggtataattctactcttccaaggaacatgacttcaatactttcagtgattcaggtactgaaaagccttacctaaaaggctgttctttgtttccccctttcatactattcttttccatgacccaggatgcagcaaatgaaacagatttcttctcttaaggggatattaagactgttacttcctagtaagccaagtaataccatatttttattaacatctaacttttgtagatgggtgctaaaattgcatacattttaaccactaaaatagaaaaacaagtggtgctattatgtctcatggcaccagaaatgagctagcacttgggtttgttgttgctgttgtttattaagagtattgtgttaattaaatcattacatacttgaagttatattacaaaaattctagaaggttgattgaactatttttttaggaactaccatcaagtgtagcattttcttgcagttttaaaatgaggaaaacttctttgaaactgtgaaatgctccatgtggtaactggctgctgagaaaacccttcaccaaaaaaataaataaaaattgaataggattgtcatcaagaagg

SEQ ID NO: 2817 - protein, 278 aa, Homo sapiens; identical to SEQ ID NO: 2813

SEQ ID NO: 2818 - DNA, 4219 bp, Homo sapiens
agtgcgcggaagacgcatgcgctggcggcctgcgccgccttaagtgccgcgccagcccggggcggcccagtcggcctgtcagccggcttcgagataagtcccggcgcttgcgcggcggcggctatggcggcggaggaggaggaggtggactctgccgacaccggagagaggtcaggatggctaactggttggctccccacatggtgccctacgtctatatcacaccttaaagaagctgaagagaagatgttaaaatgtgtgccttgcacatacaaaaaagaacctgttcgtatatctaatggaaataaaatatggacactgaagttctctcataatatttcaaataagactccacttgtccttctccatggttttggaggaggtcttgggctctgggcactgaattttggagatctttgcaccaacagacctgtctatgcttttgacctattgggttttggacgaagtagtagacccaggtttgacagtgatgcagaagaagtggagaatcagtttgtggaatccattgaagagtggagatgtgccctaggattggacaaaatgatcttgcttgggcacaacctaggtggattcttggctgctgcttactcgctgaagtacccatcaagggttaatcatctcattttagtggagccttggggtttccctgaacgaccagaccttgctgatcaagacagaccaattccagtttggatcagagccttgggagcagcattgactccctttaaccctttagctggcctaaggattgcaggaccctttggtttaagtctagtgcagcgtttaaggcctgatttcaaacgaaagtattcttcaatgttcgaagacgatactgtgacagaatacatctaccactgtaatgtgcagactccaagtggtgagacagctttcaagaatatgactattccttatggatgggcaaaaaggccaatgctccagcgaattggtaaaatgcaccctgacattccagtttcagtgatctttggcgcccgatcctgcatagatggcaattctggcaccagcatccagtccttacgaccacattcatatgtgaagacaatagctattcttggggcaggacattatgtatatgcagatcaaccagaagaattcaaccagaaagtaaaggagatctgcgacactgtggactgaacacactgaagctctgatgggaaaacctggtgactgatatagttgttcagcaataattcatagtctgtgatgaagagtagtgaatacaacacacaaccaggcagccttcttgactatactttgcacatgttttctttaggaattcactcacacatttaaaccagttagtgccttctagaagaatggctttcctttctcctacacaaaattgaaatatacaagtctctaaatataatacctttaaataaaaggttatttgtccctctgatgtactgaaaaactgtaatttttcagctgaaaattttttaatctaactttgctagttatttttatattgcaatctatattaccaatttaggaagtgatttctgagtctcttacactgtaaaggtgcactttattttctttgtcttccccatcatgtatttattgtgtcttgataactgatattaatctaaattcaatgtgtttttatgtaaaaatttgtcagttgtttagaatatttcactttgtttttgaaacggagtgacaaggcagatttttggttagaggacgggagttgatcactatcattactttttctagtttacctgttttttatatttaaggctgctaagccatgttcagcattttaaatgtggtctatcctgacatacagtgtataacaacataactccttggaacctcctatgtgtggtataattctactcttccaaggaacatgacttcaatactttcagtgattcaggtactgaaaagccttacctaaaaggctgttctttgtttccccctttcatactattcttttccatgacccaggatgcagcaaatgaaacagatttcttctcttaaggggatattaagactgttacttcctagtaagccaagtaataccatatttttattaacatctaacttttgtagatgggtgctaaaattgcatacattttaaccactaaaatagaaaaacaagtggtgctattatgtctcatggcaccagaaatgagctagcacttgggtttgttgttgctgttgtttattaagagtattgtgttaattaaatcattacatacttgaagttatattacaaaaattctagaaggttgattgaactatttttttaggaactaccatcaagtgtagcattttcttgcagttttaaaatgaggaaaacttctttgaaactgtgaaatgctccatgtggtaactggctgctgagaaaacccttcaccaaaaaaataaataaaaattgaataggattgtcatcaagaaggcatctttcgctaacgttgcttgtctaggagaaaggtagctatgtaaataaaaacagtgaactagagcaaatagtggtttaatggttttgttattgcatttttaaaatggttaattagggaatttgtagttgttaggaaatgtaaggttgtgtcactgttgattaactgccagaaagactgaatgttctattttcaacatttctcccctataaaagaatagacaaattatactgaagcatgatataaacatcttcccaatgaacaatttgtctcacttgtcagattaactaggttagtgcaggaagcaacatgagcgccaagatgtgttgtctgatttctctaccttaagaacaataatagtctttttagttagtattttggatggccaggtttcaaacctgtatgtggtacaaataatttgggtaatatttttgtatttttgttttacacactctctaatctcaattatcctttgctgggagaatgacaggtttcacttatacaggaaggtttttgcacaggaaatttggtcccagcccttggaaggaagaagttccttcgtttacttagtgaatggagtttctggccgcagatgtgccaagtgattgaagaaagatataccccaatatcaagtgataatttattttcctacagactgaatttgctttatttgaaagatgttgtaactctttttaaagttagattttaccctgaggtatagtatatgtaattttgtgaagattgagctggaagggaagttcacaatcctcacatttaaaaaaatatagtgggtgctaaatgttttcttaaaaatctagtacagcatttgatctttgttatgcacagcatacttttattttacagaataaattttcctgtgatagtcacaacaagacagctgtatagtttcttgagtcttttgtatggaccagtctctgtataatagttaactacaggactgtggatccagcaaatgttcagtaaatgctgctgttgttcttagggaaggctactctgggtgttgtggccgccatacatggctttacctgggtccatgcattcccttaagatgacttctgttttcttcttttttcttctgattttccaaaaaaaaaaaagccttgcctaaggttggttttagaatatgatttgcagaacacttttgaaatgtcttcattcatatatgtaatatatatttatacttaaagggccatacgcgatttcaataaaacaagaagtactggaaagaataaacaaaaatagccagaagatgcctagaaaagaacaatgtggaaggagggataaccctattaaatattataacataatgtttacaatatgagaaagtctaggaatttagtacatgataaagcatctcattcagagaaaaaggctttaaaaatggtgttgagagaagtgtggttaaccatttggaaaaaaaaataaaattgaatcgatttctcacaggatacacaggataaaatctgaatagaacaaagacccaatttttaaaatgaaaccctctttctaactagaagaaaacatagatgaattattgtataatctgacagtgagaaaaactttcctaggactgaaaattcagaagcaataaaaagagaagtctatagaagaattttcagccagatggaatggctcatggctgtaatcccagcattttgggaggctgaggcagaaggactgcttgagaccaggaattcaaaaccaacctgggcaacctagtaggactggctctaccaaaaaaaaaaaaaaaa

SEQ ID NO: 2819 - protein, 349 aa, Homo sapiens; identical to SEQ ID NO: 236

SEQ ID NO: 2820 - DNA, 4032 bp, Homo sapiens
agtgcgcggaagacgcatgcgctggcggcctgcgccgccttaagtgccgcgccagcccggggcggcccagtcggcctgtcagccggcttcgagataagtcccggcgcttgcgcggcggcggctatggcggcggaggaggaggaggtggactctgccgacaccggagagaggtcaggatggctaactggttggctccccacatggtgccctacgtctatatcacaccttaaagaagctgaagagaagatgttaaaatgtgtgccttgcacatacaaaaaagaacctgttcgtatatctaatggaaataaaatatggacactgaagttctctcataatatttcaaataagactccacttgtccttctccatggttttggaggaggtcttgggctctgggcactgaattttggagatctttgcaccaacagacctgtctatgcttttgacctattgggttttggacgaagtagtagacccaggtttgacagtgatgcagaagaagtggagaatcagtttgtggaatccattgaagagtggagatgtgccctaggattggacaaaatgatcttgcttgggcacaacctaggtggattcttggctgctgcttactcgctgaagtacccatcaagggttaatcatctcattttagtggagccttggggtttccctgaacgaccagaccttgctgatcaagacagaccaattccagtttggatcagagccttgggagcagcattgactccctttaaccctttagctggcctaaggattgcaggaccctttggtttaagtctagtgcagcgtttaaggcctgatttcaaacgaaagtattcttcaatgttcgaagacgatactgtgacagaatacatctaccactgtaatgtgcagactccaaggctattcttggggcaggacattatgtatatgcagatcaaccagaagaattcaaccagaaagtaaaggagatctgcgacactgtggactgaacacactgaagctctgatgggaaaacctggtgactgatatagttgttcagcaataattcatagtctgtgatgaagagtagtgaatacaacacacaaccaggcagccttcttgactatactttgcacatgttttctttaggaattcactcacacatttaaaccagttagtgccttctagaagaatggctttcctttctcctacacaaaattgaaatatacaagtctctaaatataatacctttaaataaaaggttatttgtccctctgatgtactgaaaaactgtaatttttcagctgaaaattttttaatctaactttgctagttatttttatattgcaatctatattaccaatttaggaagtgatttctgagtctcttacactgtaaaggtgcactttattttctttgtcttccccatcatgtatttattgtgtcttgataactgatattaatctaaattcaatgtgtttttatgtaaaaatttgtcagttgtttagaatatttcactttgtttttgaaacggagtgacaaggcagatttttggttagaggacgggagttgatcactatcattactttttctagtttacctgttttttatatttaaggctgctaagccatgttcagcattttaaatgtggtctatcctgacatacagtgtataacaacataactccttggaacctcctatgtgtggtataattctactcttccaaggaacatgacttcaatactttcagtgattcaggtactgaaaagccttacctaaaaggctgttctttgtttccccctttcatactattcttttccatgacccaggatgcagcaaatgaaacagatttcttctcttaaggggatattaagactgttacttcctagtaagccaagtaataccatatttttattaacatctaacttttgtagatgggtgctaaaattgcatacattttaaccactaaaatagaaaaacaagtggtgctattatgtctcatggcaccagaaatgagctagcacttgggtttgttgttgctgttgtttattaagagtattgtgttaattaaatcattacatacttgaagttatattacaaaaattctagaaggttgattgaactatttttttaggaactaccatcaagtgtagcattttcttgcagttttaaaatgaggaaaacttctttgaaactgtgaaatgctccatgtggtaactggctgctgagaaaacccttcaccaaaaaaataaataaaaattgaataggattgtcatcaagaaggcatctttcgctaacgttgcttgtctaggagaaaggtagctatgtaaataaaaacagtgaactagagcaaatagtggtttaatggttttgttattgcatttttaaaatggttaattagggaatttgtagttgttaggaaatgtaaggttgtgtcactgttgattaactgccagaaagactgaatgttctattttcaacatttctcccctataaaagaatagacaaattatactgaagcatgatataaacatcttcccaatgaacaatttgtctcacttgtcagattaactaggttagtgcaggaagcaacatgagcgccaagatgtgttgtctgatttctctaccttaagaacaataatagtctttttagttagtattttggatggccaggtttcaaacctgtatgtggtacaaataatttgggtaatatttttgtatttttgttttacacactctctaatctcaattatcctttgctgggagaatgacaggtttcacttatacaggaaggtttttgcacaggaaatttggtcccagcccttggaaggaagaagttccttcgtttacttagtgaatggagtttctggccgcagatgtgccaagtgattgaagaaagatataccccaatatcaagtgataatttattttcctacagactgaatttgctttatttgaaagatgttgtaactctttttaaagttagattttaccctgaggtatagtatatgtaattttgtgaagattgagctggaagggaagttcacaatcctcacatttaaaaaaatatagtgggtgctaaatgttttcttaaaaatctagtacagcatttgatctttgttatgcacagcatacttttattttacagaataaattttcctgtgatagtcacaacaagacagctgtatagtttcttgagtcttttgtatggaccagtctctgtataatagttaactacaggactgtggatccagcaaatgttcagtaaatgctgctgttgttcttagggaaggctactctgggtgttgtggccgccatacatggctttacctgggtccatgcattcccttaagatgacttctgttttcttcttttttcttctgattttccaaaaaaaaaaaagccttgcctaaggttggttttagaatatgatttgcagaacacttttgaaatgtcttcattcatatatgtaatatatatttatacttaaagggccatacgcgatttcaataaaacaagaagtactggaaagaataaacaaaaatagccagaagatgcctagaaaagaacaatgtggaaggagggataaccctattaaatattataacataatgtttacaatatgagaaagtctaggaatttagtacatgataaagcatctcattcagagaaaaaggctttaaaaatggtgttgagagaagtgtggttaaccatttggaaaaaaaaataaaattgaatcgatttctcacaggatacacaggataaaatctgaatagaacaaagacccaatttttaaaatgaaaccctctttctaactagaagaaaacatagatgaattattgtataatctgacagtgagaaaaactttcctaggactgaaaattcagaagcaataaaaagagaagtctatagaagaattttcagccagatggaatggctcatggctgtaatcccagcattttgggaggctgaggcagaaggactgcttgagaccaggaattcaaaaccaacctgggcaacctagtaggactggctctaccaaaaaaaaaaaaaaaa

SEQ ID NO: 2821 - protein, 278 aa, Homo sapiens; identical to SEQ ID NO: 2813

SEQ ID NO: 2822 - DNA, 420 bp, Homo sapiens
taacttattggagcaatgccattggtgccacacctggatggccttgctgggccagcttctcttggtgttggctgccaactagttcacaccagccttctcctgaggaatgctcttggctgatgagagcactcatacctggagaagtaatctggaagggaaagtcaaggaaaccttgctgactaagtagacagtatgaaaaacactggtgagagactttggacttcctggatctgtcttccatctaatagatattccagaaagagagactttaaggttttcttttttgttttaatggagaatagaaaataatcccttttttttttgagacggagtctcgatctgttgcccagctgagatcgtgccattgcactccagtctgggtaagaagagtgaaactccgtctcaataaataaataaata

SEQ ID NO: 2823 - protein, 38 aa, Homo sapiens
MKNTGERLWTSWICLPSNRYSRKRDFKVFFFVLMENRK

SEQ ID NO: 2824 - DNA, 410 bp, Homo sapiens
cagggctggagagccagcctgaaggccctgggacccttctatccacatagcaggagaaaagtcagctatgccaagaaaaggctggttgggtatccgagatcacatgccaagttttgcaggctgtacaagaagcatgaagccagtatccttcactcatggcagaaggagaaagggagccagcatttcacatggcaagagaagaggacagagaaggggagaggaaggaagcaccagaaaatttacagcttaaaacaagaaaacgtattatctcacatgatctgtagatcaggaatctggtcacagcttagatgggtcctctgtttaggatctcacaaggcttcagtcaaggtgtcatccaagttaggttttcatctgaaggctcatctgtgaaagaatctgcttccaagttc

SEQ ID NO: 2825 - protein, 60 aa, Homo sapiens
MPRKGWLGIRDHMPSFAGCTRSMKPVSFTHGRRRKGASISHGKRRGQRRGEEGSTRKFTA

SEQ ID NO: 2826 - DNA, 738 bp, Homo sapiens
cgaaatacagggaggctagccaaggggaagacacaggcaatgataattgtcatgtactcttttctgagcaacagctccctcacatagagcaggaatcccgtggctctttaaggaggaggtataagacactgattctgaatcgaccctacaagggctggggtggcaggcattccaggcagatcttagatgatgaggcttagagaggcccaaggttacgcagctcaaacatgaaagagacggggttggaacgtggctccacctgacttccaagggcagcatgtctcttattgcaccacaaggctgcccgtgatgctgttgcctccagctctggcagggcaacatggagtcctgacccacaaacagtcctgtccttctcttatcactgctgaagctccaggactcagccattatgaaatccaaccaagcttctggtgccagcatctgaggacagctctcaggctgctgaaacccactttgcctgtgtgcatggagagctggaaatgcctgggatgtgcctcttcctggggctacctgtgactaatgactgatcaatccccagcttcccccacccccagacactctgaggtgtcacctgccctatctccagagctcacctgggggaaacagccaaagttaccctccaggcaggatgtcacactcctgcttcttggtcctactttcccacttgcctacccgtttttccagggaacaattgctaataaatctttttcaaatgaa

SEQ ID NO: 2827 - protein, 75 aa, Homo sapiens [sequence omitted]

SEQ ID NO: 2828 - DNA, 594 bp, Homo sapiens
agatggaaatgcagaaatcacccgtcttctccgtcgctcacgctgggagctgtagactggagctgttcctattcggccatcttggctcctccctccatcggtaaaccaactctttaacaaaggggagctgaggctctgtggctggaacctgggacttaggcctgaattaatcagagcaatgcactccactggccatggaggtggaagttgtattcacaagctctaaatgtcagccttcatctttagacctagtggaaagcaaagaagacaaaacgtgatgcaatgaaccttgttatggtacccaaaatatggggatctagcttctgttagcatgcctgcatccctgtcttggccccactgatgaggagcaggcaagatagggattctgagtatgaaggaagttactgaagcaattaacaatcagagtgtctgattagtgctataatttcaaatgtaaacaacaacaaaaaaccttttagatttcaggtgagaattgcactcttcaaagatggttcctctctgtggctgtagttagtgtagtgaattggatattcttggattgagtcaattttatatctcaagtatatttttctt

SEQ ID NO: 2829 - protein, 33 aa, Homo sapiens
MEMQKSPVFSVAHAGSCRLELFLFGHLGSSLHR

SEQ ID NO: 2830 - DNA, 836 bp, Homo sapiens
gctcttagaagaccagccacttttgtccctgcagcccggggccacagagccagacaccagacccacagcagcccgggaagtaacggtcgctctgtctcgtctgggaagatctccgttgccagggcttgctggacccgcccccgcacagcttcccagcagtcccgattccgcctgaggctccagaaggcgaagctgtacaggaggccacttttcttctcagcctagaactcgagagacctgaaaggaaggacgactggccacaggagatgtttcacagagccgctgaatgaacaacacagtcaattctgatcaactttccagtgctatctgggtgtaagtgagtggccctggaggtgggtgcctctccccggcgcagtttttccttccatcacaagcatggctgaagctgggtggtggtgcatacagattccagccagcaaggaggggaaagagagttcagaggactcacctccactgtccccgacccaggcctgtagcatctatattggctcctctcaggttccacagccaaaagcctagtcccaagggagtgctacagagaagaaaaaatcatcacaaaacagggcattaaaactctggggacacgaatctgaaaccaccacatcacccctccttaatttcagagtctccctccccagccaggcttggagggaaatgtggaacatcactctgggaatcccttccggacaccattatgttctagttactgcctacgaggacctacttggtatttctcatcttaccctgattgcattcaaaacttgattagattctattgatcctgtcataaaaaaataaagctggtctgcttttcc

SEQ ID NO: 2831 - protein, 47 aa, Homo sapiens [sequence omitted]

SEQ ID NO: 2832 - DNA, 396 bp, Homo sapiens
caggagatgtttcacagagccgctgaatgaacaacacagtcaattctgatcaactttccagtgctatctggggggatttgtaaactcggcgaggagagcatttgtaaaagggttaagtaccccagttttctaactgaattactacaccattaaaatgagctccgcacaacatggcagcaaataggcttctgtctgagagacagagaagggtgtatatggcttctttaccaaatcggagagctgaaaacccaagcagagtcacgtcctaggagtaggcactgaccgccacagtcacctgcccgtcctgtcaagcaacttttcccagctaacctgagttcccatcctaattctttaaagcactgaaaagtttttgaaaagaaagacacaagaaatatt

SEQ ID NO: 2833 - protein, 32 aa, Homo sapiens
MAANRLLSERQRRVYMASLPNRRAENPSRVTS

SEQ ID NO: 2834 - DNA, 5651 bp, Homo sapiens
atggctcatttaatttctgacaccaaagagggtaggactgggaaacatggtatcggagtgagccagatgttgtggcgtatcgcagaactagaacgtcacggcttagcaatggttcctccctttgcttggatatgtttgcctcaaagcttctctgagtccacgggacaagttgcctctagtggggaagatcaagctcaaaaagctttttgggaacttgaaagagcaacagaactgctccctgaaaacaagttgccacaaactttcaccttcagcaaacagaaagtcataggaaagcacatagttgctccgcttccgtccctgccccgcgccctggggaagcgccagggggagtcctcgccggccagggcttcccgtgccccgggagcatcgagggccagcttggtggagcttagcacagcttgctcggcgctgcgagcgggcgggggtggacactgggcttctgtgtgccagtcgcagccgttggctggcgggcacccaatcccagggcatgccgccggagcctggccaggacgcacggtgaaagacgagtttggtggcaggcttgaccccccggctgccagcagaagccggcgtcgggagcccaggcgggcaggccgctggggtcggggctgcacgtacgagagccgggacgcccgggttcagagcgaaggaggaggcatggcttcggtgttcatgtgtggcgtggaggacctgctgttcagcggcagccgcttcgtatggaacttgaccgtgtccacgctgcggagatggtacacggagaggctgcgggcttgccaccaggtgctgcggacgtggtgcgggctgcaggacgtgtaccagatgacagaaggcaggcactgccaggtgcacctcctggatgataggagactggagctgctggttcagcccaaacttctagcaagagagttgctggacctagtggcttcacatttcaacctgaaagaaaaggagtattttggaataacattcatagatgacacaggtcagcagaactggctgcagttagatcaccgagttcttgaccacgatttgcccaagaaaccaggcccaaccattttgcactttgctgtgaggttttacattgagagcatatcgtttttaaaggataaaaccaccgtggagctgtttttcctgaatgcaaaggcctgtgtgcacaaggggcaaatcgaagtagagagcgaaaccatcttcaagttagcagcgtttattttacaggaagccaagggagattataccagtgatgaaaatgccaggaaagatttaaagacattaccagcctttccaaccaaaactcttcaggagcatccatcccttgcctactgtgaggacagggtaattgagcattatttgaaaatcaaaggtctcactcgaggtcaagctgtggttcagtatatgaaaatagtagaagctctaccgacttacggtgtccattattatgcagtaaaggataagcaaggacttccttggtggcttggaataagctataagggaattggccaatatgatatacaagacaaggtgaagcctcggaagttattccaatggaaacagctggagaacttatatttccgtgagaaaaaatttgctgttgaagttcatgatccacgaaggatttcagtttcaagaagaacctttgggcaaagtggcttgtttgtgcaaacatggtatgctaactcttctctcatcaagtccatttgggtaatggcaattagtcagcatcagttttacttggaccggaagcaaagcaaagcaaaaattccttcagccaggagtttagatgagattgcaatggatttgacagagacaggaacacaaagggcctccaagctggtgacactggagacgaaaagtcagttcatcatggcaagtaatggcagtttaatctcctcaggttctcaagactcagaagttagtgaagagcaaaagagagaaaaaatccttgaactaaagaagaaggagaaactattacaagaaaaacttctgaaaaaagttgaggagcttaagaagatctgtctgcgggaggctgagctcacaggcaaaatgccaaaggagtatcccctgaacataggcgagaagcctcctcaggtcagaagacgtgtgggtactgcgttcaaattagatgacaacttgctgccgagtgaagaagatcctgctttgcaagaactggagagtaattttctaatacaacaaaagctggtggaagctgcaaagaaacttgccaatgagccagacctttgtaaaactgtgaagaaaaagcgaaagcaagattacacagatgcgatgaaaaagcttcaggagattgaaaatgcaataaacgaataccgaattaggtgtggaaagaaacccagccagaaagcaacagtgttaccagaagacataatcccctcagagagtagctctttgtctgacaccaccacctatgatgatcccagtgatgccttcacttttcctgggcagcgatcaagttcagtacctcattctccaagaattcttccccccaagtctcttggtattgagcgaatccatttcagaaagtcgtccatcaatgaacagtttgtggataccaggcagtccagagaaatgctgtccacacacagcagcccttacaaaactctggagaggcggccccagggaggacgaagcatgcccaccacgccagttcttacccgaaacgcctacagcagcagccacttggaacccgaatcttcatctcagcactgccgccagcggagtggaagcctggagtcccagtcccacctgctctccgagatggacagcgataagccatttttctccctctccaaatcccaaagaagcagcagcacagaaatcctcgatgacgggtcttcttatacaagccaatcaagcacagagtattactgtgtgacaccagttaccggcccctattacaccacccagaccctggacactcgcaccaggggtcggaggaggtcaaagaaacagaatgtttctacttcaaattcaggaagcatgcccaacctagcacaaaaggatagtttgaggaatggtgtttactcaaagagtcaggagccaccgtcttccagttactacattgccgggtacacaccctatgcagagtgtgacttttattacagtggtggttatgtctatgagaatgacaccgagggacagtatagtgtcaacccttcctaccggtcctcagcccactatggatatgagcgccagagggactacagcagatcctttcacgaagatgaggtcgaccgggtaccccataacccatatgcaactctccggctgccaaggaaggctgctgcaaaatcggagcacatcaccaaaaacatccacaaggccttagttgccgagcacttgcgtggctggtaccagcgggcctctgggcagaaggatcagggacacagcccgcagaccagctttgactcagacaggggatcacagagatgcctggggtttgcggggctgcaagtaccttgttctccaagcagtcgtgcatcctcgtactcttcagtgtcttctacaaatgcttctgggaactggaggacccagttaaccatagggctgtcggattacgagactccagcacattcttcttacaccagctgctatggcaatgtctataatcctttaccctctccaagcagacaatacacagaaatcagtcaactggatggtacagatggaaaccagctggaagacaacctggagagtagtgagcagagactcttttggcatgaagattcaaagcctggaacattagtctgaactgcagttggacctcctgaccaagcactgcgttctcacactagtgtgccttgcaaattgtatttgtcttccgagaggatgttcgttttagaaacctaaagacatcaaaggttgaagagaagacttagttgccctggaagtgaatcagtgaatcacacaccaagccccacaaagcccctaaaggaggatttggcctttcaaactctaggcactaacgtaactgtagggtctgcccacatgttgaagtattgccaagagaggactcagtgtgaagccttcatcaatagcaagcactttttaagggagtaaaagttgttaaaggcaaacctcaaaaacatgaaagggcattcaggatgtcccatggcaataagaacaggggaaatctcagagcacaattcagcaggatgagagaaggggaaccagaagctccggagtcattgctcacttcagagtttgaattcgtgagctgacaaagagtaacatgctctttctacacagacatggacaatttagacagtattggaaaattacttgaagctggattttcatgaagttctgaatgagtgtaaatgttttttaggatactataaagagtgatgtttttcataagcaccataaaatgggttctggaaaaactgattaccttagcatcctgtaatataacttatggtagcagattggggaaaatgaagcagcccactgaataattgacaaagtctgcttggagaacattctaaggtacaatatcatggagctcctttttcctttctccactaattgcgtgatgagctattgttctggctgttaattctccaactcggctgtcatttgaagtggcagacttaatatggaaagtttttataattatgagtttgaaaaagcattttaagatgatacagaaagtatccaaaacaacagaaaaaaaaagccacgtcattttagatgaattgcgtgccttaaaatggtgaacgttagaaaattaaacaagtctggattccacaagtagttccaagtcaccaagtgacaaaaacaaggttaacattaaaaaagaaaaacaacaacaacgacaaaaagctccaagctgcagtggatttaattatgaggctaaaactacctcatactttccttggaagaactaattagctatggtttattgtagggttttgtttgtttgttttttaaagcaaatgatttccatattccagattgatcttttttgtcatctttgcttcaaaattacataaaaggtgctcctttcccccttcttttatacaagtttcttgttcatattgtgaatagaaaagtttctgaacaacttttttggaacattttctatctatattccaaagcatgtaatatatacataaaaacgatttgttaaactggtccttagtcatttgtataattagaaatgaagtttgggaaaaaattttggaaaaaagacaagcaaaaaaaaataacttattccttttttgcatatttgtatagccttctagaatcagaaataacctttttgcatattcttttattgttctgacttttcaagacctattatttttttacataggtcaataaacaaaaggtgtgctactgaaaatgtttacgttttcttccatttatgtcaggggttcatgtgaagcaggtcgcagtgctctacttcaagtaatcatattgggcaaggcttcggatttttatttatagtattaccgtattttattaattccgggatgtacatttttaaatatttacattaaaaacatggttcatctttttattgatggcatattctacttgaattggcagttttttcttaatagtacattaaaaataatgctgtgtcttacaataaagttgccttagaattgatg

SEQ ID NO: 2835 - protein, 1260 aa, Homo sapiens [sequence omitted]

SEQ ID NO: 2836 - DNA, 2995 bp, Homo sapiens
ggagaggcggcgggcgggggctgctggggagagagggagccgaaagccccggctgacagcgagaggaggcaggcaggacggaaggacgcgagaaaggcggcccggggcacagctgtaagtgtggagcaaagcgaggacgcacggcgagcggcggtggcgggggcgacctgcagacccgggccgggggatgcggcaggcgctggctgcccagagagcccgggagtcgggctgcgtagctcacgtgctgagctggagcttggacagagaggaagaggaagaagaggaaggcagccgccgccggggaaggcacagcgcagagtggacttgcaggactggcgcagagccgggtccccaggtcccgcgcggtgcgcagccgagacaataaagtagccgtctacagccccggagcgccgcagggaggaggtggcggagcaggctttgatgagaaatccagaagaaagaagtgtgacttttattacagtggtggttatgtctatgagaatgacaccgagggacagtatagtgtcaacccttcctaccggtcctcagcccactatggatatgagcgccagagggactacagcagatcctttcacgaagatgaggtcgaccgggtaccccataacccatatgcaactctccggctgccaaggaaggctgctgcaaaatcggagcacatcaccaaaaacatccacaaggccttagttgccgagcacttgcgtggctggtaccagcgggcctctgggcagaaggatcagggacacagcccgcagaccagctttgactcagacaggggatcacagagatgcctggggtttgcggggctgcaagtaccttgttctccaagcagtcgtgcatcctcgtactcttcagtgtcttctacaaatgcttctgggaactggaggacccagttaaccatagggctgtcggattacgagactccagcacattcttcttacaccagctgctatggcaatgtctataatcctttaccctctccaagcagacaatacacagaaatcagtcaactggatggtacagatggaaaccagctggaagacaacctggagagtagtgagcagagactcttttggcatgaagattcaaagcctggaacattagtctgaactgcagttggacctcctgaccaagcactgcgttctcacactagtgtgccttgcaaattgtatttgtcttccgagaggatgttcgttttagaaacctaaagacatcaaaggttgaagagaagacttagttgccctggaagtgaatcagtgaatcacacaccaagccccacaaagcccctaaaggaggatttggcctttcaaactctaggcactaacgtaactgtagggtctgcccacatgttgaagtattgccaagagaggactcagtgtgaagccttcatcaatagcaagcactttttaagggagtaaaagttgttaaaggcaaacctcaaaaacatgaaagggcattcaggatgtcccatggcaataagaacaggggaaatctcagagcacaattcagcaggatgagagaaggggaaccagaagctccggagtcattgctcacttcagagtttgaattcgtgagctgacaaagagtaacatgctctttctacacagacatggacaatttagacagtattggaaaattacttgaagctggattttcatgaagttctgaatgagtgtaaatgttttttaggatactataaagagtgatgtttttcataagcaccataaaatgggttctggaaaaactgattaccttagcatcctgtaatataacttatggtagcagattggggaaaatgaagcagcccactgaataattgacaaagtctgcttggagaacattctaaggtacaatatcatggagctcctttttcctttctccactaattgcgtgatgagctattgttctggctgttaattctccaactcggctgtcatttgaagtggcagacttaatatggaaagtttttataattatgagtttgaaaaagcattttaagatgatacagaaagtatccaaaacaacagaaaaaaaaagccacgtcattttagatgaattgcgtgccttaaaatggtgaacgttagaaaattaaacaagtctggattccacaagtagttccaagtcaccaagtgacaaaaacaaggttaacattaaaaaagaaaaacaacaacaacgacaaaaagctccaagctgcagtggatttaattatgaggctaaaactacctcatactttccttggaagaactaattagctatggtttattgtagggttttgtttgtttgttttttaaagcaaatgatttccatattccagattgatcttttttgtcatctttgcttcaaaattacataaaaggtgctcctttcccccttcttttatacaagtttcttgttcatattgtgaatagaaaagtttctgaacaacttttttggaacattttctatctatattccaaagcatgtaatatatacataaaaacgatttgttaaactggtccttagtcatttgtataattagaaatgaagtttgggaaaaaattttggaaaaaagacaagcaaaaaaaaataacttattccttttttgcatatttgtatagccttctagaatcagaaataacctttttgcatattcttttattgttctgacttttcaagacctattatttttttacataggtcaataaacaaaaggtgtgctactgaaaatgtttacgttttcttccatttatgtcaggggttcatgtgaagcaggtcgcagtgctctacttcaagtaatcatattgggcaaggcttcggatttttatttatagtattaccgtattttattaattccgggatgtacatttttaaatatttacattaaaaacatggttcatctttttattgatggcatattctacttgaattggcagttttttcttaatagtacattaaaaataatgctgtgtcttacaataaagttgccttagaattgatg

SEQ ID NO: 2837 - protein, 87 aa, Homo sapiens [sequence omitted]

SEQ ID NO: 2838 - DNA, 5376 bp, Homo sapiens
atggctcatttaatttctgacaccaaagagggtaggactgggaaacatggtatcggagtgagccagatgttgtggcgtatcgcagaactagaacgtcacggcttagcaatggttcctccctttgcttggatatgtttgcctcaaagcttctctgagtccacgggacaagttgcctctagtggggaagatcaagctcaaaaagctttttgggaacttgaaagagcaacagaactgctccctgaaaacaagttgccacaaactttcaccttcagcaaacagaaagtcataggaaagcacatagttgctccgcttccgtccctgccccgcgccctggggaagcgccagggggagtcctcgccggccagggcttcccgtgccccgggagcatcgagggccagcttggtggagcttagcacagcttgctcggcgctgcgagcgggcgggggtggacactgggcttctgtgtgccagtcgcagccgttggctggcgggcacccaatcccagggcatgccgccggagcctggccaggacgcacggtgaaagacgagtttggtggcaggcttgaccccccggctgccagcagaagccggcgtcgggagcccaggcgggcaggccgctggggtcggggctgcacgtacgagagccgggacgcccgggttcagagcgaaggaggaggcatggcttcggtgttcatgtgtggcgtggaggacctgctgttcagcggcagccgcttcgtatggaacttgaccgtgtccacgctgcggagatggtacacggagaggctgcgggcttgccaccaggtgctgcggacgtggtgcgggctgcaggacgtgtaccagatgacagaaggcaggcactgccaggtgcacctcctggatgataggagactggagctgctggttcagcccaaacttctagcaagagagttgctggacctagtggcttcacatttcaacctgaaagaaaaggagtattttggaataacattcatagatgacacaggtcagcagaactggctgcagttagatcaccgagttcttgaccacgatttgcccaagaaaccaggcccaaccattttgcactttgctgtgaggttttacattgagagcatatcgtttttaaaggataaaaccaccgtggagctgtttttcctgaatgcaaaggcctgtgtgcacaaggggcaaatcgaagtagagagcgaaaccatcttcaagttagcagcgtttattttacaggaagccaagggagattataccagtgatgaaaatgccaggaaagatttaaagacattaccagcctttccaaccaaaactcttcaggagcatccatcccttgcctactgtgaggacagggtaattgagcattatttgaaaatcaaaggtctcactcgaggtcaagctgtggttcagtatatgaaaatagtagaagctctaccgacttacggtgtccattattatgcagtaaaggataagcaaggacttccttggtggcttggaataagctataagggaattggccaatatgatatacaagacaaggtgaagcctcggaagttattccaatggaaacagctggagaacttatatttccgtgagaaaaaatttgctgttgaagttcatgatccacgaaggatttcagtttcaagaagaacctttgggcaaagtggcttgtttgtgcaaacatggtatgctaactcttctctcatcaagtccatttgggtaatggcaattagtcagcatcagttttacttggaccggaagcaaagcaaagcaaaaattccttcagccaggagtttagatgagattgcaatggatttgacagagacaggaacacaaagggcctccaagctggtgacactggagacgaaaagtcagttcatcatggcaagtaatggcagtttaatctcctcaggttctcaagactcagaagttagtgaagagcaaaagagagaaaaaatccttgaactaaagaagaaggagaaactattacaagaaaaacttctgaaaaaagttgaggagcttaagaagatctgtctgcgggaggctgagctcacaggcaaaatgccaaaggagtatcccctgaacataggcgagaagcctcctcaggtcagaagacgtgtgggtactgcgttcaaattagatgacaacttgctgccgagtgaagaagatcctgctttgcaagaactggagagtaattttctaatacaacaaaagctggtggaagctgcaaagaaacttgccaatgagccagacctttgtaaaactgtgaagaaaaagcgaaagcaagattacacagatgcgatgaaaaagcttcaggagattgaaaatgcaataaacgaataccgaattaggtgtggaaagaaacccagccagaaagcaacagtgttaccagaagacataatcccctcagagagtagctctttgtctgacaccaccacctatgatgatcccagtgatgccttcacttttcctgggcagcgatcaagttcagtacctcattctccaagaattcttccccccaagtctcttggtattgagcgaatccatttcagaaagtcgtccatcaatgaacagtttgtggataccaggcagtccagagaaatgctgtccacacacagcagcccttacaaaactctggagaggcggccccagggaggacgaagcatgcccaccacgccagttcttacccgaaacgcctacagcagcagccacttggaacccgaatcttcatctcagcactgccgccagcggagtggaagcctggagtcccagtcccacctgctctccgagatggacagcgataagccatttttctccctctccaaatcccaaagaagcagcagcacagaaatcctcgatgacgggtcttcttatacaagccaatcaagcacagagtattactgtgtgacaccagttaccggcccctattacaccacccagaccctggacactcgcaccaggggtcggaggaggtcaaagaaacagaatgtttctacttcaaattcaggaagcatgcccaacctagcacaaaaggatagtttgaggaatggtgtttactcaaagagtcaggagccaccgtcttccagttactacattgccgggtacacaccctatgcagagtgtgacttttattacagtggtggttatgtctatgagaatgacaccgagggacagtatagtgtcaacccttcctaccggtcctcagcccactatggatatgagcgccagagggactacagcagatcctttcacgaagatgaggtcgaccgggtaccccataacccatatgcaactctccggctgccaaggaaggctgctgcaaaatcggagcacatcaccaaaaacatccacaaggccttagttgccgagcacttgcgtggctggtaccagcgggcctctgggcagaaggatcagggacacagcccgcagaccagctttgactcagacaggggatcacagagatgcctggggtttgcggggctgcaagtaccttgttctccaagcagtcgtgcatcctcgtactcttcagtgtcttctacaaatgcttctgggaactggaggacccagttaaccatagggctgtcggattacgagactccagcacattcttcttacaccagctgctatggcaatgtctataatcctttaccctctccaagcagacaatacacagaaatcagtcaactggatggtacagatggaaaccagctggaagacaacctggagagtagtgagcagagactcttttggcatgaagattcaaagcctggaacattagtctgaactgcagttggacctcctgaccaagcactgcgttctcacactagtgtgccttgcaaattgtatttgtcttccgagaggatgttcgttttagaaacctaaagacatcaaaggttgaagagaagacttagttgccctggaagtgaatcagtgaatcacacaccaagccccacaaagcccctaaaggaggatttggcctttcaaactctaggcactaacgtaactgtagggtctgcccacatgttgaagtattgccaagagaggactcagtgtgaagccttcatcaatagcaagcactttttaagggagtaaaagttgttaaaggcaaacctcaaaaacatgaaagggcattcaggatgtcccatggcaataagaacaggggaaatctcagagcacaattcagcaggatgagagaaggggaaccagaagctccggagtcattgctcacttcagagtttgaattcgtgagctgacaaagagtaacatgctctttctacacagacatggacaatttagacagtattggaaaattacttgaagctggattttcatgaagttctgaatgagtgtaaatgttttttaggatactataaagagtgatgtttttcataagcaccataaaatgggttctggaaaaactgattaccttagcatcctgtaatataacttatggtagcagattggggaaaatgaagcagcccactgaataattgacaaagtctgcttggagaacattctaaggtacaatatcatggagctcctttttcctttctccactaattgcgtgatgagctattgttctggctgttaattctccaactcggctgtcatttgaagtggcagacttaatatggaaagtttttataattatgagtttgaaaaagcattttaagatgatacagaaagtatccaaaacaacagaaaaaaaaagccacgtcattttagatgaattgcgtgccttaaaatggtgaacgttagaaaattaaacaagtctggattccacaagtagttccaagtcaccaagtgacaaaaacaaggttaacattaaaaaagaaaaacaacaacaacgacaaaaagctccaagctgcagtggatttaattatgaggctaaaactacctcatactttccttggaagaactaattagctatggtttattgtagggttttgtttgtttgttttttaaagcaaatgatttccatattccagattgatcttttttgtcatctttgcttcaaaattacataaaaggtgctcctttcccccttcttttatacaagtttcttgttcatattgtgaatagaaaagtttctgaacaacttttttggaacattttctatctatattccaaagcatgtaatatatacataaaaacgatttgttaaactggtccttagtcatttgtataattagaaatgaagtttgggaaaaaattttggaaaaaagacaagcaaaaaaaaataacttattccttttttgcatatttgtatagccttctagaatcagaaataacctttttgcatattcttttattgttctgacttttcaagacctattatttttttacataggtcaataaacaaaaggtgtgctactg

SEQ ID NO: 2839 - protein, 1260 aa, Homo sapiens [sequence omitted]

SEQ ID NO: 2840 - DNA, 2720 bp, Homo sapiens
ggagaggcggcgggcgggggctgctggggagagagggagccgaaagccccggctgacagcgagaggaggcaggcaggacggaaggacgcgagaaaggcggcccggggcacagctgtaagtgtggagcaaagcgaggacgcacggcgagcggcggtggcgggggcgacctgcagacccgggccgggggatgcggcaggcgctggctgcccagagagcccgggagtcgggctgcgtagctcacgtgctgagctggagcttggacagagaggaagaggaagaagaggaaggcagccgccgccggggaaggcacagcgcagagtggacttgcaggactggcgcagagccgggtccccaggtcccgcgcggtgcgcagccgagacaataaagtagccgtctacagccccggagcgccgcagggaggaggtggcggagcaggctttgatgagaaatccagaagaaagaagtgtgacttttattacagtggtggttatgtctatgagaatgacaccgagggacagtatagtgtcaacccttcctaccggtcctcagcccactatggatatgagcgccagagggactacagcagatcctttcacgaagatgaggtcgaccgggtaccccataacccatatgcaactctccggctgccaaggaaggctgctgcaaaatcggagcacatcaccaaaaacatccacaaggccttagttgccgagcacttgcgtggctggtaccagcgggcctctgggcagaaggatcagggacacagcccgcagaccagctttgactcagacaggggatcacagagatgcctggggtttgcggggctgcaagtaccttgttctccaagcagtcgtgcatcctcgtactcttcagtgtcttctacaaatgcttctgggaactggaggacccagttaaccatagggctgtcggattacgagactccagcacattcttcttacaccagctgctatggcaatgtctataatcctttaccctctccaagcagacaatacacagaaatcagtcaactggatggtacagatggaaaccagctggaagacaacctggagagtagtgagcagagactcttttggcatgaagattcaaagcctggaacattagtctgaactgcagttggacctcctgaccaagcactgcgttctcacactagtgtgccttgcaaattgtatttgtcttccgagaggatgttcgttttagaaacctaaagacatcaaaggttgaagagaagacttagttgccctggaagtgaatcagtgaatcacacaccaagccccacaaagcccctaaaggaggatttggcctttcaaactctaggcactaacgtaactgtagggtctgcccacatgttgaagtattgccaagagaggactcagtgtgaagccttcatcaatagcaagcactttttaagggagtaaaagttgttaaaggcaaacctcaaaaacatgaaagggcattcaggatgtcccatggcaataagaacaggggaaatctcagagcacaattcagcaggatgagagaaggggaaccagaagctccggagtcattgctcacttcagagtttgaattcgtgagctgacaaagagtaacatgctctttctacacagacatggacaatttagacagtattggaaaattacttgaagctggattttcatgaagttctgaatgagtgtaaatgttttttaggatactataaagagtgatgtttttcataagcaccataaaatgggttctggaaaaactgattaccttagcatcctgtaatataacttatggtagcagattggggaaaatgaagcagcccactgaataattgacaaagtctgcttggagaacattctaaggtacaatatcatggagctcctttttcctttctccactaattgcgtgatgagctattgttctggctgttaattctccaactcggctgtcatttgaagtggcagacttaatatggaaagtttttataattatgagtttgaaaaagcattttaagatgatacagaaagtatccaaaacaacagaaaaaaaaagccacgtcattttagatgaattgcgtgccttaaaatggtgaacgttagaaaattaaacaagtctggattccacaagtagttccaagtcaccaagtgacaaaaacaaggttaacattaaaaaagaaaaacaacaacaacgacaaaaagctccaagctgcagtggatttaattatgaggctaaaactacctcatactttccttggaagaactaattagctatggtttattgtagggttttgtttgtttgttttttaaagcaaatgatttccatattccagattgatcttttttgtcatctttgcttcaaaattacataaaaggtgctcctttcccccttcttttatacaagtttcttgttcatattgtgaatagaaaagtttctgaacaacttttttggaacattttctatctatattccaaagcatgtaatatatacataaaaacgatttgttaaactggtccttagtcatttgtataattagaaatgaagtttgggaaaaaattttggaaaaaagacaagcaaaaaaaaataacttattccttttttgcatatttgtatagccttctagaatcagaaataacctttttgcatattcttttattgttctgacttttcaagacctattatttttttacataggtcaataaacaaaaggtgtgctactg

SEQ ID NO: 2841 - protein, 87 aa, Homo sapiens [sequence omitted]

SEQ ID NO: 2842 - DNA, 319 bp, Homo sapiens
ctctgaacttcgcgaactgatttggtgtgtttgctggtacccagacggctgcgactagaggctgggcctttcgggaagaaagaccttagggtgctgatggcagcagtctttccgggaagctggttgatccttgaagattaggctttgatgagaaatccagaagaaagagtgtatgaaagaaaaagatgacatctatgcatagcaaacaaaatctgaagattattacagtaaaaacaaaagaaaggcaagagaatacttactagttaaagatgacagaaggcaggcactgccaggtgcacctcctggatgataggagact

SEQ ID NO: 2843 - protein, 35 aa, Homo sapiens
QTKSEDYYSKNKRKAREYLLVKDDRRQALPGAPPG

SEQ ID NO: 2844 - DNA, 1111 bp, Homo sapiens
tgagttctctctcccactttgacagccctgattttgcaactgagtgtagataactttgagcacttcagaatctcctcctacagagacagtagaagtctaaaacggtgtattcagtgacatgcatcctgtaagaagccaaattggctttgatgagaaatccagaagaaagagtgtatgaaagaaaaagatgacatctatgcatagcaaacaaaatctgaagattattacagtaaaaacaaaagaaaggcaagagaatacttactagttaaagagataaggtctcaccatgttgtccagactggacttgaactcctggcttcaagcaatctgcccacctccgcctcccaaagtcctgggatttataggcatgaaccaccgcacctggcctccccaccattttattttctcccgtggctatcacaaccaggaataagagagggagggggacctcagtggtgattttatgctaaggattatggataacaccatccccccattttacaaatgaagaaactggggctcaaaaagcttaattaaatgtctaaggccactgaggcagcaattaaagaggatgtgaagccagtctgctttgtcttcttctggagcctctccttgaggctgacacacctgatcatagccccattatcttaagagtgttagccatatccagtggccagcacactctagacacttctgttattgtagagagacctgttagagatggatgcaagagatttaccctttttcagccttgcctctgctgtcttggggaagtgggaaggttgctttaaatgacgtgtctcgtgatctgtaaataaaagaaaaataatttctggccacttcaattatggcataagttttggttatctgacacctaccctcaccctctccccaacaaaaatgtgtagtcactactttatcctcaagagcctggcacagagtaggtgctcaaaaaatagtcattcactggaaagcaaacaagacaatggatgaagccagcaaaatggaccacgttcacaatttgatggaaattgggtattttattatgtaatcagaagaaagaaatgataaaatagactaattgccaattatagggaaaaaacagtcccaa

SEQ ID NO: 2845 - protein, 48 aa, Homo sapiens
MLSRLDLNSWLQAICPPPPPKVLGFIGMNHRTWPPHHFIFSRGYHNQE

SEQ ID NO: 2846 - DNA, 508 bp, Homo sapiens
ccgccccagcccccggagaggcggcgggcgggggctgctggggagagagggagccgaaagccccggctgacagcgagaggaggcaggcaggacggaaggacgcgagaaaggcggcccggggcacagctgtaagtgtggagcaaagcgaggacgcacggcgagcggcggtggcgggggcgacctgcagacccgggccgggggatgcggcaggcgctggctgcccagagagcccgggagtcgggctgcgtagctcacgtgctgagctggagcttggacagagaggaagaggaagaagaggaaggcagccgccgccggggaaggcacagcgcagagtggacttgcaggactggcgcagagccgggtccccaggtcccgcgcggtgcgcagccgagacaataaagtagccgtctacagccccggagcgccgcagggaggaggtggcggagcaggctttgatgagaaatccagaagaaagagtgtatgaaagaaaaagatgacatctatgcat

SEQ ID NO: 2847 - protein, 65 aa, Homo sapiens
MRQALAAQRARESGCVAHVLSWSLDREEEEEEEGSRRRGRHSAEWTCRTGAEPGPQVPRGAQPRQ

SEQ ID NO: 2848 - DNA, 453 bp, Homo sapiens
cccaaagcagcatttcccaaacaaaagtgatgaatggtagatctcttcttgggaacttgatacctgatggagcaaattgaccctgcaattggcactgaagatcaggaattaaaaatcaaatatgctgatggaaagtgagtggaacacttctctctctctttcgatgaagcctccctaggacaacaggactgatgctatcttccttgggaattcttctgaggccttctgcttgtaggtctaacctctgagtagacaggtttctaagaactaagaaagtattactgtggggaactcagcaggtggctgcctgcgaatgaagctcccagagaggaaaatgttctcgagagagggagagaagcagtttcctcatttaggtcaccagatctggctgtgcctaaagcaaggcctggatatttcaattacaacagccaaataaatttccctttttcgctt

SEQ ID NO: 2849 - protein, 40 aa, Homo sapiens
MKLPERKMFSREGEKQFPHLGHQIWLCLKQGLDISITTAK

SEQ ID NO: 2850 - DNA, 697 bp, Homo sapiens
gagattagaggacacattattcgtgggtcgggaggaattcaatgaatcatgaagaaaagataatttataaagaatatgtattaagcatctaccacgtgccatgggaagtgctggtgtaaccaggaagatgaagaaaaaaatgcacatggtaaccaaccccaggggtttacagtccaatgagggagaccgacaaaacaccaagcaaatgtagaagtggtggtcagtgacttcaagtaaaagtaaaggagatggatgtgatgaaagacagtaacagaagttatatttcagacaggttgttcagggagggcctctgaggaagtgatatttcagtggaagcctggagggtgagaagatgatgggtaggtggagagttgggagaagaacaatcaaagccaaaggaacagcgtgggcacgcctgaggctgaagagcacccgcatggagaaacccaaaaggctgatgtgcccactggatagtgaaggagggagaagaaggtgtgagatgaaattggagaatggggaaaggcagtaacctaaaggactgcccacagtttgtacttgaaaacttcacattgatttcaatcctgaacgtcttgtgatctggagttcccattggatttttggttataatgagtcagtgcatcaagagtaccttgaggccgttactggggtgggccttaaatgagcacacagagatgct

SEQ ID NO: 2851 - protein, 58 aa, Homo sapiens [sequence omitted]

SEQ ID NO: 2852 - DNA, 4771 bp, Homo sapiens
ggcagagctcggcactgcgccggggcgcacggctcgggggacccaggcccagctaccttccctccgcccccgggctctgttctcactttccagcagtggaaggacgggaagcgggagccatgcagtccgaatcggggatcgtgccggatttcgaagtcggggaggagtttcatgaagagcccaaaacctattacgaactcaaaagtcaaccgctgaagagcagcagttccgccgagcatcctggggcctccaagcctccgataagctcctccagtatgacatcacgcatcttgctacgccagcaactcatgcgtgagcagatgcaggagcaggagcgcagggagcagcagcagaagctgcaggcggcccagttcatgcaacagagagtgcccgtgagtcagacaccagccataaacgtcagtgtgcccaccacccttccctctgccacgcaggtgccgatggaagtccttaaggtgcagacccacctcgaaaaccccaccaagtaccacatacagcaagcccaacggcagcaggtaaagcagtacctttctaccactttagcaaataaacatgccaaccaagtcctgagcttgccatgtccaaaccagcctggcgatcatgtcatgccaccggtgccggggagcagcgcacccaacagccccatggctatgcttacgcttaactccaactgtgaaaaagagggattttataagtttgaagagcaaaacagggcagagagcgagtgcccaggcatgaacacacattcacgagcgtcctgtatgcagatggatgatgtaatcgatgacatcattagcctagaatcaagttataatgaggaaatcttgggcttgatggatcctgctttgcaaatggcaaatacgttgcctgtctcgggaaacttgattgatctttatggaaaccaaggtctgcccccaccaggcctcaccatcagcaactcctgtccagccaaccttcccaacataaaaagggagctcacagagtctgaagcaagagcactggccaaagagaggcagaaaaaggacaatcacaacctgattgaacgaagaagaagatttaacataaatgaccgcattaaagaactaggtactttgattcccaagtcaaatgatccagacatgcgctggaacaagggaaccatcttaaaagcatccgtggactatatccgaaagttgcaacgagaacagcaacgcgcaaaagaacttgaaaaccgacagaagaaactggagcacgccaaccggcatttgttgctcagaatacaggaacttgaaatgcaggctcgagctcatggactttcccttattccatccacgggtctctgctctccagatttggtgaatcggatcatcaagcaagaacccgttcttgagaactgcagccaagacctccttcagcatcatgcagacctaacctgtacaacaactctcgatctcacggatggcaccatcaccttcaacaacaacctcggaactgggactgaggccaaccaagcctatagtgtccccacaaaaatgggatccaaactggaagacatcctgatggacgacaccctttctcccgtcggtgtcactgatccactcctttcctcagtgtcccccggagcttccaaaacaagcagccggaggagcagtatgagcatggaagagacggagcacacttgttagcgaatcctccctgcactgcattcgcacaaactgcttcctttcttgattcgtagatttaataacttacctgaaggggttttcttgataattttcctttaatatgaaattttttttcatgctttatcaatagcccaggatatattttatttttagaattttgtgaaacagacttgtatattctattttacaactacaaatgcctccaaagtattgtacaaataagtgtgcagtatctgtgaactgaattcaccacagactttagctttctgagcaagaggattttgcgtcagagaaatgtctgtccatttttattcaggggaaacttgatttgagatttttatgcctgtgacttccttggaaatcaaatgtaaagtttaattgaaagaatgtaaagcaaccaaaaagaaaaaaaaaaagaaagaaagaggaaaagaaatccatactaacccttttccattttataaatgtattgattcattggtactgccttaaagatacagtacccctctagctttgtttagtctttatactgcaaactatttaaagaaatatgtattctgtaaaagaaaaaaaaaatgcggccttttcatgaggatcgtctggttagaaaacataactgataccaaccgaaactgaagggagttagaccaaggctctgaaatataaagtctaatcttgctctcttttattctgtgctgttacagttttcttcatcaatgagtgtgatccagtttttcataagatattttattttgaaatggaaattaatgtcctctcaaagtaaaatattgaggagcactgaaagtatgttttactttttttttattttatttttgcttttgataagaaaaccgaactgggcatatttctaattggctttactatttttatttttaaattatgttttactgttcatttgatttgtacagattctttattatcattgttcttttcaatatatttgtattaatttgtaagaatatgcatcttaaaatggcaagttttccatatttttacaactcactggtggttttccgcattctttgtacacccatgaaagaaaacttttatgcaaggtcttgcatttaaaagacagctttgcgaatattttgtaaattacagtctcactcagaactgtttttggacacatttaaggtgtagtattaataggttaaaaccaggctttctagaaagaataaacttacatatttatttttaggacatgaaaatagcaatattcttggagattgataaccatagcattaatacgcccattatggtcatttaaattggggtttatttcagcaaacttgttgaatttatttttaagaaagaaatactgtattgggaagttactgttacttgataacaatgttttaacaagaagcaatgttataaagttagtttcagtgcattatctacttgtgtagtcctatgcaataacagtagtgttacatgtatcaagcctagatgttttatacagatgccatatagtgttatgagccaggctgttgaatggaatttctcagtagcagcctacaactgaatagcaagtggcataaagcatatccattcagaatgaagtgccttaaatatagcagtagtcttttttggactagcactgactgaactgtaatgtaggggaaagtttcatgatggtatctatagtcaagacgaacatgtagcatggtgcctatgtagacaatataagagcttccaattttccttcagatatttttaatattaaatatattttagtgacagagtgccaacttctttcatcaggaaaccttattcaggagggtttttaaaaagtgtttaaatgtcaaatgtgaattggtgatgggtgatggagggttcagagaggagtgatcgtcagatgtgtgaatggacggtttaggtgaaaataatcaactgcatagttcccatgcacgctgggcaatgagaatccttggaaacattggtgatgctatcagttttatagctttatttcttaagggggtagggaaaattagttcccattctttcaacccccttaactgtatagctcttttcctagaatagtgacgcaaatctgcatgaacagctaattgtaccatagtgttcattgatacaatcatagcattgtctatttttctcttcatatttatatgggggggagggcgctggatgcaaaagttgaagatcgtgatgctatgatgttagttttccttagctgattttgagggtttttaaaaataaagcaaggttgactaacctacggccacgggaacaggaccatggttaagcaaccatatagaaagctttgttgaaagaaagtatggcatcttgtaccactgccctgactgtcacaactcctaaccttgccattgcctgcctccccctccccttctccttaagagacaatttctgcaggtggcaggtgagcaagcccaggagaatgctgcaatcttgggggtggttttatttatttcttttttgccaaatagagtgtggattcatttcaggggctagctaagccaagaggcagtggtttgggcttgttgtttgtaacaagaaaatgatccacaccactcccccgattcccgggtgcagaattgtaactcggggttgggcctctatatggagtgaccaaaatgccaaaattgtccatctgcctctgagtagggcaatggaaataccaaaccttctgactttgccaaaaagcatacaagcaacctggtcatacataggatgacaaaattctttctggttgtttttaaacaataaagcaataagaacaaatacaatacataggaagttaaaagcacaaaggaatgaacttattaatatttttgaaaaatgcactgggaaaaagttgatgtcaataacagtataaaacagccctatttcttgataaaaaatgacaaatgactgtctcttgcggatgcttggtactgtaatgttaataatagtcacctgctgttggatgcagcaataatttctgtatggtccatagcactgtatattatggatcgatattaatgtatccaatgaaataatcgacttgttcttgatagcctcattaaagcatttggtttttcacatag

SEQ ID NO: 2853 - protein, 520 aa, Homo sapiens; identical to SEQ ID NO: 250

SEQ ID NO: 2854 - DNA, 5062 bp, Homo sapiens
gagttagagattcacagaatgaatgtaaaagcattcttacttttaattaatgagagaggagaaagaaaaacaataataagaaaaaaaggacttgattctcatccataccaagaaaagtgtaaacatccaagttcccagtgattctaaccctgattcattaccttgcatgtgtctttaactaccacaagaaatgtttaagatttccattgagatattatcgacagggactcctgggctgcatcataagcctgattgaaagcctttagccttgtaatgatctctttttggaggacaatcagggaattctttgcacctttatcagagagtcagggctttcctgagcaaacaaactaggtctttacctatggagctgattttatgaagagttttggtcagcattagtcattgtgaaaccatgggcctcctgccctggtttatctcgacagtcatctccctacagcagaagattgaatcctcatctctccatgagtctgagcatctaaagatgttagagcagttccgccgagcatcctggggcctccaagcctccgataagctcctccagtatgacatcacgcatcttgctacgccagcaactcatgcgtgagcagatgcaggagcaggagcgcagggagcagcagcagaagctgcaggcggcccagttcatgcaacagagagtgcccgtgagtcagacaccagccataaacgtcagtgtgcccaccacccttccctctgccacgcaggtgccgatggaagtccttaaggtgcagacccacctcgaaaaccccaccaagtaccacatacagcaagcccaacggcagcaggtaaagcagtacctttctaccactttagcaaataaacatgccaaccaagtcctgagcttgccatgtccaaaccagcctggcgatcatgtcatgccaccggtgccggggagcagcgcacccaacagccccatggctatgcttacgcttaactccaactgtgaaaaagagggattttataagtttgaagagcaaaacagggcagagagcgagtgcccaggcatgaacacacattcacgagcgtcctgtatgcagatggatgatgtaatcgatgacatcattagcctagaatcaagttataatgaggaaatcttgggcttgatggatcctgctttgcaaatggcaaatacgttgcctgtctcgggaaacttgattgatctttatggaaaccaaggtctgcccccaccaggcctcaccatcagcaactcctgtccagccaaccttcccaacataaaaagggagctcacagagtctgaagcaagagcactggccaaagagaggcagaaaaaggacaatcacaacctgattgaacgaagaagaagatttaacataaatgaccgcattaaagaactaggtactttgattcccaagtcaaatgatccagacatgcgctggaacaagggaaccatcttaaaagcatccgtggactatatccgaaagttgcaacgagaacagcaacgcgcaaaagaacttgaaaaccgacagaagaaactggagcacgccaaccggcatttgttgctcagaatacaggaacttgaaatgcaggctcgagctcatggactttcccttattccatccacgggtctctgctctccagatttggtgaatcggatcatcaagcaagaacccgttcttgagaactgcagccaagacctccttcagcatcatgcagacctaacctgtacaacaactctcgatctcacggatggcaccatcaccttcaacaacaacctcggaactgggactgaggccaaccaagcctatagtgtccccacaaaaatgggatccaaactggaagacatcctgatggacgacaccctttctcccgtcggtgtcactgatccactcctttcctcagtgtcccccggagcttccaaaacaagcagccggaggagcagtatgagcatggaagagacggagcacacttgttagcgaatcctccctgcactgcattcgcacaaactgcttcctttcttgattcgtagatttaataacttacctgaaggggttttcttgataattttcctttaatatgaaattttttttcatgctttatcaatagcccaggatatattttatttttagaattttgtgaaacagacttgtatattctattttacaactacaaatgcctccaaagtattgtacaaataagtgtgcagtatctgtgaactgaattcaccacagactttagctttctgagcaagaggattttgcgtcagagaaatgtctgtccatttttattcaggggaaacttgatttgagatttttatgcctgtgacttccttggaaatcaaatgtaaagtttaattgaaagaatgtaaagcaaccaaaaagaaaaaaaaaaagaaagaaagaggaaaagaaatccatactaacccttttccattttataaatgtattgattcattggtactgccttaaagatacagtacccctctagctttgtttagtctttatactgcaaactatttaaagaaatatgtattctgtaaaagaaaaaaaaaatgcggccttttcatgaggatcgtctggttagaaaacataactgataccaaccgaaactgaagggagttagaccaaggctctgaaatataaagtctaatcttgctctcttttattctgtgctgttacagttttcttcatcaatgagtgtgatccagtttttcataagatattttattttgaaatggaaattaatgtcctctcaaagtaaaatattgaggagcactgaaagtatgttttactttttttttattttatttttgcttttgataagaaaaccgaactgggcatatttctaattggctttactatttttatttttaaattatgttttactgttcatttgatttgtacagattctttattatcattgttcttttcaatatatttgtattaatttgtaagaatatgcatcttaaaatggcaagttttccatatttttacaactcactggtggttttccgcattctttgtacacccatgaaagaaaacttttatgcaaggtcttgcatttaaaagacagctttgcgaatattttgtaaattacagtctcactcagaactgtttttggacacatttaaggtgtagtattaataggttaaaaccaggctttctagaaagaataaacttacatatttatttttaggacatgaaaatagcaatattcttggagattgataaccatagcattaatacgcccattatggtcatttaaattggggtttatttcagcaaacttgttgaatttatttttaagaaagaaatactgtattgggaagttactgttacttgataacaatgttttaacaagaagcaatgttataaagttagtttcagtgcattatctacttgtgtagtcctatgcaataacagtagtgttacatgtatcaagcctagatgttttatacagatgccatatagtgttatgagccaggctgttgaatggaatttctcagtagcagcctacaactgaatagcaagtggcataaagcatatccattcagaatgaagtgccttaaatatagcagtagtcttttttggactagcactgactgaactgtaatgtaggggaaagtttcatgatggtatctatagtcaagacgaacatgtagcatggtgcctatgtagacaatataagagcttccaattttccttcagatatttttaatattaaatatattttagtgacagagtgccaacttctttcatcaggaaaccttattcaggagggtttttaaaaagtgtttaaatgtcaaatgtgaattggtgatgggtgatggagggttcagagaggagtgatcgtcagatgtgtgaatggacggtttaggtgaaaataatcaactgcatagttcccatgcacgctgggcaatgagaatccttggaaacattggtgatgctatcagttttatagctttatttcttaagggggtagggaaaattagttcccattctttcaacccccttaactgtatagctcttttcctagaatagtgacgcaaatctgcatgaacagctaattgtaccatagtgttcattgatacaatcatagcattgtctatttttctcttcatatttatatgggggggagggcgctggatgcaaaagttgaagatcgtgatgctatgatgttagttttccttagctgattttgagggtttttaaaaataaagcaaggttgactaacctacggccacgggaacaggaccatggttaagcaaccatatagaaagctttgttgaaagaaagtatggcatcttgtaccactgccctgactgtcacaactcctaaccttgccattgcctgcctccccctccccttctccttaagagacaatttctgcaggtggcaggtgagcaagcccaggagaatgctgcaatcttgggggtggttttatttatttcttttttgccaaatagagtgtggattcatttcaggggctagctaagccaagaggcagtggtttgggcttgttgtttgtaacaagaaaatgatccacaccactcccccgattcccgggtgcagaattgtaactcggggttgggcctctatatggagtgaccaaaatgccaaaattgtccatctgcctctgagtagggcaatggaaataccaaaccttctgactttgccaaaaagcatacaagcaacctggtcatacataggatgacaaaattctttctggttgtttttaaacaataaagcaataagaacaaatacaatacataggaagttaaaagcacaaaggaatgaacttattaatatttttgaaaaatgcactgggaaaaagttgatgtcaataacagtataaaacagccctatttcttgataaaaaatgacaaatgactgtctcttgcggatgcttggtactgtaatgttaataatagtcacctgctgttggatgcagcaataatttctgtatggtccatagcactgtatattatggatcgatattaatgtatccaatgaaataatcgacttgttcttgatagcctcattaaagcatttggtttttcacatag

SEQ ID NO: 2855 - protein, 468 aa, Homo sapiens
MTSRILLRQQLMREQMQEQERREQQQKLQAAQFMQQRVPVSQTPAINVSVPTTLPSATQVPMEVLKVQTHLENPTKYHIQQAQRQQVKQYLSTTLANKHANQVLSLPCPNQPGDHVMPPVPGSSAPNSPMAMLTLNSNCEKEGFYKFEEQNRAESECPGMNTHSRASCMQMDDVIDDIISLESSYNEEILGLMDPALQMANTLPVSGNLIDLYGNQGLPPPGLTISNSCPANLPNIKRELTESEARALAKERQKKDNHNLIERRRRFNINDRIKELGTLIPKSNDPDMRWNKGTILKASVDYIRKLQREQQRAKELENRQKKLEHANRHLLLRIQELEMQARAHGLSLIPSTGLCSPDLVNRIIKQEPVLENCSQDLLQHHADLTCTTTLDLTDGTITFNNNLGTGTEANQAYSVPTKMGSKLEDILMDDTLSPVGVTDPLLSSVSPGASKTSSRRSSMSMEETEHTC

SEQ ID NO: 2856 - DNA, 4680 bp, Homo sapiens
cagacctattccgctccatctctgaagtcaaatgggacaccttgaaaatacttcagtggttttcccacgagctattttctctctctgtgaaaaggaaaccaggaaattgactctgtgcctgttttcaagaagcagttccgccgagcatcctggggcctccaagcctccgataagctcctccagtatgacatcacgcatcttgctacgccagcaactcatgcgtgagcagatgcaggagcaggagcgcagggagcagcagcagaagctgcaggcggcccagttcatgcaacagagagtgcccgtgagtcagacaccagccataaacgtcagtgtgcccaccacccttccctctgccacgcaggtgccgatggaagtccttaaggtgcagacccacctcgaaaaccccaccaagtaccacatacagcaagcccaacggcagcaggtaaagcagtacctttctaccactttagcaaataaacatgccaaccaagtcctgagcttgccatgtccaaaccagcctggcgatcatgtcatgccaccggtgccggggagcagcgcacccaacagccccatggctatgcttacgcttaactccaactgtgaaaaagagggattttataagtttgaagagcaaaacagggcagagagcgagtgcccaggcatgaacacacattcacgagcgtcctgtatgcagatggatgatgtaatcgatgacatcattagcctagaatcaagttataatgaggaaatcttgggcttgatggatcctgctttgcaaatggcaaatacgttgcctgtctcgggaaacttgattgatctttatggaaaccaaggtctgcccccaccaggcctcaccatcagcaactcctgtccagccaaccttcccaacataaaaagggagctcacagagtctgaagcaagagcactggccaaagagaggcagaaaaaggacaatcacaacctgattgaacgaagaagaagatttaacataaatgaccgcattaaagaactaggtactttgattcccaagtcaaatgatccagacatgcgctggaacaagggaaccatcttaaaagcatccgtggactatatccgaaagttgcaacgagaacagcaacgcgcaaaagaacttgaaaaccgacagaagaaactggagcacgccaaccggcatttgttgctcagaatacaggaacttgaaatgcaggctcgagctcatggactttcccttattccatccacgggtctctgctctccagatttggtgaatcggatcatcaagcaagaacccgttcttgagaactgcagccaagacctccttcagcatcatgcagacctaacctgtacaacaactctcgatctcacggatggcaccatcaccttcaacaacaacctcggaactgggactgaggccaaccaagcctatagtgtccccacaaaaatgggatccaaactggaagacatcctgatggacgacaccctttctcccgtcggtgtcactgatccactcctttcctcagtgtcccccggagcttccaaaacaagcagccggaggagcagtatgagcatggaagagacggagcacacttgttagcgaatcctccctgcactgcattcgcacaaactgcttcctttcttgattcgtagatttaataacttacctgaaggggttttcttgataattttcctttaatatgaaattttttttcatgctttatcaatagcccaggatatattttatttttagaattttgtgaaacagacttgtatattctattttacaactacaaatgcctccaaagtattgtacaaataagtgtgcagtatctgtgaactgaattcaccacagactttagctttctgagcaagaggattttgcgtcagagaaatgtctgtccatttttattcaggggaaacttgatttgagatttttatgcctgtgacttccttggaaatcaaatgtaaagtttaattgaaagaatgtaaagcaaccaaaaagaaaaaaaaaaagaaagaaagaggaaaagaaatccatactaacccttttccattttataaatgtattgattcattggtactgccttaaagatacagtacccctctagctttgtttagtctttatactgcaaactatttaaagaaatatgtattctgtaaaagaaaaaaaaaatgcggccttttcatgaggatcgtctggttagaaaacataactgataccaaccgaaactgaagggagttagaccaaggctctgaaatataaagtctaatcttgctctcttttattctgtgctgttacagttttcttcatcaatgagtgtgatccagtttttcataagatattttattttgaaatggaaattaatgtcctctcaaagtaaaatattgaggagcactgaaagtatgttttactttttttttattttatttttgcttttgataagaaaaccgaactgggcatatttctaattggctttactatttttatttttaaattatgttttactgttcatttgatttgtacagattctttattatcattgttcttttcaatatatttgtattaatttgtaagaatatgcatcttaaaatggcaagttttccatatttttacaactcactggtggttttccgcattctttgtacacccatgaaagaaaacttttatgcaaggtcttgcatttaaaagacagctttgcgaatattttgtaaattacagtctcactcagaactgtttttggacacatttaaggtgtagtattaataggttaaaaccaggctttctagaaagaataaacttacatatttatttttaggacatgaaaatagcaatattcttggagattgataaccatagcattaatacgcccattatggtcatttaaattggggtttatttcagcaaacttgttgaatttatttttaagaaagaaatactgtattgggaagttactgttacttgataacaatgttttaacaagaagcaatgttataaagttagtttcagtgcattatctacttgtgtagtcctatgcaataacagtagtgttacatgtatcaagcctagatgttttatacagatgccatatagtgttatgagccaggctgttgaatggaatttctcagtagcagcctacaactgaatagcaagtggcataaagcatatccattcagaatgaagtgccttaaatatagcagtagtcttttttggactagcactgactgaactgtaatgtaggggaaagtttcatgatggtatctatagtcaagacgaacatgtagcatggtgcctatgtagacaatataagagcttccaattttccttcagatatttttaatattaaatatattttagtgacagagtgccaacttctttcatcaggaaaccttattcaggagggtttttaaaaagtgtttaaatgtcaaatgtgaattggtgatgggtgatggagggttcagagaggagtgatcgtcagatgtgtgaatggacggtttaggtgaaaataatcaactgcatagttcccatgcacgctgggcaatgagaatccttggaaacattggtgatgctatcagttttatagctttatttcttaagggggtagggaaaattagttcccattctttcaacccccttaactgtatagctcttttcctagaatagtgacgcaaatctgcatgaacagctaattgtaccatagtgttcattgatacaatcatagcattgtctatttttctcttcatatttatatgggggggagggcgctggatgcaaaagttgaagatcgtgatgctatgatgttagttttccttagctgattttgagggtttttaaaaataaagcaaggttgactaacctacggccacgggaacaggaccatggttaagcaaccatatagaaagctttgttgaaagaaagtatggcatcttgtaccactgccctgactgtcacaactcctaaccttgccattgcctgcctccccctccccttctccttaagagacaatttctgcaggtggcaggtgagcaagcccaggagaatgctgcaatcttgggggtggttttatttatttcttttttgccaaatagagtgtggattcatttcaggggctagctaagccaagaggcagtggtttgggcttgttgtttgtaacaagaaaatgatccacaccactcccccgattcccgggtgcagaattgtaactcggggttgggcctctatatggagtgaccaaaatgccaaaattgtccatctgcctctgagtagggcaatggaaataccaaaccttctgactttgccaaaaagcatacaagcaacctggtcatacataggatgacaaaattctttctggttgtttttaaacaataaagcaataagaacaaatacaatacataggaagttaaaagcacaaaggaatgaacttattaatatttttgaaaaatgcactgggaaaaagttgatgtcaataacagtataaaacagccctatttcttgataaaaaatgacaaatgactgtctcttgcggatgcttggtactgtaatgttaataatagtcacctgctgttggatgcagcaataatttctgtatggtccatagcactgtatattatggatcgatattaatgtatccaatgaaataatcgacttgttcttgatagcctcattaaagcatttggtttttcacatag

SEQ ID NO: 2857 - protein, 519 aa, Homo sapiens; identical to SEQ ID NO: 246

SEQ ID NO: 2858 - DNA, 4604 bp, Homo sapiens
atggaggcgcttagagttcagatgttcatgccatgctcctttgaaagcttgtatctcagttccgccgagcatcctggggcctccaagcctccgataagctcctccagtatgacatcacgcatcttgctacgccagcaactcatgcgtgagcagatgcaggagcaggagcgcagggagcagcagcagaagctgcaggcggcccagttcatgcaacagagagtgcccgtgagtcagacaccagccataaacgtcagtgtgcccaccacccttccctctgccacgcaggtgccgatggaagtccttaaggtgcagacccacctcgaaaaccccaccaagtaccacatacagcaagcccaacggcagcaggtaaagcagtacctttctaccactttagcaaataaacatgccaaccaagtcctgagcttgccatgtccaaaccagcctggcgatcatgtcatgccaccggtgccggggagcagcgcacccaacagccccatggctatgcttacgcttaactccaactgtgaaaaagagggattttataagtttgaagagcaaaacagggcagagagcgagtgcccaggcatgaacacacattcacgagcgtcctgtatgcagatggatgatgtaatcgatgacatcattagcctagaatcaagttataatgaggaaatcttgggcttgatggatcctgctttgcaaatggcaaatacgttgcctgtctcgggaaacttgattgatctttatggaaaccaaggtctgcccccaccaggcctcaccatcagcaactcctgtccagccaaccttcccaacataaaaagggagctcacagagtctgaagcaagagcactggccaaagagaggcagaaaaaggacaatcacaacctgattgaacgaagaagaagatttaacataaatgaccgcattaaagaactaggtactttgattcccaagtcaaatgatccagacatgcgctggaacaagggaaccatcttaaaagcatccgtggactatatccgaaagttgcaacgagaacagcaacgcgcaaaagaacttgaaaaccgacagaagaaactggagcacgccaaccggcatttgttgctcagaatacaggaacttgaaatgcaggctcgagctcatggactttcccttattccatccacgggtctctgctctccagatttggtgaatcggatcatcaagcaagaacccgttcttgagaactgcagccaagacctccttcagcatcatgcagacctaacctgtacaacaactctcgatctcacggatggcaccatcaccttcaacaacaacctcggaactgggactgaggccaaccaagcctatagtgtccccacaaaaatgggatccaaactggaagacatcctgatggacgacaccctttctcccgtcggtgtcactgatccactcctttcctcagtgtcccccggagcttccaaaacaagcagccggaggagcagtatgagcatggaagagacggagcacacttgttagcgaatcctccctgcactgcattcgcacaaactgcttcctttcttgattcgtagatttaataacttacctgaaggggttttcttgataattttcctttaatatgaaattttttttcatgctttatcaatagcccaggatatattttatttttagaattttgtgaaacagacttgtatattctattttacaactacaaatgcctccaaagtattgtacaaataagtgtgcagtatctgtgaactgaattcaccacagactttagctttctgagcaagaggattttgcgtcagagaaatgtctgtccatttttattcaggggaaacttgatttgagatttttatgcctgtgacttccttggaaatcaaatgtaaagtttaattgaaagaatgtaaagcaaccaaaaagaaaaaaaaaaagaaagaaagaggaaaagaaatccatactaacccttttccattttataaatgtattgattcattggtactgccttaaagatacagtacccctctagctttgtttagtctttatactgcaaactatttaaagaaatatgtattctgtaaaagaaaaaaaaaatgcggccttttcatgaggatcgtctggttagaaaacataactgataccaaccgaaactgaagggagttagaccaaggctctgaaatataaagtctaatcttgctctcttttattctgtgctgttacagttttcttcatcaatgagtgtgatccagtttttcataagatattttattttgaaatggaaattaatgtcctctcaaagtaaaatattgaggagcactgaaagtatgttttactttttttttattttatttttgcttttgataagaaaaccgaactgggcatatttctaattggctttactatttttatttttaaattatgttttactgttcatttgatttgtacagattctttattatcattgttcttttcaatatatttgtattaatttgtaagaatatgcatcttaaaatggcaagttttccatatttttacaactcactggtggttttccgcattctttgtacacccatgaaagaaaacttttatgcaaggtcttgcatttaaaagacagctttgcgaatattttgtaaattacagtctcactcagaactgtttttggacacatttaaggtgtagtattaataggttaaaaccaggctttctagaaagaataaacttacatatttatttttaggacatgaaaatagcaatattcttggagattgataaccatagcattaatacgcccattatggtcatttaaattggggtttatttcagcaaacttgttgaatttatttttaagaaagaaatactgtattgggaagttactgttacttgataacaatgttttaacaagaagcaatgttataaagttagtttcagtgcattatctacttgtgtagtcctatgcaataacagtagtgttacatgtatcaagcctagatgttttatacagatgccatatagtgttatgagccaggctgttgaatggaatttctcagtagcagcctacaactgaatagcaagtggcataaagcatatccattcagaatgaagtgccttaaatatagcagtagtcttttttggactagcactgactgaactgtaatgtaggggaaagtttcatgatggtatctatagtcaagacgaacatgtagcatggtgcctatgtagacaatataagagcttccaattttccttcagatatttttaatattaaatatattttagtgacagagtgccaacttctttcatcaggaaaccttattcaggagggtttttaaaaagtgtttaaatgtcaaatgtgaattggtgatgggtgatggagggttcagagaggagtgatcgtcagatgtgtgaatggacggtttaggtgaaaataatcaactgcatagttcccatgcacgctgggcaatgagaatccttggaaacattggtgatgctatcagttttatagctttatttcttaagggggtagggaaaattagttcccattctttcaacccccttaactgtatagctcttttcctagaatagtgacgcaaatctgcatgaacagctaattgtaccatagtgttcattgatacaatcatagcattgtctatttttctcttcatatttatatgggggggagggcgctggatgcaaaagttgaagatcgtgatgctatgatgttagttttccttagctgattttgagggtttttaaaaataaagcaaggttgactaacctacggccacgggaacaggaccatggttaagcaaccatatagaaagctttgttgaaagaaagtatggcatcttgtaccactgccctgactgtcacaactcctaaccttgccattgcctgcctccccctccccttctccttaagagacaatttctgcaggtggcaggtgagcaagcccaggagaatgctgcaatcttgggggtggttttatttatttcttttttgccaaatagagtgtggattcatttcaggggctagctaagccaagaggcagtggtttgggcttgttgtttgtaacaagaaaatgatccacaccactcccccgattcccgggtgcagaattgtaactcggggttgggcctctatatggagtgaccaaaatgccaaaattgtccatctgcctctgagtagggcaatggaaataccaaaccttctgactttgccaaaaagcatacaagcaacctggtcatacataggatgacaaaattctttctggttgtttttaaacaataaagcaataagaacaaatacaatacataggaagttaaaagcacaaaggaatgaacttattaatatttttgaaaaatgcactgggaaaaagttgatgtcaataacagtataaaacagccctatttcttgataaaaaatgacaaatgactgtctcttgcggatgcttggtactgtaatgttaataatagtcacctgctgttggatgcagcaataatttctgtatggtccatagcactgtatattatggatcgatattaatgtatccaatgaaataatcgacttgttcttgatagcctcattaaagcatttggtttttcacatag

SEQ ID NO: 2859 - protein, 504 aa, Homo sapiens; identical to SEQ ID NO: 252

SEQ ID NO: 2860 - DNA, 4454 bp, Homo sapiens
ctcgggataccttgtttatagtaccttctctttgccagtccatcttcaaattggaattatagaaagtagagggagggatagtctaccgtctctcactggattggtgccacctaaaacattgttatgctggaaatgctagaatataatcactatcaggtgcagacccacctcgaaaaccccaccaagtaccacatacagcaagcccaacggcagcaggtaaagcagtacctttctaccactttagcaaataaacatgccaaccaagtcctgagcttgccatgtccaaaccagcctggcgatcatgtcatgccaccggtgccggggagcagcgcacccaacagccccatggctatgcttacgcttaactccaactgtgaaaaagagggattttataagtttgaagagcaaaacagggcagagagcgagtgcccaggcatgaacacacattcacgagcgtcctgtatgcagatggatgatgtaatcgatgacatcattagcctagaatcaagttataatgaggaaatcttgggcttgatggatcctgctttgcaaatggcaaatacgttgcctgtctcgggaaacttgattgatctttatggaaaccaaggtctgcccccaccaggcctcaccatcagcaactcctgtccagccaaccttcccaacataaaaagggagctcacagagtctgaagcaagagcactggccaaagagaggcagaaaaaggacaatcacaacctgattgaacgaagaagaagatttaacataaatgaccgcattaaagaactaggtactttgattcccaagtcaaatgatccagacatgcgctggaacaagggaaccatcttaaaagcatccgtggactatatccgaaagttgcaacgagaacagcaacgcgcaaaagaacttgaaaaccgacagaagaaactggagcacgccaaccggcatttgttgctcagaatacaggaacttgaaatgcaggctcgagctcatggactttcccttattccatccacgggtctctgctctccagatttggtgaatcggatcatcaagcaagaacccgttcttgagaactgcagccaagacctccttcagcatcatgcagacctaacctgtacaacaactctcgatctcacggatggcaccatcaccttcaacaacaacctcggaactgggactgaggccaaccaagcctatagtgtccccacaaaaatgggatccaaactggaagacatcctgatggacgacaccctttctcccgtcggtgtcactgatccactcctttcctcagtgtcccccggagcttccaaaacaagcagccggaggagcagtatgagcatggaagagacggagcacacttgttagcgaatcctccctgcactgcattcgcacaaactgcttcctttcttgattcgtagatttaataacttacctgaaggggttttcttgataattttcctttaatatgaaattttttttcatgctttatcaatagcccaggatatattttatttttagaattttgtgaaacagacttgtatattctattttacaactacaaatgcctccaaagtattgtacaaataagtgtgcagtatctgtgaactgaattcaccacagactttagctttctgagcaagaggattttgcgtcagagaaatgtctgtccatttttattcaggggaaacttgatttgagatttttatgcctgtgacttccttggaaatcaaatgtaaagtttaattgaaagaatgtaaagcaaccaaaaagaaaaaaaaaaagaaagaaagaggaaaagaaatccatactaacccttttccattttataaatgtattgattcattggtactgccttaaagatacagtacccctctagctttgtttagtctttatactgcaaactatttaaagaaatatgtattctgtaaaagaaaaaaaaaatgcggccttttcatgaggatcgtctggttagaaaacataactgataccaaccgaaactgaagggagttagaccaaggctctgaaatataaagtctaatcttgctctcttttattctgtgctgttacagttttcttcatcaatgagtgtgatccagtttttcataagatattttattttgaaatggaaattaatgtcctctcaaagtaaaatattgaggagcactgaaagtatgttttactttttttttattttatttttgcttttgataagaaaaccgaactgggcatatttctaattggctttactatttttatttttaaattatgttttactgttcatttgatttgtacagattctttattatcattgttcttttcaatatatttgtattaatttgtaagaatatgcatcttaaaatggcaagttttccatatttttacaactcactggtggttttccgcattctttgtacacccatgaaagaaaacttttatgcaaggtcttgcatttaaaagacagctttgcgaatattttgtaaattacagtctcactcagaactgtttttggacacatttaaggtgtagtattaataggttaaaaccaggctttctagaaagaataaacttacatatttatttttaggacatgaaaatagcaatattcttggagattgataaccatagcattaatacgcccattatggtcatttaaattggggtttatttcagcaaacttgttgaatttatttttaagaaagaaatactgtattgggaagttactgttacttgataacaatgttttaacaagaagcaatgttataaagttagtttcagtgcattatctacttgtgtagtcctatgcaataacagtagtgttacatgtatcaagcctagatgttttatacagatgccatatagtgttatgagccaggctgttgaatggaatttctcagtagcagcctacaactgaatagcaagtggcataaagcatatccattcagaatgaagtgccttaaatatagcagtagtcttttttggactagcactgactgaactgtaatgtaggggaaagtttcatgatggtatctatagtcaagacgaacatgtagcatggtgcctatgtagacaatataagagcttccaattttccttcagatatttttaatattaaatatattttagtgacagagtgccaacttctttcatcaggaaaccttattcaggagggtttttaaaaagtgtttaaatgtcaaatgtgaattggtgatgggtgatggagggttcagagaggagtgatcgtcagatgtgtgaatggacggtttaggtgaaaataatcaactgcatagttcccatgcacgctgggcaatgagaatccttggaaacattggtgatgctatcagttttatagctttatttcttaagggggtagggaaaattagttcccattctttcaacccccttaactgtatagctcttttcctagaatagtgacgcaaatctgcatgaacagctaattgtaccatagtgttcattgatacaatcatagcattgtctatttttctcttcatatttatatgggggggagggcgctggatgcaaaagttgaagatcgtgatgctatgatgttagttttccttagctgattttgagggtttttaaaaataaagcaaggttgactaacctacggccacgggaacaggaccatggttaagcaaccatatagaaagctttgttgaaagaaagtatggcatcttgtaccactgccctgactgtcacaactcctaaccttgccattgcctgcctccccctccccttctccttaagagacaatttctgcaggtggcaggtgagcaagcccaggagaatgctgcaatcttgggggtggttttatttatttcttttttgccaaatagagtgtggattcatttcaggggctagctaagccaagaggcagtggtttgggcttgttgtttgtaacaagaaaatgatccacaccactcccccgattcccgggtgcagaattgtaactcggggttgggcctctatatggagtgaccaaaatgccaaaattgtccatctgcctctgagtagggcaatggaaataccaaaccttctgactttgccaaaaagcatacaagcaacctggtcatacataggatgacaaaattctttctggttgtttttaaacaataaagcaataagaacaaatacaatacataggaagttaaaagcacaaaggaatgaacttattaatatttttgaaaaatgcactgggaaaaagttgatgtcaataacagtataaaacagccctatttcttgataaaaaatgacaaatgactgtctcttgcggatgcttggtactgtaatgttaataatagtcacctgctgttggatgcagcaataatttctgtatggtccatagcactgtatattatggatcgatattaatgtatccaatgaaataatcgacttgttcttgatagcctcattaaagcatttggtttttcacatag

SEQ ID NO: 2861 - protein, 413 aa, Homo sapiens; identical to SEQ ID NO: 248

SEQ ID NO: 2862 - DNA, 1067 bp, Homo sapiens
ctttgccagtccatcttcaaattggaattatagaaagtagagggagggatagtctaccgtctctcactggattggtgccacctaaaacattgttatgctggaaatgctagaatataatcactatcaggtgcagacccacctcgaaaaccccaccaagtaccacatacagcaagcccaacggcagcaggtaaagcagtacctttctaccactttagcaaataaacatgccaaccaagtcctgagcttgccatgtccaaaccagcctggcgatcatgtcatgccaccggtgccggggagcagcgcacccaacagccccatggctatgcttacgcttaactccaactgtgaaaaagagtttatgaagcagtgagaatgcagagagaggagaaggggaggtggaaaaggaaaagcaaaaatagaagaggtgtgggacatgctgtttagaagttccgcttgttgtgaatgtctggaatattatttttatttctccctgagttgggggaagaaagaatggaatatgcatggatggatttgaatcatatagcacatgagactttaacggaaacgcaaaggtttaattgctggatacattctgtttcataataaaattgccactgcccgttaaatctgctttggtgaaggctggattggaaacaagactcaaactaccttcaagctaattggtgcatcaaaatttgcagcatacaaatacctgagagctgtgatttaatgctcattatttccaaattatgagatgatgagcttcatctcaatgggatttaccgtactatggactatgaagtgtttatgcaaattcggaggcaacttttctagagttggattgattttaatttctagagggactaaaatctttgcccctatgcccaaaccaactgctttatttttctctacccaaatttgtcatctagcaagatgatttgacacaagttcttccttcattatttcatcttttggtcagattccactttgtttgaaagcttagttcatcttgttgctgtgccatcagctttgtgtgaacaggtcattaaaaagtcatttgcaaatcc

SEQ ID NO: 2863 - protein, 91 aa, Homo sapiens
MLEMLEYNHYQVQTHLENPTKYHIQQAQRQQVKQYLSTTLANKHANQVLSLPCPNQPGDHVMPPVPGSSAPNSPMAMLTLNSNCEKEFMKQ

SEQ ID NO: 2864 - DNA, 1242 bp, Homo sapiens
ctttgccagtccatcttcaaattggaattatagaaagtagagggagggatagtctaccgtctctcactggattggtgccacctaaaacattgttatgctggaaatgctagaatataatcactatcaggtgcagacccacctcgaaaaccccaccaagtaccacatacagcaagcccaacggcagcaggtaaagcagtacctttctaccactttagcaaataaacatgccaaccaagtcctgagcttgccatgtccaaaccagcctggcgatcatgtcatgccaccggtgccggggagcagcgcacccaacagccccatggctatgcttacgcttaactccaactgtgaaaaagagtttatgaagcagtgagaatgcagagagaggagaaggggaggtggaaaaggaaaagcaaaaatagaagaggtgtgggacatgctgtttagaagttccgcttgttgtgaatgtctggaatattatttttatttctccctgagttgggggaagaaagaatggaatatgcatggatggatttgaatcatatagcacatgagactttaacggaaacgcaaaggtttaattgctggatacattctgtttcataataaaattgccactgcccgttaaatctgctttggtgaaggctggattggaaacaagactcaaactaccttcaagctaattggtgcatcaaaatttgcagcatacaaatacctgagagctgtgatttaatgctcattatttccaaattatgagatgatgagcttcatctcaatgggatttaccgtactatggactatgaagtgtttatgcaaattcggaggcaacttttctagagttggattgattttaatttctagagggactaaaatctttgcccctatgcccaaaccaactgctttatttttctctacccaaatttgtcatctagcaagatgatttgacacaagttcttccttcattatttcatcttttggtcagattccactttgtttgaaagcttagttcatcttgttgctgtgccatcagctttgtgtgaacaggtcattaaaaagtcatttgcaaatccaagttatagactgtttttgcttgtgtttttgcagggattttataagtttgaagagcaaaacagggcagagagcgagtgcccaggcatgaacacacattcacgagcgtcctgtatgcaggtactgaatgacttggcagcctgaggatgaacactttgtaatgagaatctatatttg

SEQ ID NO: 2865 - protein, 91 aa, Homo sapiens; identical to SEQ ID NO: 2863

SEQ ID NO: 2866 - DNA, 513 bp, Homo sapiens
gaggaaggcgggtccctggctcggctctacccccatggatctaggtgggctcaatgtcatcacaagggtgcttaagagggaaagaggaagccatgagggtcagagtcaaaggaagacttgaagatactacactgcggactttaaagatgaaggaaggggcgaaaaccaagaatgtgggaagcctctagaagctagagaaggcaaggaaacaaattttccactagagcctccagaaggaacacagccctgctgacccactgtaatgtctgacctctagatgtgtaagggtagtaagactgaaagtctcagaaaggcactgttaaattcttattcctcaactatgcaactcaaaactggggtcctcagcagtgagcgaggggtgagagaagacactgtataaacatggcacatcctcctggaaagtcaactttactcaaagctttagaaacccagctcaaactagctgaagcagaaaagacattactgcgcctataagttgaaactttggaggga

SEQ ID NO: 2867 - protein, 40 aa, Homo sapiens
MCKGSKTESLRKALLNSYSSTMQLKTGVLSSERGVREDTV

SEQ ID NO: 2868 - DNA, 2024 bp, Homo sapiens
ctgaagtcgctagacatttgaggaacacatccggggaagaagacacaggtggctggtcatggagagcccgctgggggaagagcacacagacaggcaccggcaggccattgaccagcgggacaaggtgggctcaatgtcatcacaagggtgcttaagagggaaagaggaagccatgagggtcagagtcaaaggaagacttgaagatactacactgcggactttaaagatgaaggaaggggcgaaaaccaagaatgtgggaagcctctagaagctagagaaggcaaggaaacaaattttccactagagcctccagaaggaacacagccctgctgacccactgtaatgtctgacctctagatgtgtaagggtagtaagactgaaagtctcagaaaggcactgttaaattcttattcctcaactatgcaactcaaaactggggtcctcagcagtgagcgaggggtgagagaagacactgtataaacatggcacatcctcctggaaagtcaactttactcaaagctttagaaacccagctcaaactagctgaagcagaaaagacattactgcgcctataagttgaaactttggagggataaatttcagaggtgtggctagatccaacggctctctggaaaactctgtgaaaaaaatgcttcctcaagtccagaaaccagaagctcaggaaattgttgcttggttcctcttgttagaggcagagattattcaacgacctacagggtagcgtttgaacattgttaccaggaatctttactttgccatcttccaagtctgttctcctcagtattggtttcatttacaagcaggccatctctgccctcatggcaatgatggtctttactccaggcttaagacccttactatctactatttccaaagcggagagagaacttcccacacctagtgacctgtgacacaggattttatccttcgtacagagggaattcagttggctaacataatctgccttccaatggagtaagaatgtctggactctttccttcacctacccccaagacatggaggcgtctaaaagataaataaaacttggcaactgaccgaaggaggaagaggggatttcaggcaaaatcaacgctgttcactacgaggagacttcagaaaggttgcctgcttctggggagcatagtccctgattcctcaagacatacgtttattcttttcttcaatgtctttgcctgcagtcaaaacaaaaccattacctttagccaagttcacacatttcagccaaatccatatgcatcggatcagttctgtaggttatgggtgagcatgaacatataaaagaggcacctgcctgtgcctatctactccatggaatttcaaaaggggccacttatggagaatgtctttagggacagaaccaaccaccctgtctttcctccaactctcaaagtaacttctggctttaatcctcaagtgtctatgctggagtttaagaaaaatgtttttcatagaattcatgtgtatgatattgcatgagttgtccatctttgtatatatctcaagacttgtggtgttagttaaagattcagagctctgtgtcctgaacacagagtaataccagcattactaaggatgatcgtgggattttaaaattcctcccttagatagatcttacgaacttatgttaccaatcaacataagttaagacaaaaagagcaaatttagatgtaaaaccatcttggggccaggtgctgtggctcacgcctgtaatcccagcactttgggaggccgaggcgggcggatcactaggtcaggagatcgagaccatcttggccaacacggtgaaaccctgtctctactaaaaatacaaaaaaattagccgggcatggtggcaggcgcctgtagtcccagctactagggaggctgaggcaggagaatggtgtgaaccctggaagcggagcttgcagtgagccaagatcatgccactgcactgcagcttgggcgacagagcgagactccgtctcaaaaaaaaccaaaccaac

SEQ ID NO: 2869 - protein, 69 aa, Homo sapiens
MESPLGEEHTDRHRQAIDQRDKVGSMSSQGCLRGKEEAMRVRVKGRLEDTTLRTLKMKEGAKTKNVGSL

SEQ ID NO: 2870 - DNA, 547 bp, Homo sapiens
gcccacacacacagcaacggcagcagcagcagcagctcgcaaacacttgtaatctcttcctcaggctctggcccccaaacccctctccccgccagttcctgggagagattcagaggctttcaaacctcttctgtgacctgagcttgccgacagctgaagggatgtgcacggataaaaggaacatgattggaagcttcctgaggcctcgctagaagcagatgctgcgatgcttcctgtgtagcctgcagaactaatcaagactgtctgaccggctgggcctggtggctcatgcctgaatcccagcactttgggaggccaaggcaggcggatcacctgaggtcaggagttcgagaccagcctggccaatttggtgaaaccctgtctctactaaaattacaaaaattaaccagctgacttaataaaggaaaataaaaagcactgtacgtgtgtgggagagagagcaagagagagatagctatgaaaggtttctcagtgaactatgaagcaaggtcatcagctgaaagtgaagatgtggtatggaggcatg

SEQ ID NO: 2871 - protein, 41 aa, Homo sapiens
MPESQHFGRPRQADHLRSGVRDQPGQFGETLSLLKLQKLTS

SEQ ID NO: 2872 - DNA, 2896 bp, Homo sapiens
agtcctgcagcgcctctaggctgcggatccgcgcttcaaccacctgctttgcgctgcgtccggggaagtggggaggagacgggagggagggaggaggcggggagaggaggaaagaggcagcttacacacgccttccagtccctctactcagagcagcccggagaccgctgccgccgctgccgctgctaccaccgctgccacctgaggagacccgccgcccccccgtcgccgcctcctgcgagtccttcttagcacctggcgtttcatgcacattgccactgccattattattatcattccaatacaaggaaaataaaagaagataccagcgaaaagaaccgcttacacctttccgaattactcaagtgtctcctggaaacagagggtcgttgtccccggaggagcagccgaagggcccgtgggctggtgttgaccgggagggaggaggagttgggggcattgcgtggtggaaagttgcgtgcggcagagaaccgaaggtgcagcgccacagcccaggggacggtgtgtctgggagaagacgctgcccctgcgtcgggacccgccagcgcgcgggcaccgcggggcccgggacgacgccccctcctgcggcgtggactccgtcagtggcccaccaagaaggaggaggaatatggaatccaagggggccagttcctgccgtctgctcttctgcctcttgatctccgccaccgtcttcaggccaggccttggatggtatactgtaaattcagcatatggagataccattatcataccttgccgacttgacgtacctcagaatctcatgtttggcaaatggaaatatgaaaagcccgatggctccccagtatttattgccttcagatcctctacaaagaaaagtgtgcagtacgacgatgtaccagaatacaaagacagattgaacctctcagaaaactacactttgtctatcagtaatgcaaggatcagtgatgaaaagagatttgtgtgcatgctagtaactgaggacaacgtgtttgaggcacctacaatagtcaaggtgttcaagcaaccatctaaacctgaaattgtaagcaaagcactgtttctcgaaacagagcagctaaaaaagttgggtgactgcatttcagaagacagttatccagatggcaatatcacatggtacaggaatggaaaagtgctacatccccttgaaggagcggtggtcataatttttaaaaaggaaatggacccagtgactcagctctataccatgacttccaccctggagtacaagacaaccaaggctgacatacaaatgccattcacctgctcggtgacatattatggaccatctggccagaaaacaattcattctgaacaggcagtatttgatatttactatcctacagagcaggtgacaatacaagtgctgccaccaaaaaatgccatcaaagaaggggataacatcactcttaaatgcttagggaatggcaaccctcccccagaggaatttttgttttacttaccaggacagcccgaaggaataagaagctcaaatacttacacactgacggatgtgaggcgcaatgcaacaggagactacaagtgttccctgatagacaaaaaaagcatgattgcttcaacagctatcacagttcactatttggatttgtccttaaacccaagtggagaagtgactagacagattggtgatgccctacccgtgtcatgcacaatatctgctagcaggaatgcaactgtggtatggatgaaagataacatcaggcttcgatctagcccgtcattttctagtcttcattatcaggatgctggaaactatgtctgcgaaactgctctgcaggaggttgaaggactaaagaaaagagagtcattgactctcattgtagaaggcaaacctcaaataaaaatgacaaagaaaactgatcccagtggactatctaaaacaataatctgccatgtggaaggttttccaaagccagccattcaatggacaattactggcagtggaagcgtcataaaccaagcaaaggaatctccttatattaatggcaggtattatagtaaaattatcatttcccctgaagagaatgttacattaacttgcacagcagaaaaccaactggagagaacagtaaactccttgaatgtctctgctataagtattccagaacacgatgaggcagacgagataagtgatgaaaacagagaaaaggtgaatgaccaggcaaaactaattgtgggaatcgttgttggtctcctccttgctgcccttgttgctggtgtcgtctactggctgtacatgaagaagtcaaagtgagttgtggaaaaaagatcttcatcgttcattgactttcactgggagaaaatacaatgtgctaattttgctcactccagtcgtgcatataatttatacaataaggaagatgtatccccaaatcaggttgattatatattttgtttcaactaattttgactacactgcctttgtcagggacatggcttgggatactgtttcacatgtgtccgtttatttgtctcaatcaatagcctgaattcaattatttgattttttcagtgcttgagtgaattttttaaagcgtatacttcctaaaggtcaacaaccatagactttttggttgaagttggagaagattcattaaaagtacctagtacatcttgtagggactgccaggtgtctttgcagtgacacatctggccagcaatgaaactgctgctgaggtaggaatatcttattgttattactcccatattctagttagttgactttgatccatataagagtctatatcagagaaaatcatgtcattatgtcaacttgagtttttaaaaatggattaaagtaccaacactacattaaaaatgctttagagatgtt

SEQ ID NO: 2873 - protein, 555 aa, Homo sapiens
MESKGASSCRLLFCLLISATVFRPGLGWYTVNSAYGDTIIIPCRLDVPQNLMFGKWKYEKPDGSPVFIAFRSSTKKSVQYDDVPEYKDRLNLSENYTLSISNARISDEKRFVCMLVTEDNVFEAPTIVKVFKQPSKPEIVSKALFLETEQLKKLGDCISEDSYPDGNITWYRNGKVLHPLEGAVVIIFKKEMDPVTQLYTMTSTLEYKTTKADIQMPFTCSVTYYGPSGQKTIHSEQAVFDIYYPTEQVTIQVLPPKNAIKEGDNITLKCLGNGNPPPEEFLFYLPGQPEGIRSSNTYTLTDVRRNATGDYKCSLIDKKSMIASTAITVHYLDLSLNPSGEVTRQIGDALPVSCTISASRNATVVWMKDNIRLRSSPSFSSLHYQDAGNYVCETALQEVEGLKKRESLTLIVEGKPQIKMTKKTDPSGLSKTIICHVEGFPKPAIQWTITGSGSVINQAKESPYINGRYYSKIIISPEENVTLTCTAENQLERTVNSLNVSAISIPEHDEADEISDENREKVNDQAKLIVGIVVGLLLAALVAGVVYWLYMKKSK

SEQ ID NO: 2874 - DNA, 1377 bp, Homo sapiens
gaaagaggcagcttacacacgccttccagtccctctactcagagcagcccggagaccgctgccgccgctgccgctgctaccaccgctgccacctgaggagacccgccgcccccccgtcgccgcctcctgcgagtccttcttagcacctggcgtttcatgcacattgccactgccattattattatcattccaatacaaggaaaataaaagaagataccagcgaaaagaaccgcttacacctttccgaattactcaagtgtctcctggaaacagagggtcgttgtccccggaggagcagccgaagggcccgtgggctggtgttgaccgggagggaggaggagttgggggcattgcgtggtggaaagttgcgtgcggcagagaaccgaaggtgcagcgccacagcccaggggacggtgtgtctgggagaagacgctgcccctgcgtcgggacccgccagcgcgcgggcaccgcggggcccgggacgacgccccctcctgcggcgtggactccgtcagtggcccaccaagaaggaggaggaatatggaatccaagggggccagttcctgccgtctgctcttctgcctcttgatctccgccaccgtcttcaggccaggccttggatggtatactgtaaattcagcatatggagataccattatcataccttgccgacttgacgtacctcagaatctcatgtttggcaaatggaaatatgaaaagcccgatggctccccagtatttattgccttcagatcctctacaaagaaaagtgtgcagtacgacgatgtaccagaatacaaagacagattgaacctctcagaaaactacactttgtctatcagtaatgcaaggatcagtgatgaaaagagatttgtgtgcatgctagtaactgaggacaacgtgtttgaggcacctacaatagtcaaggtgttcagtaagtagtctgcagcagtgtcactgctaagtgggattgatggccagtaccagaccatgttctttagaaagaagactgaactctctgtagtgtctctatagcaggtatctatataaggggacttaaagagatcttcattctgctcatatatactatcagcaaagaaaacaaagagtatgaaattcaaataggagatttgcagtgaggaactaaaataatattctctgttactttgtcatgtaaaaatgtcgtgagctatgaagtactactactgataactagcaggtgatcttaatttttactgacatgtacaaataagtgttgtgtgatacatacatagatatatgatatatatgtaatcatgtatatcacgcatacatatacatgtatttggctgaaccaaatgaaattgccattttgctgcataataaaaaaatataagc

SEQ ID NO: 2875 - protein, 133 aa, Homo sapiens
MESKGASSCRLLFCLLISATVFRPGLGWYTVNSAYGDTIIIPCRLDVPQNLMFGKWKYEKPDGSPVFIAFRSSTKKSVQYDDVPEYKDRLNLSENYTLSISNARISDEKRFVCMLVTEDNVFEAPTIVKVFSK

SEQ ID NO: 2876 - DNA, 1810 bp, Homo sapiens
gaaagaggcagcttacacacgccttccagtccctctactcagagcagcccggagaccgctgccgccgctgccgctgctaccaccgctgccacctgaggagacccgccgcccccccgtcgccgcctcctgcgagtccttcttagcacctggcgtttcatgcacattgccactgccattattattatcattccaatacaaggaaaataaaagaagataccagcgaaaagaaccgcttacacctttccgaattactcaagtgtctcctggaaacagagggtcgttgtccccggaggagcagccgaagggcccgtgggctggtgttgaccgggagggaggaggagttgggggcattgcgtggtggaaagttgcgtgcggcagagaaccgaaggtgcagcgccacagcccaggggacggtgtgtctgggagaagacgctgcccctgcgtcgggacccgccagcgcgcgggcaccgcggggcccgggacgacgccccctcctgcggcgtggactccgtcagtggcccaccaagaaggaggaggaatatggaatccaagggggccagttcctgccgtctgctcttctgcctcttgatctccgccaccgtcttcaggccaggccttggatggtatactgtaaattcagcatatggagataccattatcataccttgccgacttgacgtacctcagaatctcatgtttggcaaatggaaatatgaaaagcccgatggctccccagtatttattgccttcagatcctctacaaagaaaagtgtgcagtacgacgatgtaccagaatacaaagacagattgaacctctcagaaaactacactttgtctatcagtaatgcaaggatcagtgatgaaaagagatttgtgtgcatgctagtaactgaggacaacgtgtttgaggcacctacaatagtcaaggtgttcagtaagtagtctgcagcagtgtcactgctaagtgggattgatggccagtaccagaccatgttctttagaaagaagactgaactctctgtagtgtctctatagcaggtatctatataaggggacttaaagagatcttcattctgctcatatatactatcagcaaagaaaacaaagagtatgaaattcaaataggagatttgcagtgaggaactaaaataatattctctgttactttgtcatgtaaaaatgtcgtgagctatgaagtactactactgataactagcaggtgatcttaatttttactgacatgtacaaataagtgttgtgtgatacatacatagatatatgatatatatgtaatcatgtatatcacgcatacatatacatgtatttggctgaaccaaatgaaattgccattttgctgcataataaaaaaatataagcaaattcaaactatattttaacagaggtataaattttccatttatatatatccacatatataaatatcccatatatatccacatacaaatattttatatattatatatattagagatatagatacatttccatcctgacctttattgactggttattgatttagatttcaaaaagtattcacttgctttagaaaattgtcctaaaattaaaaaaactcactataccctgaatgcttatgtgggatacaccaaggggagaaagtagagtagtgatggaagaagagaaaattgtagaagaaacttggaataattatagtcactatgacaaaattactttgcctaatgatagcatatagttaatgttactgtgcaaataactgtgcaaatgaatgacttgagaagttataattaaagtatttcatcttttaaaactc

SEQ ID NO: 2877 - protein, 133 aa, Homo sapiens; identical to SEQ ID NO: 2875

SEQ ID NO: 2878 - DNA, 3964 bp, Homo sapiens
gaaagaggcagcttacacacgccttccagtccctctactcagagcagcccggagaccgctgccgccgctgccgctgctaccaccgctgccacctgaggagacccgccgcccccccgtcgccgcctcctgcgagtccttcttagcacctggcgtttcatgcacattgccactgccattattattatcattccaatacaaggaaaataaaagaagataccagcgaaaagaaccgcttacacctttccgaattactcaagtgtctcctggaaacagagggtcgttgtccccggaggagcagccgaagggcccgtgggctggtgttgaccgggagggaggaggagttgggggcattgcgtggtggaaagttgcgtgcggcagagaaccgaaggtgcagcgccacagcccaggggacggtgtgtctgggagaagacgctgcccctgcgtcgggacccgccagcgcgcgggcaccgcggggcccgggacgacgccccctcctgcggcgtggactccgtcagtggcccaccaagaaggaggaggaatatggaatccaagggggccagttcctgccgtctgctcttctgcctcttgatctccgccaccgtcttcaggccaggccttggatggtatactgtaaattcagcatatggagataccattatcataccttgccgacttgacgtacctcagaatctcatgtttggcaaatggaaatatgaaaagcccgatggctccccagtatttattgccttcagatcctctacaaagaaaagtgtgcagtacgacgatgtaccagaatacaaagacagattgaacctctcagaaaactacactttgtctatcagtaatgcaaggatcagtgatgaaaagagatttgtgtgcatgctagtaactgaggacaacgtgtttgaggcacctacaatagtcaaggtgttcaagcaaccatctaaacctgaaattgtaagcaaagcactgtttctcgaaacagagcagctaaaaaagttgggtgactgcatttcagaagacagttatccagatggcaatatcacatggtacaggaatggaaaagtgctacatccccttgaaggagcggtggtcataatttttaaaaaggaaatggacccagtgactcagctctataccatgacttccaccctggagtacaagacaaccaaggctgacatacaaatgccattcacctgctcggtgacatattatggaccatctggccagaaaacaattcattctgaacaggcagtatttgatatttactatcctacagagcaggtgacaatacaagtgctgccaccaaaaaatgccatcaaagaaggggataacatcactcttaaatgcttagggaatggcaaccctcccccagaggaatttttgttttacttaccaggacagcccgaaggaataagaagctcaaatacttacacactgacggatgtgaggcgcaatgcaacaggagactacaagtgttccctgatagacaaaaaaagcatgattgcttcaacagctatcacagttcactatttggatttgtccttaaacccaagtggagaagtgactagacagattggtgatgccctacccgtgtcatgcacaatatctgctagcaggaatgcaactgtggtatggatgaaagataacatcaggcttcgatctagcccgtcattttctagtcttcattatcaggatgctggaaactatgtctgcgaaactgctctgcaggaggttgaaggactaaagaaaagagagtcattgactctcattgtagaaggcaaacctcaaataaaaatgacaaagaaaactgatcccagtggactatctaaaacaataatctgccatgtggaaggttttccaaagccagccattcaatggacaattactggcagtggaagcgtcataaaccaagcaaaggaatctccttatattaatggcaggtattatagtaaaattatcatttcccctgaagagaatgttacattaacttgcacagcagaaaaccaactggagagaacagtaaactccttgaatgtctctgctataagtattccagaacacgatgaggcagacgagataagtgatgaaaacagagaaaaggtgaatgaccaggcaaaactaattgtgggaatcgttgttggtctcctccttgctgcccttgttgctggtgtcgtctactggctgtacatgaagaagtcaaagactgcatcaaaacatgtaaacaaggacctcggtaatatggaagaaaacaaaaagttagaagaaaacaatcacaaaactgaagcctaagagagaaactgtcctagttgtccagagataaaaatcatatagaccaattgaagcatgaacgtggattgtatttaagacataaacaaagacattgacagcaattcatggttcaagtattaagcagttcattctaccaagctgtcacaggttttcagagaattatctcaagtaaaacaaatgaaatttaattacaaacaataagaacaagttttggcagccatgataataggtcatatgttgtgtttggttcaattttttttccgtaaatgtctgcactgaggatttctttttggtttgccttttatgtaaattttttacgtagctatttttatacactgtaagctttgttctgggagttgctgttaatctgatgtataatgtaatgtttttatttcaattgtttatatggataatctgagcaggtacatttctgattctgattgctatcagcaatgccccaaactttctcataagcacctaaaacccaaaggtggcagcttgtgaagattggggacactcatattgccctaattaaaaactgtgatttttatcacaagggaggggaggccgagagtcagactgatagacaccataggagccgactctttgatatgccaccagcgaactctcagaaataaatcacagatgcatatagacacacatacataatggtactcccaaactgacaattttacctattctgaaaaagacataaaacagaatttggtagcacttacctctacagacacctgctaataaattattttctgtcaaaagaaaaaacacaagcatgtgtgagagacagtttggaaaaatcatggtcaacattcccattttcatagatcacaatgtaaatcactataattacaaattggtgttaaatcctttgggttatccactgccttaaaattatacctatttcatgtttaaaaagatatcaatcagaattggagtttttaacagtggtcattatcaaagctgtgttattttccacagaatatagaatatatatttttttcgtgtgtgtttttgttaactaccctacagatattgaatgcaccttgagataatttagtgtttttaactgatacataatttatcaagcagtacatgaaagtgtaataataaaatgtctatgtatctttagttacattcaaatttgtaactttataaacatgttttatgcttgaggaaatttttaaggtggtagtataaatggaaactttttgaagtagaccagatatgggctacttgtgactagacttttaaactttgctctttcaagcagaagcctggtttctgggagaacactgcacagcgatttctttcccaggatttacacaactttaaagggaagataaatgaacatcagatttctaggtatagaactatgttattgaaaggaaaaggaaaactggtgtttgtttcttagactcatgaaataaaaaattatgaaggcaatgaaaaataaattgaaaattaaagtcagatgagaataggaataatactttgccacttctgcattatttagaaacatacgttattgtacatttgtaaaccatttactgtctgggcaatagtgactccgtttaataaaagcttccgtagtgcattggtatggattaaatgcataaaatattcttagactcgatgctgtataaaatattatggg

SEQ ID NO: 2879 - protein, 583 aa, Homo sapiens [sequence omitted]

SEQ ID NO: 2880 - DNA, 4173 bp, Homo sapiens
gaaagaggcagcttacacacgccttccagtccctctactcagagcagcccggagaccgctgccgccgctgccgctgctaccaccgctgccacctgaggagacccgccgcccccccgtcgccgcctcctgcgagtccttcttagcacctggcgtttcatgcacattgccactgccattattattatcattccaatacaaggaaaataaaagaagataccagcgaaaagaaccgcttacacctttccgaattactcaagtgtctcctggaaacagagggtcgttgtccccggaggagcagccgaagggcccgtgggctggtgttgaccgggagggaggaggagttgggggcattgcgtggtggaaagttgcgtgcggcagagaaccgaaggtgcagcgccacagcccaggggacggtgtgtctgggagaagacgctgcccctgcgtcgggacccgccagcgcgcgggcaccgcggggcccgggacgacgccccctcctgcggcgtggactccgtcagtggcccaccaagaaggaggaggaatatggaatccaagggggccagttcctgccgtctgctcttctgcctcttgatctccgccaccgtcttcaggccaggccttggatggtatactgtaaattcagcatatggagataccattatcataccttgccgacttgacgtacctcagaatctcatgtttggcaaatggaaatatgaaaagcccgatggctccccagtatttattgccttcagatcctctacaaagaaaagtgtgcagtacgacgatgtaccagaatacaaagacagattgaacctctcagaaaactacactttgtctatcagtaatgcaaggatcagtgatgaaaagagatttgtgtgcatgctagtaactgaggacaacgtgtttgaggcacctacaatagtcaaggtgttcaagcaaccatctaaacctgaaattgtaagcaaagcactgtttctcgaaacagagcagctaaaaaagttgggtgactgcatttcagaagacagttatccagatggcaatatcacatggtacaggaatggaaaagtgctacatccccttgaaggagcggtggtcataatttttaaaaaggaaatggacccagtgactcagctctataccatgacttccaccctggagtacaagacaaccaaggctgacatacaaatgccattcacctgctcggtgacatattatggaccatctggccagaaaacaattcattctgaacaggcagtatttgatatttactatcctacagagcaggtgacaatacaagtgctgccaccaaaaaatgccatcaaagaaggggataacatcactcttaaatgcttagggaatggcaaccctcccccagaggaatttttgttttacttaccaggacagcccgaaggaataagaagctcaaatacttacacactgacggatgtgaggcgcaatgcaacaggagactacaagtgttccctgatagacaaaaaaagcatgattgcttcaacagctatcacagttcactatttggatttgtccttaaacccaagtggagaagtgactagacagattggtgatgccctacccgtgtcatgcacaatatctgctagcaggaatgcaactgtggtatggatgaaagataacatcaggcttcgatctagcccgtcattttctagtcttcattatcaggatgctggaaactatgtctgcgaaactgctctgcaggaggttgaaggactaaagaaaagagagtcattgactctcattgtagaaggcaaacctcaaataaaaatgacaaagaaaactgatcccagtggactatctaaaacaataatctgccatgtggaaggttttccaaagccagccattcaatggacaattactggcagtggaagcgtcataaaccaagcaaaggaatctccttatattaatggcaggtattatagtaaaattatcatttcccctgaagagaatgttacattaacttgcacagcagaaaaccaactggagagaacagtaaactccttgaatgtctctgctataagtattccagaacacgatgaggcagacgagataagtgatgaaaacagagaaaaggtgaatgaccaggcaaaactaattgtgggaatcgttgttggtctcctccttgctgcccttgttgctggtgtcgtctactggctgtacatgaagaagtcaaagactgcatcaaaacatgtaaacaaggacctcggtaatatggaagaaaacaaaaagttagaagaaaacaatcacaaaactgaagcctaagagagaaactgtcctagttgtccagagataaaaatcatatagaccaattgaagcatgaacgtggattgtatttaagacataaacaaagacattgacagcaattcatggttcaagtattaagcagttcattctaccaagctgtcacaggttttcagagaattatctcaagtaaaacaaatgaaatttaattacaaacaataagaacaagttttggcagccatgataataggtcatatgttgtgtttggttcaattttttttccgtaaatgtctgcactgaggatttctttttggtttgccttttatgtaaattttttacgtagctatttttatacactgtaagctttgttctgggagttgctgttaatctgatgtataatgtaatgtttttatttcaattgtttatatggataatctgagcaggtacatttctgattctgattgctatcagcaatgccccaaactttctcataagcacctaaaacccaaaggtggcagcttgtgaagattggggacactcatattgccctaattaaaaactgtgatttttatcacaagggaggggaggccgagagtcagactgatagacaccataggagccgactctttgatatgccaccagcgaactctcagaaataaatcacagatgcatatagacacacatacataatggtactcccaaactgacaattttacctattctgaaaaagacataaaacagaatttggtagcacttacctctacagacacctgctaataaattattttctgtcaaaagaaaaaacacaagcatgtgtgagagacagtttggaaaaatcatggtcaacattcccattttcatagatcacaatgtaaatcactataattacaaattggtgttaaatcctttgggttatccactgccttaaaattatacctatttcatgtttaaaaagatatcaatcagaattggagtttttaacagtggtcattatcaaagctgtgttattttccacagaatatagaatatatatttttttcgtgtgtgtttttgttaactaccctacagatattgaatgcaccttgagataatttagtgtttttaactgatacataatttatcaagcagtacatgaaagtgtaataataaaatgtctatgtatctttagttacattcaaatttgtaactttataaacatgttttatgcttgaggaaatttttaaggtggtagtataaatggaaactttttgaagtagaccagatatgggctacttgtgactagacttttaaactttgctctttcaagcagaagcctggtttctgggagaacactgcacagcgatttctttcccaggatttacacaactttaaagggaagataaatgaacatcagatttctaggtatagaactatgttattgaaaggaaaaggaaaactggtgtttgtttcttagactcatgaaataaaaaattatgaaggcaatgaaaaataaattgaaaattaaagtcagatgagaataggaataatactttgccacttctgcattatttagaaacatacgttattgtacatttgtaaaccatttactgtctgggcaatagtgactccgtttaataaaagcttccgtagtgcattggtatggattaaatgcataaaatattcttagactcgatgctgtataaaatattatgggaaaaaaagaaaatacgttattttgcctctaaacttttattgaagttttatttggcaggaaaaaaaattgaatcttggtcaacatttaaaccaaagtaaaaggggaaaaaccaaagttatttgttttgcatggctaagccattctgttatctctgtaaatactgtgatttcttttttattttctctttagaattttgttaaagaaattct

SEQ ID NO: 2881 - protein, 583 aa, Homo sapiens [sequence omitted]

SEQ ID NO: 2882 - DNA, 4752 bp, Homo sapiens
gaaagaggcagcttacacacgccttccagtccctctactcagagcagcccggagaccgctgccgccgctgccgctgctaccaccgctgccacctgaggagacccgccgcccccccgtcgccgcctcctgcgagtccttcttagcacctggcgtttcatgcacattgccactgccattattattatcattccaatacaaggaaaataaaagaagataccagcgaaaagaaccgcttacacctttccgaattactcaagtgtctcctggaaacagagggtcgttgtccccggaggagcagccgaagggcccgtgggctggtgttgaccgggagggaggaggagttgggggcattgcgtggtggaaagttgcgtgcggcagagaaccgaaggtgcagcgccacagcccaggggacggtgtgtctgggagaagacgctgcccctgcgtcgggacccgccagcgcgcgggcaccgcggggcccgggacgacgccccctcctgcggcgtggactccgtcagtggcccaccaagaaggaggaggaatatggaatccaagggggccagttcctgccgtctgctcttctgcctcttgatctccgccaccgtcttcaggccaggccttggatggtatactgtaaattcagcatatggagataccattatcataccttgccgacttgacgtacctcagaatctcatgtttggcaaatggaaatatgaaaagcccgatggctccccagtatttattgccttcagatcctctacaaagaaaagtgtgcagtacgacgatgtaccagaatacaaagacagattgaacctctcagaaaactacactttgtctatcagtaatgcaaggatcagtgatgaaaagagatttgtgtgcatgctagtaactgaggacaacgtgtttgaggcacctacaatagtcaaggtgttcaagcaaccatctaaacctgaaattgtaagcaaagcactgtttctcgaaacagagcagctaaaaaagttgggtgactgcatttcagaagacagttatccagatggcaatatcacatggtacaggaatggaaaagtgctacatccccttgaaggagcggtggtcataatttttaaaaaggaaatggacccagtgactcagctctataccatgacttccaccctggagtacaagacaaccaaggctgacatacaaatgccattcacctgctcggtgacatattatggaccatctggccagaaaacaattcattctgaacaggcagtatttgatatttactatcctacagagcaggtgacaatacaagtgctgccaccaaaaaatgccatcaaagaaggggataacatcactcttaaatgcttagggaatggcaaccctcccccagaggaatttttgttttacttaccaggacagcccgaaggaataagaagctcaaatacttacacactgacggatgtgaggcgcaatgcaacaggagactacaagtgttccctgatagacaaaaaaagcatgattgcttcaacagctatcacagttcactatttggatttgtccttaaacccaagtggagaagtgactagacagattggtgatgccctacccgtgtcatgcacaatatctgctagcaggaatgcaactgtggtatggatgaaagataacatcaggcttcgatctagcccgtcattttctagtcttcattatcaggatgctggaaactatgtctgcgaaactgctctgcaggaggttgaaggactaaagaaaagagagtcattgactctcattgtagaaggcaaacctcaaataaaaatgacaaagaaaactgatcccagtggactatctaaaacaataatctgccatgtggaaggttttccaaagccagccattcaatggacaattactggcagtggaagcgtcataaaccaagcaaaggaatctccttatattaatggcaggtattatagtaaaattatcatttcccctgaagagaatgttacattaacttgcacagcagaaaaccaactggagagaacagtaaactccttgaatgtctctgctataagtattccagaacacgatgaggcagacgagataagtgatgaaaacagagaaaaggtgaatgaccaggcaaaactaattgtgggaatcgttgttggtctcctccttgctgcccttgttgctggtgtcgtctactggctgtacatgaagaagtcaaagactgcatcaaaacatgtaaacaaggacctcggtaatatggaagaaaacaaaaagttagaagaaaacaatcacaaaactgaagcctaagagagaaactgtcctagttgtccagagataaaaatcatatagaccaattgaagcatgaacgtggattgtatttaagacataaacaaagacattgacagcaattcatggttcaagtattaagcagttcattctaccaagctgtcacaggttttcagagaattatctcaagtaaaacaaatgaaatttaattacaaacaataagaacaagttttggcagccatgataataggtcatatgttgtgtttggttcaattttttttccgtaaatgtctgcactgaggatttctttttggtttgccttttatgtaaattttttacgtagctatttttatacactgtaagctttgttctgggagttgctgttaatctgatgtataatgtaatgtttttatttcaattgtttatatggataatctgagcaggtacatttctgattctgattgctatcagcaatgccccaaactttctcataagcacctaaaacccaaaggtggcagcttgtgaagattggggacactcatattgccctaattaaaaactgtgatttttatcacaagggaggggaggccgagagtcagactgatagacaccataggagccgactctttgatatgccaccagcgaactctcagaaataaatcacagatgcatatagacacacatacataatggtactcccaaactgacaattttacctattctgaaaaagacataaaacagaatttggtagcacttacctctacagacacctgctaataaattattttctgtcaaaagaaaaaacacaagcatgtgtgagagacagtttggaaaaatcatggtcaacattcccattttcatagatcacaatgtaaatcactataattacaaattggtgttaaatcctttgggttatccactgccttaaaattatacctatttcatgtttaaaaagatatcaatcagaattggagtttttaacagtggtcattatcaaagctgtgttattttccacagaatatagaatatatatttttttcgtgtgtgtttttgttaactaccctacagatattgaatgcaccttgagataatttagtgtttttaactgatacataatttatcaagcagtacatgaaagtgtaataataaaatgtctatgtatctttagttacattcaaatttgtaactttataaacatgttttatgcttgaggaaatttttaaggtggtagtataaatggaaactttttgaagtagaccagatatgggctacttgtgactagacttttaaactttgctctttcaagcagaagcctggtttctgggagaacactgcacagcgatttctttcccaggatttacacaactttaaagggaagataaatgaacatcagatttctaggtatagaactatgttattgaaaggaaaaggaaaactggtgtttgtttcttagactcatgaaataaaaaattatgaaggcaatgaaaaataaattgaaaattaaagtcagatgagaataggaataatactttgccacttctgcattatttagaaacatacgttattgtacatttgtaaaccatttactgtctgggcaatagtgactccgtttaataaaagcttccgtagtgcattggtatggattaaatgcataaaatattcttagactcgatgctgtataaaatattatgggaaaaaaagaaaatacgttattttgcctctaaacttttattgaagttttatttggcaggaaaaaaaattgaatcttggtcaacatttaaaccaaagtaaaaggggaaaaaccaaagttatttgttttgcatggctaagccattctgttatctctgtaaatactgtgatttcttttttattttctctttagaattttgttaaagaaattctaaaatttttaaacacctgctctccacaataaatcacaaacactaaaataaaattacttccatataaatattattttctcttttggtgtgggagatcaaaggtttaaagtctaacttctaagatatatttgcagaaagaagcaacatgacaatagagagagttatgctacaattatttcttggtttccacttgcaatggttaattaagtccaaaaacagctgtcagaacctcgagagcagaacatgagaaactcagagctctggaccgaaagcagaaagtttgccgggaaaaaaaaagacaacattattaccatcgattcagtgcctggataaagaggaaagcttacttgtttaatggcagccacatgcacgaagatgctaagaagaaaaagaattccaaatcctcaacttttgaggtttcggctctccaatttaactctttggcaacaggaaacaggttttgcaagttcaaggttcactccctatatgtgattataggaattgtttgtggaaatggattaacatacccgtctatgcctaaaagataataaaactgaaatatgtcttcacaggtctccca

SEQ ID NO: 2883 - protein, 583 aa, Homo sapiens [sequence omitted]

SEQ ID NO: 2884 - DNA, 782 bp, Homo sapiens
agagcagcccggagaccgctgccgccgctgccgctgctaccaccgctgccacctgaggagacccgccgcccccccgtcgccgcctcctgcgagtccttcttagcacctggcgtttcatgcacattgccactgccattattattatcattccaatacaaggaaaataaaagaagataccagcgaaaagaaccgcttacacctttccgaattactcaagtgtctcctgcggcgtggactccgtcagtggcccaccaagaaggaggaggaatatggaatccaagggggccagttcctgccgtctgctcttctacctgggacttggttaattgcccttgttcttttaaataaaattctttctgtgagtaactgtgaatttcaaattaacctaaatgcaatattaaactgtgagtacaaatgtaggaaggtaaaattgtgtggaatatggcaaaaaaataattcctatcttacataacaaatgatattttaaaataaagccaataaacacatagttcttagaatgtattagtctgaaagattccaccttaagtgttagaggcaaagaaaaaagcagagttccagaataaatcagtggattataggacagacctcagtggaggatggcaacctttcttcatttgttcatgttctacttgatgtggttattgcaaagacaagatatatcagtagatagagccttagacagtctttcggaattaatcatcagtattacaagcttgattctggcatttagccttaaaaatgtgttgatgctataggtcttt

SEQ ID NO: 2885 - protein, 52 aa, Homo sapiens
MATFLHLFMFYLMWLLQRQDISVDRALDSLSELIISITSLILAFSLKNVLML

SEQ ID NO: 2886 - DNA, 2416 bp, Homo sapiens
gtgattttaaggtataggttttatatttttgcagagatggtcatggatctaagtatgaataacagttttgatatcagatctaagagtaaaatgtaatttatatttggatttactccattacataaatcccctgttccacccagcctcaatggatactggctagttctcaaatagttttttttttttttttgagaaatgcttgtttagtataagattaaatagcttctctgatcatactagaatggcaaatacgtatctgtttattaaaacaaaacctttatccactcagctgttttcctctttgctgttagaaaatgccacctttctaaaagagattataaaatagtaaaaaaggagtagggtttcagggtatggtttggaggttatcattttctagaatccatccaaagtgtttggttagaaatgatttgaactgcttgagtagtgatttgatggtaggcagtatggccgtatctccacggtataagaagactattctccaggcttgatcttcatgaactgtctatgctcagagactccagactgaaatctgcatagcatagatttctttatataacagctcaagagcttgggctatggatcagagcatgagtttgctttctagcttttgtctgttttttcatttgttaattgaggatagcagccaagttcatttggtaggaatattcaagaaggtaatgaatttatattatgtttgtcagtgcctagcacattgtagacactcaaccaaataataatcattatgaatcacatttttcagtaacctaataatatcagttattcacatcagaaaaacttgtgaaatacttcattttactgattgagaaatatttcagttccatctgaatacattttgggcttccataactaaactgaaaagtatattttattagaatgtttcataatctcaatgaatgtcaagtaacctttcagttttatcatctcaggaaaaacaaaagaacataattgaaaattatagctttaaaatgtaattttccacaaaaaaaagagaaaaaaacacgtgttaaaattataaagacatatgtaatgcactatattattctcagaaattgacattattatatgtgtttctgtaatttgaaaatattagaacttagaaagaaaaatttccgattgttacaatgctgtcattttgataataaaattatgattttaaatacattatttctcaagtgtaattcaatagagggagctccactgcttcccttttatgagcactgtaggatgcttccatttattatgattttccaatgacctctaatttaatagtgaacattattaaaaacctataattttaatattaaggatattttggaaagtgaatagtatcctctttctattcatataattcaaaaaatgcttccacaaataatatgtgttttaaagccccagttcttagttctttgtaccttttgcataataactcactagacatgattaaagtaggtatactcttgagaaacatactttaatacaccaaggcatcaaaagagaaaaaagttcatttctagtgataaaataatgcatgttttcatattaattttgtggtagctattaaatgtttgaaggatacagaaggtactactaacttaaaaaaaaaaacattgattctcacagcagaacctgtgtgtacttgttcactacatacctacattgttaaatatagttgcttcacaaacaatacaataagaaagaatttaagaaaacagattctatgtaaatagtctgcgtcactaactctattatttagtgattaaacggaaaaatatttagtattgagtgttggttcatcattgttgaatcagtaacggttaccaggatcattgtcaagttaataattgagaccaggaacttccttcttgctgagggcttttagtagtgatcagtggcagagggatatgaaaggctggagaagaaaacaggagacccagtcctgcctttaccagcagccctgagattttggttaatcacttcatatttctgttctgcttctttgcttatacaatgacattaggctacagctgagtgggctcccttccgtgtggttgtgagactttattctactgccaaataaaaataatatttgcattatctctttttttaatatttgcacttttttgttctcatcagtatccataatgaagcactaagcatgtaacattttgcagattgagatttcccagtcaccatgcaccataaataaaataattgagacataggaataaaaatgcattacagtataaacaagcagtaacagagtgtggaaaataaaaagacaaggaagtacaacctctcctctgtttaacactgaacaaaatttttgggagagtataatgttatatttataaatagagcaattagatttggttcagag

SEQ ID NO: 2887 - protein, 63 aa, Homo sapiens
MCFCNLKILELRKKNFRLLQCCHFDNKIMILNTLFLKCNSIEGAPLLPFYEHCRMLPFIMIFQ

SEQ ID NO: 2888 - DNA, 768 bp, Homo sapiens
ccatcagatctcatgagacccattcactgtcacaagaaccagcacaggaaagacctgcccccatgattcaatcatctcccaccaggtccttcccacaacacatgggaattatggaagctacaagatgagatttggatggggacacagagccaaaccatattagtttggttttcccttgtcttgacttcatttggacaacttgttgccagtgtattttaggatggcagggattaaaatccatccattcaacaacttcagttttgggtgacagagcgagattccgtctcaaaaaaaaaaagaaagaaagaaattacatttaataaaactgattccttcaactttaaatacatatactttttaagataaggtctccttctgttgcgcatggtgaagtatagtgagtatagctcactgcagccttgaactcctgggctaaagggatcctcccacttgagccccctgagtagcttggactacaggtcaccatgcctggctaatttaattttttgtgtatagagatggggatcttgctatattgtccaggctagtctcaaactgctaccctcaaatgatccacctatcttggcctcccaaagcctggggattacagccataagctacctcgcccagccaagattttgtttctattttgggtgcaccctttataagagatcaagtacaccattaacatgttatgtgtattacttggaaaatgaaatggaaacattatccattcaatcactaattctctcaagaagacatgcctat

SEQ ID NO: 2889 - protein, 63 aa, Homo sapiens
DLDGDTEPNHISLVFPCLDFIWTTCCQCILGWQGLKSIHSTTSVLGDRARFRLKKKKKERNYI

SEQ ID NO: 2890 - DNA, 620 bp, Homo sapiens
gtactcacagtttaatattgcatttaggttaatttgaaattcacagttactcacagaaagaattttatttaaaagaacaagggcaattaaccaagtcccagtataccatccaaggcctttgggggaaaaaaaaaaaggaagaagagagaaagagagagagaacaaaattttaaatgctttcttgaaatgacaaataacttcaagatgcatgtcgatgaaggttgtcatctgctatagttttattttaaatggtatacaaaaggtggtgctaaaatgcaaagcgacggcaatctgcaacacataaataaaaccatcttctgactttctgaagaaacaggactgggaggataccatctttcgactgttatctatcaatcaccatgtataccaaaatttcatttaaggttaagaattttgccccagtgaacagaaacataacaaagaacacacacttcatgtaaatatgcaacataacaactagttttcagcatttttaacattgttaagacagaataccaaatatgcaaagtgagaatgcattttcatttactacttgagacatgaggtttacttcaaattgcttatcatatgttcagtctcataataaaaatttatctcta

SEQ ID NO: 2891 - protein, 31 aa, Homo sapiens
MSMKVVICYSFILNGIQKVVLKCKATAICNT

SEQ ID NO: 2892 - DNA, 3054 bp, Homo sapiens
ttgggacttagtagctgtacaataaatacttgttcagttgagttggaattttctcatacagatcagactatgacagtaagatttttataaagattgttttccatcaactggatgagaaatggaatagcactttttaaaaatatctgctgctatagtaaattctctctgaagaaacacaactactatctcatggtttttcaatttatcacctgctgtctaaagatgcttgattttccaacatttatgccttactgtctctttatataatatttacctagtcatcatctttattttcttccagaagtgacttaagatttttttttcttaaggtgataggccctaggggaatatttatatcccctcaaaatatcaatcacgttaactgcaaataaatggataatcaattagattgaccactctcttgtctaaactagtctcaaggctggcttgaaaaactaggctaatcatgctatagtccaattattttagtcatataaatcagttctgaatgttcaaatgcagttagaagaaatttattttctttcatcttttcttctccaaaatattttgactatcttacatttcagagttagcactttgaacagattttctgcttcacagatttggatttgtccttaaacccaagtggagaagtgactagacagattggtgatgccctacccgtgtcatgcacaatatctgctagcaggaatgcaactgtggtatggatgaaagataacatcaggcttcgatctagcccgtcattttctagtcttcattatcaggatgctggaaactatgtctgcgaaactgctctgcaggaggttgaaggactaaagaaaagagagtcattgactctcattgtagaaggcaaacctcaaataaaaatgacaaagaaaactgatcccagtggactatctaaaacaataatctgccatgtggaaggttttccaaagccagccattcaatggacaattactggcagtggaagcgtcataaaccaagcaaaggaatctccttatattaatggcaggtattatagtaaaattatcatttcccctgaagagaatgttacattaacttgcacagcagaaaaccaactggagagaacagtaaactccttgaatgtctctgctataagtattccagaacacgatgaggcagacgagataagtgatgaaaacagagaaaaggtgaatgaccaggcaaaactaattgtgggaatcgttgttggtctcctccttgctgcccttgttgctggtgtcgtctactggctgtacatgaagaagtcaaagactgcatcaaaacatgtaaacaaggacctcggtaatatggaagaaaacaaaaagttagaagaaaacaatcacaaaactgaagcctaagagagaaactgtcctagttgtccagagataaaaatcatatagaccaattgaagcatgaacgtggattgtatttaagacataaacaaagacattgacagcaattcatggttcaagtattaagcagttcattctaccaagctgtcacaggttttcagagaattatctcaagtaaaacaaatgaaatttaattacaaacaataagaacaagttttggcagccatgataataggtcatatgttgtgtttggttcaattttttttccgtaaatgtctgcactgaggatttctttttggtttgccttttatgtaaattttttacgtagctatttttatacactgtaagctttgttctgggagttgctgttaatctgatgtataatgtaatgtttttatttcaattgtttatatggataatctgagcaggtacatttctgattctgattgctatcagcaatgccccaaactttctcataagcacctaaaacccaaaggtggcagcttgtgaagattggggacactcatattgccctaattaaaaactgtgatttttatcacaagggaggggaggccgagagtcagactgatagacaccataggagccgactctttgatatgccaccagcgaactctcagaaataaatcacagatgcatatagacacacatacataatggtactcccaaactgacaattttacctattctgaaaaagacataaaacagaatttggtagcacttacctctacagacacctgctaataaattattttctgtcaaaagaaaaaacacaagcatgtgtgagagacagtttggaaaaatcatggtcaacattcccattttcatagatcacaatgtaaatcactataattacaaattggtgttaaatcctttgggttatccactgccttaaaattatacctatttcatgtttaaaaagatatcaatcagaattggagtttttaacagtggtcattatcaaagctgtgttattttccacagaatatagaatatatatttttttcgtgtgtgtttttgttaactaccctacagatattgaatgcaccttgagataatttagtgtttttaactgatacataatttatcaagcagtacatgaaagtgtaataataaaatgtctatgtatctttagttacattcaaatttgtaactttataaacatgttttatgcttgaggaaatttttaaggtggtagtataaatggaaactttttgaagtagaccagatatgggctacttgtgactagacttttaaactttgctctttcaagcagaagcctggtttctgggagaacactgcacagcgatttctttcccaggatttacacaactttaaagggaagataaatgaacatcagatttctaggtatagaactatgttattgaaaggaaaaggaaaactggtgtttgtttcttagactcatgaaataaaaaattatgaaggcaatgaaaaataaattgaaaattaaagtcagatgagaataggaataatactttgccacttctgcattatttagaaacatacgttattgtacatttgtaaaccatttactgtctgggcaatagtgactccgtttaataaaagcttccgtagtgcattggtatggattaaatgcataaaatattcttagactcgatgctgtataaaatattatggg

SEQ ID NO: 2893 - protein, 217 aa, Homo sapiens
MKDNIRLRSSPSFSSLHYQDAGNYVCETALQEVEGLKKRESLTLIVEGKPQIKMTKKTDPSGLSKTIICHVEGFPKPAIQWTITGSGSVINQAKESPYINGRYYSKIIISPEENVTLTCTAENQLERTVNSLNVSAISIPEHDEADEISDENREKVNDQAKLIVGIVVGLLLAALVAGVVYWLYMKKSKTASKHVNKDLGNMEENKKLEENNHKTEA

SEQ ID NO: 2894 - DNA, 3842 bp, Homo sapiens
ttgggacttagtagctgtacaataaatacttgttcagttgagttggaattttctcatacagatcagactatgacagtaagatttttataaagattgttttccatcaactggatgagaaatggaatagcactttttaaaaatatctgctgctatagtaaattctctctgaagaaacacaactactatctcatggtttttcaatttatcacctgctgtctaaagatgcttgattttccaacatttatgccttactgtctctttatataatatttacctagtcatcatctttattttcttccagaagtgacttaagatttttttttcttaaggtgataggccctaggggaatatttatatcccctcaaaatatcaatcacgttaactgcaaataaatggataatcaattagattgaccactctcttgtctaaactagtctcaaggctggcttgaaaaactaggctaatcatgctatagtccaattattttagtcatataaatcagttctgaatgttcaaatgcagttagaagaaatttattttctttcatcttttcttctccaaaatattttgactatcttacatttcagagttagcactttgaacagattttctgcttcacagatttggatttgtccttaaacccaagtggagaagtgactagacagattggtgatgccctacccgtgtcatgcacaatatctgctagcaggaatgcaactgtggtatggatgaaagataacatcaggcttcgatctagcccgtcattttctagtcttcattatcaggatgctggaaactatgtctgcgaaactgctctgcaggaggttgaaggactaaagaaaagagagtcattgactctcattgtagaaggcaaacctcaaataaaaatgacaaagaaaactgatcccagtggactatctaaaacaataatctgccatgtggaaggttttccaaagccagccattcaatggacaattactggcagtggaagcgtcataaaccaagcaaaggaatctccttatattaatggcaggtattatagtaaaattatcatttcccctgaagagaatgttacattaacttgcacagcagaaaaccaactggagagaacagtaaactccttgaatgtctctgctataagtattccagaacacgatgaggcagacgagataagtgatgaaaacagagaaaaggtgaatgaccaggcaaaactaattgtgggaatcgttgttggtctcctccttgctgcccttgttgctggtgtcgtctactggctgtacatgaagaagtcaaagactgcatcaaaacatgtaaacaaggacctcggtaatatggaagaaaacaaaaagttagaagaaaacaatcacaaaactgaagcctaagagagaaactgtcctagttgtccagagataaaaatcatatagaccaattgaagcatgaacgtggattgtatttaagacataaacaaagacattgacagcaattcatggttcaagtattaagcagttcattctaccaagctgtcacaggttttcagagaattatctcaagtaaaacaaatgaaatttaattacaaacaataagaacaagttttggcagccatgataataggtcatatgttgtgtttggttcaattttttttccgtaaatgtctgcactgaggatttctttttggtttgccttttatgtaaattttttacgtagctatttttatacactgtaagctttgttctgggagttgctgttaatctgatgtataatgtaatgtttttatttcaattgtttatatggataatctgagcaggtacatttctgattctgattgctatcagcaatgccccaaactttctcataagcacctaaaacccaaaggtggcagcttgtgaagattggggacactcatattgccctaattaaaaactgtgatttttatcacaagggaggggaggccgagagtcagactgatagacaccataggagccgactctttgatatgccaccagcgaactctcagaaataaatcacagatgcatatagacacacatacataatggtactcccaaactgacaattttacctattctgaaaaagacataaaacagaatttggtagcacttacctctacagacacctgctaataaattattttctgtcaaaagaaaaaacacaagcatgtgtgagagacagtttggaaaaatcatggtcaacattcccattttcatagatcacaatgtaaatcactataattacaaattggtgttaaatcctttgggttatccactgccttaaaattatacctatttcatgtttaaaaagatatcaatcagaattggagtttttaacagtggtcattatcaaagctgtgttattttccacagaatatagaatatatatttttttcgtgtgtgtttttgttaactaccctacagatattgaatgcaccttgagataatttagtgtttttaactgatacataatttatcaagcagtacatgaaagtgtaataataaaatgtctatgtatctttagttacattcaaatttgtaactttataaacatgttttatgcttgaggaaatttttaaggtggtagtataaatggaaactttttgaagtagaccagatatgggctacttgtgactagacttttaaactttgctctttcaagcagaagcctggtttctgggagaacactgcacagcgatttctttcccaggatttacacaactttaaagggaagataaatgaacatcagatttctaggtatagaactatgttattgaaaggaaaaggaaaactggtgtttgtttcttagactcatgaaataaaaaattatgaaggcaatgaaaaataaattgaaaattaaagtcagatgagaataggaataatactttgccacttctgcattatttagaaacatacgttattgtacatttgtaaaccatttactgtctgggcaatagtgactccgtttaataaaagcttccgtagtgcattggtatggattaaatgcataaaatattcttagactcgatgctgtataaaatattatgggaaaaaaagaaaatacgttattttgcctctaaacttttattgaagttttatttggcaggaaaaaaaattgaatcttggtcaacatttaaaccaaagtaaaaggggaaaaaccaaagttatttgttttgcatggctaagccattctgttatctctgtaaatactgtgatttcttttttattttctctttagaattttgttaaagaaattctaaaatttttaaacacctgctctccacaataaatcacaaacactaaaataaaattacttccatataaatattattttctcttttggtgtgggagatcaaaggtttaaagtctaacttctaagatatatttgcagaaagaagcaacatgacaatagagagagttatgctacaattatttcttggtttccacttgcaatggttaattaagtccaaaaacagctgtcagaacctcgagagcagaacatgagaaactcagagctctggaccgaaagcagaaagtttgccgggaaaaaaaaagacaacattattaccatcgattcagtgcctggataaagaggaaagcttacttgtttaatggcagccacatgcacgaagatgctaagaagaaaaagaattccaaatcctcaacttttgaggtttcggctctccaatttaactctttggcaacaggaaacaggttttgcaagttcaaggttcactccctatatgtgattataggaattgtttgtggaaatggattaacatacccgtctatgcctaaaagataataaaactgaaatatgtcttcacaggtctccca

SEQ ID NO: 2895 - protein, 217 aa, Homo sapiens; identical to SEQ ID NO: 2893

SEQ ID NO: 2896 - DNA, 2649 bp, Homo sapiens
ggatttaccaactgaatgttgacttctttatgtatcactctctagttgctccaaacaagttatgattcttactttagatgaaaggagtggcagttaatgaagactgcatcaaaacatgtaaacaaggacctcggtaatatggaagaaaacaaaaagttagaagaaaacaatcacaaaactgaagcctaagagagaaactgtcctagttgtccagagataaaaatcatatagaccaattgaagcatgaacgtggattgtatttaagacataaacaaagacattgacagcaattcatggttcaagtattaagcagttcattctaccaagctgtcacaggttttcagagaattatctcaagtaaaacaaatgaaatttaattacaaacaataagaacaagttttggcagccatgataataggtcatatgttgtgtttggttcaattttttttccgtaaatgtctgcactgaggatttctttttggtttgccttttatgtaaattttttacgtagctatttttatacactgtaagctttgttctgggagttgctgttaatctgatgtataatgtaatgtttttatttcaattgtttatatggataatctgagcaggtacatttctgattctgattgctatcagcaatgccccaaactttctcataagcacctaaaacccaaaggtggcagcttgtgaagattggggacactcatattgccctaattaaaaactgtgatttttatcacaagggaggggaggccgagagtcagactgatagacaccataggagccgactctttgatatgccaccagcgaactctcagaaataaatcacagatgcatatagacacacatacataatggtactcccaaactgacaattttacctattctgaaaaagacataaaacagaatttggtagcacttacctctacagacacctgctaataaattattttctgtcaaaagaaaaaacacaagcatgtgtgagagacagtttggaaaaatcatggtcaacattcccattttcatagatcacaatgtaaatcactataattacaaattggtgttaaatcctttgggttatccactgccttaaaattatacctatttcatgtttaaaaagatatcaatcagaattggagtttttaacagtggtcattatcaaagctgtgttattttccacagaatatagaatatatatttttttcgtgtgtgtttttgttaactaccctacagatattgaatgcaccttgagataatttagtgtttttaactgatacataatttatcaagcagtacatgaaagtgtaataataaaatgtctatgtatctttagttacattcaaatttgtaactttataaacatgttttatgcttgaggaaatttttaaggtggtagtataaatggaaactttttgaagtagaccagatatgggctacttgtgactagacttttaaactttgctctttcaagcagaagcctggtttctgggagaacactgcacagcgatttctttcccaggatttacacaactttaaagggaagataaatgaacatcagatttctaggtatagaactatgttattgaaaggaaaaggaaaactggtgtttgtttcttagactcatgaaataaaaaattatgaaggcaatgaaaaataaattgaaaattaaagtcagatgagaataggaataatactttgccacttctgcattatttagaaacatacgttattgtacatttgtaaaccatttactgtctgggcaatagtgactccgtttaataaaagcttccgtagtgcattggtatggattaaatgcataaaatattcttagactcgatgctgtataaaatattatgggaaaaaaagaaaatacgttattttgcctctaaacttttattgaagttttatttggcaggaaaaaaaattgaatcttggtcaacatttaaaccaaagtaaaaggggaaaaaccaaagttatttgttttgcatggctaagccattctgttatctctgtaaatactgtgatttcttttttattttctctttagaattttgttaaagaaattctaaaatttttaaacacctgctctccacaataaatcacaaacactaaaataaaattacttccatataaatattattttctcttttggtgtgggagatcaaaggtttaaagtctaacttctaagatatatttgcagaaagaagcaacatgacaatagagagagttatgctacaattatttcttggtttccacttgcaatggttaattaagtccaaaaacagctgtcagaacctcgagagcagaacatgagaaactcagagctctggaccgaaagcagaaagtttgccgggaaaaaaaaagacaacattattaccatcgattcagtgcctggataaagaggaaagcttacttgtttaatggcagccacatgcacgaagatgctaagaagaaaaagaattccaaatcctcaacttttgaggtttcggctctccaatttaactctttggcaacaggaaacaggttttgcaagttcaaggttcactccctatatgtgattataggaattgtttgtggaaatggattaacatacccgtctatgcctaaaagataataaaactgaaatatgtcttcacaggtctccca

SEQ ID NO: 2897 - protein, 30 aa, Homo sapiens
MKTASKHVNKDLGNMEENKKLEENNHKTEA

SEQ ID NO: 2898 - DNA, 1861 bp, Homo sapiens
ggatttaccaactgaatgttgacttctttatgtatcactctctagttgctccaaacaagttatgattcttactttagatgaaaggagtggcagttaatgaagactgcatcaaaacatgtaaacaaggacctcggtaatatggaagaaaacaaaaagttagaagaaaacaatcacaaaactgaagcctaagagagaaactgtcctagttgtccagagataaaaatcatatagaccaattgaagcatgaacgtggattgtatttaagacataaacaaagacattgacagcaattcatggttcaagtattaagcagttcattctaccaagctgtcacaggttttcagagaattatctcaagtaaaacaaatgaaatttaattacaaacaataagaacaagttttggcagccatgataataggtcatatgttgtgtttggttcaattttttttccgtaaatgtctgcactgaggatttctttttggtttgccttttatgtaaattttttacgtagctatttttatacactgtaagctttgttctgggagttgctgttaatctgatgtataatgtaatgtttttatttcaattgtttatatggataatctgagcaggtacatttctgattctgattgctatcagcaatgccccaaactttctcataagcacctaaaacccaaaggtggcagcttgtgaagattggggacactcatattgccctaattaaaaactgtgatttttatcacaagggaggggaggccgagagtcagactgatagacaccataggagccgactctttgatatgccaccagcgaactctcagaaataaatcacagatgcatatagacacacatacataatggtactcccaaactgacaattttacctattctgaaaaagacataaaacagaatttggtagcacttacctctacagacacctgctaataaattattttctgtcaaaagaaaaaacacaagcatgtgtgagagacagtttggaaaaatcatggtcaacattcccattttcatagatcacaatgtaaatcactataattacaaattggtgttaaatcctttgggttatccactgccttaaaattatacctatttcatgtttaaaaagatatcaatcagaattggagtttttaacagtggtcattatcaaagctgtgttattttccacagaatatagaatatatatttttttcgtgtgtgtttttgttaactaccctacagatattgaatgcaccttgagataatttagtgtttttaactgatacataatttatcaagcagtacatgaaagtgtaataataaaatgtctatgtatctttagttacattcaaatttgtaactttataaacatgttttatgcttgaggaaatttttaaggtggtagtataaatggaaactttttgaagtagaccagatatgggctacttgtgactagacttttaaactttgctctttcaagcagaagcctggtttctgggagaacactgcacagcgatttctttcccaggatttacacaactttaaagggaagataaatgaacatcagatttctaggtatagaactatgttattgaaaggaaaaggaaaactggtgtttgtttcttagactcatgaaataaaaaattatgaaggcaatgaaaaataaattgaaaattaaagtcagatgagaataggaataatactttgccacttctgcattatttagaaacatacgttattgtacatttgtaaaccatttactgtctgggcaatagtgactccgtttaataaaagcttccgtagtgcattggtatggattaaatgcataaaatattcttagactcgatgctgtataaaatattatggg

SEQ ID NO: 2899 - protein, 30 aa, Homo sapiens; identical to SEQ ID NO: 2897

SEQ ID NO: 2900 - DNA, 2528 bp, Homo sapiens
gggatactttctaggatgtcaattagaagcctgaaagaaccatgccttaggaataggagcaagccaaaggtagaccaaattttactaaaattgcagtggggctccaacaaaagtcaataacctgatagaattgtgtaatcagccccttagcctaacaaaggaaagggggagccatagctgatagaaaataacattctgtagggtctctacagttcttttgttcatagggtcagcaaaatttaaaaggacaagatattcaaagagtcaagaaaatacaatcaataatctagagaaaaagtaggtaagataagcaaacaataactgaattatttgaatattgtagttaatagataaggcaatgaaaataactataaatatataagaaaatgtgtaagaaaagatactcaaaagagataaaaggagtagagaattcaaatgcaataattgaaaagagaaaaagaattatatctttcagttccaaaatgtcaatttgattttaaaggatcaaattgacatttgggaactgaaagacataatattaaacactgtgttttcagtggatgaatttaacacagatgggccacagcagagcacaggaaaaggaaattggaatacacatcgatagaagacacacagactgaagcacagagaggaaaaagaacagccaagaccaacaagagcataagaaacatgtggacacacacatgtctaagctatgtatagaattgaaattccagaagaatgaaagagcaagaatagcaatcaccggactgcatcaaaacatgtaaacaaggacctcggtaatatggaagaaaacaaaaagttagaagaaaacaatcacaaaactgaagcctaagagagaaactgtcctagttgtccagagataaaaatcatatagaccaattgaagcatgaacgtggattgtatttaagacataaacaaagacattgacagcaattcatggttcaagtattaagcagttcattctaccaagctgtcacaggttttcagagaattatctcaagtaaaacaaatgaaatttaattacaaacaataagaacaagttttggcagccatgataataggtcatatgttgtgtttggttcaattttttttccgtaaatgtctgcactgaggatttctttttggtttgccttttatgtaaattttttacgtagctatttttatacactgtaagctttgttctgggagttgctgttaatctgatgtataatgtaatgtttttatttcaattgtttatatggataatctgagcaggtacatttctgattctgattgctatcagcaatgccccaaactttctcataagcacctaaaacccaaaggtggcagcttgtgaagattggggacactcatattgccctaattaaaaactgtgatttttatcacaagggaggggaggccgagagtcagactgatagacaccataggagccgactctttgatatgccaccagcgaactctcagaaataaatcacagatgcatatagacacacatacataatggtactcccaaactgacaattttacctattctgaaaaagacataaaacagaatttggtagcacttacctctacagacacctgctaataaattattttctgtcaaaagaaaaaacacaagcatgtgtgagagacagtttggaaaaatcatggtcaacattcccattttcatagatcacaatgtaaatcactataattacaaattggtgttaaatcctttgggttatccactgccttaaaattatacctatttcatgtttaaaaagatatcaatcagaattggagtttttaacagtggtcattatcaaagctgtgttattttccacagaatatagaatatatatttttttcgtgtgtgtttttgttaactaccctacagatattgaatgcaccttgagataatttagtgtttttaactgatacataatttatcaagcagtacatgaaagtgtaataataaaatgtctatgtatctttagttacattcaaatttgtaactttataaacatgttttatgcttgaggaaatttttaaggtggtagtataaatggaaactttttgaagtagaccagatatgggctacttgtgactagacttttaaactttgctctttcaagcagaagcctggtttctgggagaacactgcacagcgatttctttcccaggatttacacaactttaaagggaagataaatgaacatcagatttctaggtatagaactatgttattgaaaggaaaaggaaaactggtgtttgtttcttagactcatgaaataaaaaattatgaaggcaatgaaaaataaattgaaaattaaagtcagatgagaataggaataatactttgccacttctgcattatttagaaacatacgttattgtacatttgtaaaccatttactgtctgggcaatagtgactccgtttaataaaagcttccgtagtgcattggtatggattaaatgcataaaatattcttagactcgatgctgtataaaatattatggg

SEQ ID NO: 2901 - protein, 38 aa, Homo sapiens [sequence omitted]

SEQ ID NO: 2902 - DNA, 3316 bp, Homo sapiens
gggatactttctaggatgtcaattagaagcctgaaagaaccatgccttaggaataggagcaagccaaaggtagaccaaattttactaaaattgcagtggggctccaacaaaagtcaataacctgatagaattgtgtaatcagccccttagcctaacaaaggaaagggggagccatagctgatagaaaataacattctgtagggtctctacagttcttttgttcatagggtcagcaaaatttaaaaggacaagatattcaaagagtcaagaaaatacaatcaataatctagagaaaaagtaggtaagataagcaaacaataactgaattatttgaatattgtagttaatagataaggcaatgaaaataactataaatatataagaaaatgtgtaagaaaagatactcaaaagagataaaaggagtagagaattcaaatgcaataattgaaaagagaaaaagaattatatctttcagttccaaaatgtcaatttgattttaaaggatcaaattgacatttgggaactgaaagacataatattaaacactgtgttttcagtggatgaatttaacacagatgggccacagcagagcacaggaaaaggaaattggaatacacatcgatagaagacacacagactgaagcacagagaggaaaaagaacagccaagaccaacaagagcataagaaacatgtggacacacacatgtctaagctatgtatagaattgaaattccagaagaatgaaagagcaagaatagcaatcaccggactgcatcaaaacatgtaaacaaggacctcggtaatatggaagaaaacaaaaagttagaagaaaacaatcacaaaactgaagcctaagagagaaactgtcctagttgtccagagataaaaatcatatagaccaattgaagcatgaacgtggattgtatttaagacataaacaaagacattgacagcaattcatggttcaagtattaagcagttcattctaccaagctgtcacaggttttcagagaattatctcaagtaaaacaaatgaaatttaattacaaacaataagaacaagttttggcagccatgataataggtcatatgttgtgtttggttcaattttttttccgtaaatgtctgcactgaggatttctttttggtttgccttttatgtaaattttttacgtagctatttttatacactgtaagctttgttctgggagttgctgttaatctgatgtataatgtaatgtttttatttcaattgtttatatggataatctgagcaggtacatttctgattctgattgctatcagcaatgccccaaactttctcataagcacctaaaacccaaaggtggcagcttgtgaagattggggacactcatattgccctaattaaaaactgtgatttttatcacaagggaggggaggccgagagtcagactgatagacaccataggagccgactctttgatatgccaccagcgaactctcagaaataaatcacagatgcatatagacacacatacataatggtactcccaaactgacaattttacctattctgaaaaagacataaaacagaatttggtagcacttacctctacagacacctgctaataaattattttctgtcaaaagaaaaaacacaagcatgtgtgagagacagtttggaaaaatcatggtcaacattcccattttcatagatcacaatgtaaatcactataattacaaattggtgttaaatcctttgggttatccactgccttaaaattatacctatttcatgtttaaaaagatatcaatcagaattggagtttttaacagtggtcattatcaaagctgtgttattttccacagaatatagaatatatatttttttcgtgtgtgtttttgttaactaccctacagatattgaatgcaccttgagataatttagtgtttttaactgatacataatttatcaagcagtacatgaaagtgtaataataaaatgtctatgtatctttagttacattcaaatttgtaactttataaacatgttttatgcttgaggaaatttttaaggtggtagtataaatggaaactttttgaagtagaccagatatgggctacttgtgactagacttttaaactttgctctttcaagcagaagcctggtttctgggagaacactgcacagcgatttctttcccaggatttacacaactttaaagggaagataaatgaacatcagatttctaggtatagaactatgttattgaaaggaaaaggaaaactggtgtttgtttcttagactcatgaaataaaaaattatgaaggcaatgaaaaataaattgaaaattaaagtcagatgagaataggaataatactttgccacttctgcattatttagaaacatacgttattgtacatttgtaaaccatttactgtctgggcaatagtgactccgtttaataaaagcttccgtagtgcattggtatggattaaatgcataaaatattcttagactcgatgctgtataaaatattatgggaaaaaaagaaaatacgttattttgcctctaaacttttattgaagttttatttggcaggaaaaaaaattgaatcttggtcaacatttaaaccaaagtaaaaggggaaaaaccaaagttatttgttttgcatggctaagccattctgttatctctgtaaatactgtgatttcttttttattttctctttagaattttgttaaagaaattctaaaatttttaaacacctgctctccacaataaatcacaaacactaaaataaaattacttccatataaatattattttctcttttggtgtgggagatcaaaggtttaaagtctaacttctaagatatatttgcagaaagaagcaacatgacaatagagagagttatgctacaattatttcttggtttccacttgcaatggttaattaagtccaaaaacagctgtcagaacctcgagagcagaacatgagaaactcagagctctggaccgaaagcagaaagtttgccgggaaaaaaaaagacaacattattaccatcgattcagtgcctggataaagaggaaagcttacttgtttaatggcagccacatgcacgaagatgctaagaagaaaaagaattccaaatcctcaacttttgaggtttcggctctccaatttaactctttggcaacaggaaacaggttttgcaagttcaaggttcactccctatatgtgattataggaattgtttgtggaaatggattaacatacccgtctatgcctaaaagataataaaactgaaatatgtcttcacaggtctccca

SEQ ID NO: 2903 - protein, 60 aa, Homo sapiens [sequence omitted]

SEQ ID NO: 2904 - DNA, 843 bp, Homo sapiens
tggctatactgggggcaaggagctgaggagaaggaatgtggaagtccagccactgagcagcgaatgagtctaaggctggaagggcgtggaagattagaacctggtggaatttgccaagttgttgactctgaggcaactttcctctcagaatacccctttctacagtggttgggtcagctttgcttaagtgcaagactagtaggagggaaagcaacatagccctatagggtgaaaactctctgactttcacatttttctttcagacccggagtggcgttggatggaagcgagtcctgcgttcactctgtcattcacggacccgagtgccacttctagcagccatctactttctaatgattcatgtcctgctcattctgtgttttacgggccattgggagccaatattaggcattgactctcagccaggagtctgactggtctaacaccacactgcaactcctgacctcttgaagtactaagctactttgctgttagtgacagttattacagtttctcagccccattgtctctgccctctgtggcaatggaaggagaatatagagaagacaaaattaaatatagatagacctgagaaggacagccaggatagaattccatttgtgcctattccctgcctcccctcccctcccccatcctaccagttggttattttctcattgcatacgtgatgtgttcactgcctagcctctccctaaagaagagagaagacaagtgggctgactgatctgctctaaatctactgtggtgattaaatcttggttacaacatcctgggaagtttcctgaacaactgtaaaataataaaattattttcagaatgaag

SEQ ID NO: 2905 - protein, 44 aa, Homo sapiens
MEASPAFTLSFTDPSATSSSHLLSNDSCPAHSVFYGPLGANIRH

SEQ ID NO: 2906 - DNA, 8192 bp, Homo sapiens
aactgctagtggctgagtccctggcggggcgcggcggtggaaggtgtcgcgtacgggcttcccgagctgacgtggcttgaattgggaggggggcagctggagcctcaggcggcagcgcttctagaaatgctgagccgattatcaggattagcaaatgttgttttgcatgaattatcaggagatgatgacactgatcagaatatgagggctcccctagaccctgaattacaccaagaatctgacatggaatttaataatactacacaagaagatgttcaggagcgcctggcttatgcagagcaattggtggtggagctaaaagatattattagacagaaggatgttcaactgcagcagaaagatgaagctctacaggaagagagaaaagctgctgataacaaaattaaaaaactaaaacttcatgcgaaggccaaattaacttctttgaataaatacatagaagaaatgaaagcacaaggagggactgttctgcctacagaacctcagtcagaggagcaactttccaagcatgacaagagttctacagaggaagagatggaaatagaaaagataaaacataagctccaggagaaggaggaactaatcagcactttgcaagcccagcttactcaggcacaggcagaacaacctgcacagagttctacagagatggaagaatttgtaatgatgaagcaacagctccaggagaaggaagaattcattagcactttacaagcccagctcagccagacacaggcagagcaagctgcacagttgagttccatgcagcaggtggtccgagagaaagatgcccgctttgaaacacaagttcgtcttcatgaagatgagcttcttcagttagtaacccaggcagatgtggaaacagagatgcaacagaaattgagggtgctgcaaaggaagcttgaggaacacgaagaatccttggtgggccgtgctcaggtcgttgacttgctgcaacaggagctgactgctgctgagcagagaaaccagattctctctcagcagttacagcagatggaagctgagcataatactttgaggaacactgtggaaacagaaagagaggagtccaagattctactggaaaagatggaacttgaagtggcagagagaaaattatccttccataatctgcaggaagaaatgcatcatcttttagaacagtttgagcaagcaggccaagcccaggctgaactagagtctcggtatagtgctttggagcagaagcacaaagcagaaatggaagagaagacctctcatattttgagtcttcaaaagactggacaagagctgcagtctgcctgtgatgctctaaaggatcaaaattcaaagcttctccaagataagaatgagcaagcagttcagtcagcccagaccattcagcaactggaagatcagctccagcaaaaatccaaagaaattagccaatttctaaatagactgcccttgcaacaacatgaaacagcatctcagacttctttcccagatgtttataatgagggcacacaggcagtcactgaggagaatattgcttctttgcagaagagagtggtagaactagagaatgaaaagggagccttgctccttagttctatagagctggaggagctgaaagctgagaatgaaaaactgtcttctcagattactctcctagaggctcagaatagaactggggaggcagacagagaagtcagtgagatcagcattgttgatattgccaacaagaggagctcttctgctgaggaaagtggacaagatgttctagaaaacacattttctcagaaacataaagaattatcagttttattgttggaaatgaaagaagctcaagaggaaattgcatttcttaaattacagctccagggaaaaagggctgaggaagcagatcatgaggtccttgaccagaaagaaatgaaacagatggagggtgagggaatagctccaattaaaatgaaagtatttcttgaagatacagggcaagattttcccttaatgccaaatgaagagagcagtcttccagcagttgaaaaagaacaggcgagcactgaacatcaaagtagaacatctgaggaaatatctttaaatgatgctggagtagaattgaaatcaacaaagcaggatggtgataaatccctttctgctgtaccagatattggtcagtgtcatcaggatgagttggaaaggttaaaaagtcaaattttggagctcgagctaaactttcataaagcacaagaaatctatgagaaaaatttagatgagaaagctaaggaaattagcaacctaaaccagttgattgaggagtttaagaaaaatgctgacaacaacagcagtgcattcactgctttgtctgaagaaagagaccagcttctctctcaggtgaaggaacttagcatggtaacagaattgagggctcaggtaaagcaactggaaatgaaccttgcagaagcagaaaggcaaagaagacttgattatgaaagccaaactgcccatgacaacctgctcactgaacagatccatagtctcagcatagaagccaaatctaaagatgtgaaaattgaagttttacagaatgaactggatgatgtgcagcttcagttttctgagcagagtaccctgataagaagcctgcaaagccagctgcaaaataaggaaagtgaagtgcttgagggggcagaacgtgtaaggcatatctcaagtaaagtggaagaactgtcccaggctctttcacagaaggaacttgaaataacaaaaatggatcagctcttactagagaaaaagagagatgtggaaaccctccaacaaaccatcgaggagaaggatcaacaagtgacagaaatcagctttagtatgactgagaaaatggttcagcttaatgaagagaagttttctcttggggttgaaattaagactcttaaagaacagctaaatttattatccagagctgaggaagcaaaaaaagagcaggtggaagaagataatgaagtttcttctggccttaaacaaaattatgatgagatgagcccagcaggacaaataagtaaggaagaacttcagcatgaatttgaccttctgaagaaagaaaatgagcagagaaagagaaagctccaggcagctcttattaacagaaaggagcttctgcaaagagtcagtagattggaagaagaattagccaacttgaaagatgaatctaagaaagaaatcccactcagtgagactgagaggggagaagtggaagaagataaagaaaacaaagaatactcagaaaaatgtgtgacttctaagtgccaagaaatagaaatttatttaaaacagacaatatctgagaaagaagtggaactacagcatataaggaaggatttggaagaaaagctggcagctgaagagcaattccaggctctggtcaaacagatgaatcagaccttgcaagataaaacaaaccaaatagatttgctccaagcagaaatcagtgaaaaccaagcaattatccagaagttaatcacaagtaacacggatgcaagtgatggggactccgtagcacttgtaaaggaaacagtggtgataagtccaccttgtacaggtagtagtgaacactggaaaccagaactagaagaaaagatactggcccttgaaaaagaaaaggagcaacttcaaaagaagctacaggaagccttaacctcccgcaaggcaattcttaaaaaggcacaggagaaagaaagacatctcagggaggagctaaagcaacagaaagatgactataatcgcttgcaagaacagtttgatgagcaaagcaaggaaaatgagaatattggagaccagctaaggcaactccagattcaagtaagggaatccatagacggaaaactcccaagcacagaccagcaggaatcgtgttcttccactccaggtttagaagaacctttattcaaagccacagaacagcatcacactcaacctgttttagagtccaacttgtgcccagactggccttctcattctgaagatgcgagtgctctgcagggcggaacttctgttgcccagattaaggcccagctgaaggaaatagaggctgagaaagtagagttagaattgaaagttagttctacaacaagtgagcttactaaaaaatcagaagaggtatttcagttacaagagcagataaataaacagggtttagaaatcgagagtctaaagacagtatcccatgaagctgaagtccatgccgaaagcctgcagcagaaattggaaagcagccaactacaaattgctggcctagaacatctaagagaattgcaacctaaactggatgaactgcaaaaactcataagcaaaaaggaagaagacgttagctacctttctggacaacttagtgagaaagaagcagctctcactaaaatacagacagagataatagaacaagaagatttaattaaggctctgcatacacagctagaaatgcaagccaaagagcatgatgagaggataaagcagctacaggtggaactttgtgaaatgaagcaaaaaccagaagagattggagaagaaagtagagcaaagcaacaaatacaaaggaaactgcaagctgcccttatttcccgaaaagaagcactaaaagaaaacaaaagtctccaagaggaattgtctttggccagaggtaccattgaacgtctcaccaagtctctggcagatgtggaaagccaagtttctgctcaaaataaagaaaaagatacggtcttaggaaggttagctcttcttcaagaagaaagagacaaactcattacagaaatggacaggtctttattggaaaatcagagtctcagcagctcctgtgaaagtctaaaactagctctagagggtcttactgaagacaaggaaaagttagtgaaggaaattgaatctttgaaatcttctaagattgcagaaagtactgagtggcaagagaaacacaaggagctacaaaaagagtatgaaattcttctgcagtcctatgagaatgttagtaatgaagcagaaaggattcagcatgtggtggaagctgtgaggcaagagaaacaagaactgtatggcaagttaagaagcacagaggcaaacaagaaggagacagaaaagcagttgcaggaagctgagcaagaaatggaggaaatgaaagaaaagatgagaaagtttgctaaatctaaacagcagaaaatcctagagctggaagaagagaatgaccggcttagggcagaggtgcaccctgcaggagatacagctaaagagtgtatggaaacacttctttcttccaatgccagcatgaaggaagaacttgaaagggtcaaaatggagtatgaaaccctttctaagaagtttcagtctttaatgtctgagaaagactctctaagtgaagaggttcaagatttaaagcatcagatagaaggtaatgtatctaaacaagctaacctagaggccaccgagaaacatgataaccaaacgaatgtcactgaagagggaacacagtctataccaggtgagactgaagagcaagactctctgagtatgagcacaagacctacatgttcagaatcggttccatcagcgaagagtgccaaccctgctgtaagtaaggatttcagctcacatgatgaaattaataactacctacagcagattgatcagctcaaagaaagaattgctggattagaggaggagaagcagaaaaacaaggaatttagccagactttagaaaatgagaaaaataccttactgagtcagatatcaacaaaggatggtgaactaaaaatgcttcaggaggaagtaaccaaaatgaacctgttaaatcagcaaatccaagaagaactctccagagttaccaaactaaaggagacagcagaagaagagaaagatgatttggaagagaggcttatgaatcaattagcagaacttaatggaagcattgggaattactgtcaggatgttacagatgcccaaataaaaaatgagctattggaatctgaaatgaagaaccttaaaaagtgtgtgagtgaattggaagaagaaaagcagcagttagtcaaggaaaaaactaaggtggaatcagaaatacgaaaggaatatttggagaaaatacaaggtgctcagaaagaacccggaaataaaagccatgcaaaggaacttcaggaactgttaaaagaaaaacaacaagaagtaaagcagctacagaaggactgcatcaggtatcaagagaaaattagtgctctggagagaactgttaaagctctagaatttgttcaaactgaatctcaaaaagatttggaaataaccaaagaaaatctggctcaagcagttgaacaccgcaaaaaggcacaagcagaattagctagcttcaaagtcctgctagatgacactcaaagtgaagcagcaagggtcctagcagacaatctcaagttgaaaaaggaacttcagtcaaataaagaatcagttaaaagccagatgaaacaaaaggatgaagatcttgagcgaagactggaacaggcagaagagaagcacctgaaagagaagaagaatatgcaagagaaactggatgctttgcgcagagaaaaagtccacttggaagagacaattggagagattcaggttactttgaacaagaaagacaaggaagttcagcaacttcaggaaaacttggacagtactgtgacccagcttgcagcctttactaagagcatgtcttccctccaggatgatcgtgacagggtgatagatgaagctaagaaatgggagaggaagtttagtgatgcgattcaaagcaaagaagaagaaattagactcaaagaagataattgcagtgttctaaaggatcaacttagacagatgtccatccatatggaagaattaaagattaacatttccaggcttgaacatgacaagcagatttgggagtccaaggcccagacagaggtccagcttcagcagaaggtctgtgatactctacagggggaaaacaaagaacttttgtcccagctagaagagacacgccacctataccacagttctcagaatgaattagctaagttggaatcagaacttaagagtctcaaagaccagttgactgatttaagtaactctttagaaaaatgtaaggaacaaaaaggaaacttggaagggatcataaggcagcaagaggctgatattcaaaattctaagttcagttatgaacaactggagactgatcttcaggcctccagagaactgaccagtaggctgcatgaagaaataaatatgaaagagcaaaagattataagcctgctttctggcaaggaagaggcaatccaagtagctattgctgaactgcgtcagcaacatgataaagaaattaaagagctggaaaacctgctgtcccaggaggaagaggagaatattgttttagaagaggagaacaaaaaggctgttgataaaaccaatcagcttatggaaacactgaaaaccatcaaaaaggaaaacattcagcaaaaggcacagttggattcctttgttaaatccatgtcttctctccaaaatgatcgagaccgcatagtgggtgactatcaacagctggaagagcgacatctctctataatcttggaaaaagaccaactcatccaagaggctgctgcagagaataataagcttaaagaagaaatacgaggcttgagaagtcatatggatgatctcaattctgagaatgccaagctagatgcagaactgatccaatatagagaagacctgaaccaagtgataacaataaaggacagccaacaaaagcagcttcttgaagttcaacttcagcaaaataaggagctggaaaataaatatgctaaattagaagaaaagctgaaggaatctgaggaagcaaatgaggatctgcggaggtcctttaatgccctacaagaagagaaacaagatttatctaaagagattgagagtttgaaagtatctatatcccagctaacaagacaagtaacagccttgcaagaagaaggtactttaggactctatcatgcccagttaaaagtaaaagaagaagaggtacacaggttaagtgctttgttttcctcctctcaaaagagaattgcagaactggaagaagaattggtttgtgttcaaaaggaagctgccaagaaggtaggtgaaattgaagataaactgaagaaagaatt

SEQ ID NO: 2907 - protein, 3264 aa, Homo sapiens
MLSRLSGLANVVLHELSGDDDTDQNMRAPLDPELHQESDMEFNNTTQEDVQERLAYAEQLVVELKDIIRQKDVQLQQKDEALQEERKAADNKIKKLKLHAKAKLTSLNKYIEEMKAQGGTVLPTEPQSEEQLSKHDKSSTEEEMEIEKIKHKLQEKEELISTLQAQLTQAQAEQPAQSSTEMEEFVMMKQQLQEKEEFISTLQAQLSQTQAEQAAQLSSMQQVVREKDARFETQVRLHEDELLQLVTQADVETEMQQKLRVLQRKLEEHEESLVGRAQVVDLLQQELTAAEQRNQILSQQLQQMEAEHNTLRNTVETEREESKILLEKMELEVAERKLSFHNLQEEMHHLLEQFEQAGQAQAELESRYSALEQKHKAEMEEKTSHILSLQKTGQELQSACDALKDQNSKLLQDKNEQAVQSAQTIQQLEDQLQQKSKEISQFLNRLPLQQHETASQTSFPDVYNEGTQAVTEENIASLQKRVVELENEKGALLLSSIELEELKAENEKLSSQITLLEAQNRTGEADREVSEISIVDIANKRSSSAEESGQDVLENTFSQKHKELSVLLLEMKEAQEEIAFLKLQLQGKRAEEADHEVLDQKEMKQMEGEGIAPIKMKVFLEDTGQDFPLMPNEESSLPAVEKEQASTEHQSRTSEEISLNDAGVELKSTKQDGDKSLSAVPDIGQCHQDELERLKSQILELELNFHKAQEIYEKNLDEKAKEISNLNQLIEEFKKNADNNSSAFTALSEERDQLLSQVKELSMVTELRAQVKQLEMNLAEAERQRRLDYESQTAHDNLLTEQIHSLSIEAKSKDVKIEVLQNELDDVQLQFSEQSTLIRSLQSQLQNKESEVLEGAERVRHISSKVEELSQALSQKELEITKMDQLLLEKKRDVETLQQTIEEKDQQVTEISFSMTEKMVQLNEEKFSLGVEIKTLKEQLNLLSRAEEAKKEQVEEDNEVSSGLKQNYDEMSPAGQISKEELQHEFDLLKKENEQRKRKLQAALINRKELLQRVSRLEEELANLKDESKKEIPLSETERGEVEEDKENKEYSEKCVTSKCQEIEIYLKQTISEKEVELQHIRKDLEEKLAAEEQFQALVKQMNQTLQDKTNQIDLLQAEISENQAIIQKLITSNTDASDGDSVALVKETVVISPPCTGSSEHWKPELEEKILALEKEKEQLQKKLQEALTSRKAILKKAQEKERHLREELKQQKDDYNRLQEQFDEQSKENENIGDQLRQLQIQVRESIDGKLPSTDQQESCSSTPGLEEPLFKATEQHHTQPVLESNLCPDWPSHSEDASALQGGTSVAQIKAQLKEIEAEKVELELKVSSTTSELTKKSEEVFQLQEQINKQGLEIESLKTVSHEAEVHAESLQQKLESSQLQIAGLEHLRELQPKLDELQKLISKKEEDVSYLSGQLSEKEAALTKIQTEIIEQEDLIKALHTQLEMQAKEHDERIKQLQVELCEMKQKPEEIGEESRAKQQIQRKLQAALISRKEALKENKSLQEELSLARGTIERLTKSLADVESQVSAQNKEKDTVLGRLALLQEERDKLITEMDRSLLENQSLSSSCESLKLALEGLTEDKEKLVKEIESLKSSKIAESTEWQEKHKELQKEYEILLQSYENVSNEAERIQHVVEAVRQEKQELYGKLRSTEANKKETEKQLQEAEQEMEEMKEKMRKFAKSKQQKILELEEENDRLRAEVHPAGDTAKECMETLLSSNASMKEELERVKMEYETLSKKFQSLMSEKDSLSEEVQDLKHQIEGNVSKQANLEATEKHDNQTNVTEEGTQSIPGETEEQDSLSMSTRPTCSESVPSAKSANPAVSKDFSSHDEINNYLQQIDQLKERIAGLEEEKQKNKEFSQTLENEKNTLLSQISTKDGELKMLQEEVTKMNLLNQQIQEELSRVTKLKETAEEEKDDLEERLMNQLAELNGSIGNYCQDVTDAQIKNELLESEMKNLKKCVSELEEEKQQLVKEKTKVESEIRKEYLEKIQGAQKEPGNKSHAKELQELLKEKQQEVKQLQKDCIRYQEKISALERTVKALEFVQTESQKDLEITKENLAQAVEHRKKAQAELASFKVLLDDTQSEAARVLADNLKLKKELQSNKESVKSQMKQKDEDLERRLEQAEEKHLKEKKNMQEKLDALRREKVHLEETIGEIQVTLNKKDKEVQQLQENLDSTVTQLAAFTKSMSSLQDDRDRVIDEAKKWERKFSDAIQSKEEEIRLKEDNCSVLKDQLRQMSIHMEELKINISRLEHDKQIWESKAQTEVQLQQKVCDTLQGENKELLSQLEETRHLYHSSQNELAKLESELKSLKDQLTDLSNSLEKCKEQKGNLEGIIRQQEADIQNSKFSYEQLETDLQASRELTSRLHEEINMKEQKIISLLSGKEEAIQVAIAELRQQHDKEIKELENLLSQEEEENIVLEEENKKAVDKTNQLMETLKTIKKENIQQKAQLDSFVKSMSSLQNDRDRIVGDYQQLEERHLSIILEKDQLIQEAAAENNKLKEEIRGLRSHMDDLNSENAKLDAELIQYREDLNQVITIKDSQQKQLLEVQLQQNKELENKYAKLEEKLKESEEANEDLRRSFNALQEEKQDLSKEIESLKVSISQLTRQVTALQEEGTLGLYHAQLKVKEEEVHRLSALFSSSQKRIAELEEELVCVQKEAAKKVGEIEDKLKKELKHLHHDAGIMRNETETAEERVAELARDLVEMEQKLLMVTKENKGLTAQIQSFGRSMSSLQNSRDHANEELDELKRKYDASLKELAQLKEQGLLNRERDALLSETAFSMNSTEENSLSHLEKLNQQLLSKDEQLLHLSSQLEDSYNQVQSFSKAMASLQNERDHLWNELEKFRKSEEGKQRSAAQPSTSPAEVQSLKKAMSSLQNDRDRLLKELKNLQQQYLQINQEITELHPLKAQLQEYQDKTKAFQIMQEELRQENLSWQHELHQLRMEKSSWEIHERRMKEQYLMAISDKDQQLSHLQNLIRELRSSSSQTQPLKVQYQRQASPETSASPDGSQNLVYETELLRTQLNDSLKEIHQKELRIQQLNSNFSQLLEEKNTLSIQLCDTSQSLRENQQHYGDLLNHCAVLEKQVQELQAGPLNIDVAPGAPQEKNGVHRKSDPEELREPQQSFSEAQQQLCNTRQEVNELRKLLEEERDQRVAAENALSVAEEQIRRLEHSEWDSSRTPIIGSCGTQEQALLIDLTSNSCRRTRSGVGWKRVLRSLCHSRTRVPLLAAIYFLMIHVLLILCFTGHL

SEQ ID NO: 2908 - DNA, 767 bp, Homo sapiens
gacccggagtggcgttggatggaagcgagtcctgcgttcactctgtcattcacggacccgagtgccacttctagcagccatctactttctaatgattcatgtcctgctcattctgtgttttacgggccatctatagacttagttgttactctttggaccactcccctcaaaacttggaattctctcacctctaacatcagaacatcaattccagtggaacagtcttcccatttacaggtcttctctccaactcttcacggaaagtgcctgcaaaaacagaggtggatacgaggacaggttggagctgcagggactggcgagtctgctttcttctactgccctgagcctgaacgcttctgcttaatctgagaatcacatttggtttgttgagcctaatatttgttgagattttgcaggaccctgatcttttgtggtcctgtaaaagatactgaggaatgtctttcagccaagccaagaggatggtttcaataaacctaataatctgaagttcagtatcattttgattgataactttctttgccttgtttgcctgtattttctcctgtttcagggggaaggtggctctgccataaacagagttcagggaaatgaacatgtcacctcataggacatctgatttaggtctcttgcagaatagggtggtgaaagtgatctgctctaaatctactgtggtgattaaatcttggttacaacatcctgggaagtttcctgaacaactgtaaaataataaaattattttcagaatg

SEQ ID NO: 2909 - protein, 44 aa, Homo sapiens [sequence omitted]

SEQ ID NO: 2910 - DNA, 505 bp, Homo sapiens
cccagctcaatgacagcttaaaggaaattcactctgtcattcacggacccgagtgccacttctagcagccatctactttctaatgattcatgtcctgctcattctgtgttttacgggccatctatagacttagttgttactctttggaccactcccctcaaaacttggaattctctcacctctaacatcagaacatcaattccagtggaacagtcttcccatttacaggtcttctctccaactcttcacggaaagtgcctgcaaaaacagaggtggatacgaggacaggttggagctgcagggactggcgagtctgctttcttctactgccctgagcctgaacgcttctgcttaatctgagaatcacatttggtttgttgagcctaatatttgttgagattttgcaggaccctgatcttttgtggtcctgtaaaagatactgaggaatgtctttcagccaagccaagaggatggtttcaataaacctaataatctgaagttcagt

SEQ ID NO: 2911 - protein, 31 aa, Homo sapiens
MSCSFCVLRAIYRLSCYSLDHSPQNLEFSHL

SEQ ID NO: 2912 - DNA, 402 bp, Homo sapiens
ctgaaggaattgaagaatctgcagcagcaatacttacagattaatcaagagatcactgagttacatccactgaaggctctaacatcagaacatcaattccagtggaacagtcttcccatttacaggtcttctctccaactcttcacggaaagtgcctgcaaaaacagaggtggatacgaggacaggttggagctgcagggactggcgagtctgctttcttctactgccctgagcctgaacgcttctgcttaatctgagaatcacatttggtttgttgagcctaatatttgttgagattttgcaggaccctgatcttttgtggtcctgtaaaagatactgaggaatgtctttcagccaagccaagaggatggtttcaataaacctaataatctgaagttcagt

SEQ ID NO: 2913 - protein, 83 aa, Homo sapiens
LKELKNLQQQYLQINQEITELHPLKALTSEHQFQWNSLPIYRSSLQLFTESACKNRGGYEDRLELQGLASLLSSTALSLNASA

SEQ ID NO: 2914 - DNA, 8192 bp, Homo sapiens; identical to SEQ ID NO: 2906

SEQ ID NO: 2915 - protein, 3264 aa, Homo sapiens; identical to SEQ ID NO: 2907

SEQ ID NO: 2916 - DNA, 6772 bp, Homo sapiens
gagtccctggcggggcgcggcggtggaaggtgtcgcgtacgggcttcccgagctgacgtggcttgaattgggaggggggcagctggagcctcaggcggcagcgcttctagaaatgctgagccgattatcaggattagcaaatgttgttttgcatgaattatcaggagatgatgacactgatcagaatatgagggctcccctagaccctgaattacaccaagaatctgacatggaatttaataatactacacaagaagatgttcaggagcgcctggcttatgcagagcaattggtggtggagctaaaagatattattagacagaaggatgttcaactgcagcagaaagatgaagctctacaggaagagagaaaagctgctgataacaaaattaaaaaactaaaacttcatgcgaaggccaaattaacttctttgaataaatacatagaagaaatgaaagcacaaggagggactgttctgcctacagaacctcagtcagaggagcaactttccaagcatgacaagagttctacagaggaagagatggaaatagaaaagataaaacataagctccaggagaaggaggaactaatcagcactttgcaagcccagcttactcaggcacaggcagaacaacctgcacagagttctacagagatggaagaatttgtaatgatgaagcaacagctccaggagaaggaagaattcattagcactttacaagcccagctcagccagacacaggcagagcaagctgcacagaaattgagggtgctgcaaaggaagcttgaggaacacgaagaatccttggtgggccgtgctcaggtcgttgacttgctgcaacaggagctgactgctgctgagcagagaaaccagattctctctcagcagttacagcagatggaagctgagcataatactttgaggaacactgtggaaacagaaagagaggagtccaagattctactggaaaagatggaacttgaagtggcagagagaaaattatccttccataatctgcaggaagaaatgcatcatcttttagaacagtttgagcaagcaggccaagcccaggctgaactagagtctcggtatagtgctttggagcagaagcacaaagcagaaatggaagagaagacctctcatattttgagtcttcaaaagactggacaagagctgcagtctgcctgtgatgctctaaaggatcaaaattcaaagcttctccaagataagaatgagcaagcagttcagtcagcccagaccattcagcaactggaagatcagctccagcaaaaatccaaagaaattagccaatttctaaatagactgcccttgcaacaacatgaaacagcatctcagacttctttcccagatgtttataatgagggcacacaggcagtcactgaggagaatattgcttctttgcagaagagagtggtagaactagagaatgaaaagggagccttgctccttagttctatagagctggaggagctgaaagctgagaatgaaaaactgtcttctcagattactctcctagaggctcagaatagaactggggaggcagacagagaagtcagtgagatcagcattgttgatattgccaacaagaggagctcttctgctgaggaaagtggacaagatgttctagaaaacacattttctcagaaacataaagaattatcagttttattgttggaaatgaaagaagctcaagaggaaattgcatttcttaaattacagctccagggaaaaagggctgaggaagcagatcatgaggtccttgaccagaaagaaatgaaacagatggagggtgagggaatagctccaattaaaatgaaagtatttcttgaagatacagggcaagattttcccttaatgccaaatgaagagagcagtcttccagcagttgaaaaagaacaggcgagcactgaacatcaaagtagaacatctgaggaaatatctttaaatgatgctggagtagaattgaaatcaacaaagcaggatggtgataaatccctttctgctgtaccagatattggtcagtgtcatcaggatgagttggaaaggttaaaaagtcaaattttggagctcgagctaaactttcataaagcacaagaaatctatgagaaaaatttagatgagaaagctaaggaaattagcaacctaaaccagttgattgaggagtttaagaaaaatgctgacaacaacagcagtgcattcactgctttgtctgaagaaagagaccagcttctctctcaggtgaaggaacttagcatggtaacagaattgagggctcaggtaaagcaactggaaatgaaccttgcagaagcagaaaggcaaagaagacttgattatgaaagccaaactgcccatgacaacctgctcactgaacagatccatagtctcagcatagaagccaaatctaaagatgtgaaaattgaagttttacagaatgaactggatgatgtgcagcttcagttttctgagcagagtaccctgataagaagcctgcaaagccagctgcaaaataaggaaagtgaagtgcttgagggggcagaacgtgtaaggcatatctcaagtaaagtggaagaactgtcccaggctctttcacagaaggaacttgaaataacaaaaatggatcagctcttactagagaaaaagagagatgtggaaaccctccaacaaaccatcgaggagaaggatcaacaagtgacagaaatcagctttagtatgactgagaaaatggttcagcttaatgaagagaagttttctcttggggttgaaattaagactcttaaagaacagctaaatttattatccagagctgaggaagcaaaaaaagagcaggtggaagaagataatgaagtttcttctggccttaaacaaaattatgatgagatgagcccagcaggacaaataagtaaggaagaacttcagcatgaatttgaccttctgaagaaagaaaatgagcagagaaagagaaagctccaggcagctcttattaacagaaaggagcttctgcaaagagtcagtagattggaagaagaattagccaacttgaaagatgaatctaagaaagaaatcccactcagtgagactgagaggggagaagtggaagaagataaagaaaacaaagaatactcagaaaaatgtgtgacttctaagtgccaagaaatagaaatttatttaaaacagacaatatctgagaaagaagtggaactacagcatataaggaaggatttggaagaaaagctggcagctgaagagcaattccaggctctggtcaaacagatgaatcagaccttgcaagataaaacaaaccaaatagatttgctccaagcagaaatcagtgaaaaccaagcaattatccagaagttaatcacaagtaacacggatgcaagtgatggggactccgtagcacttgtaaaggaaacagtggtgataagtccaccttgtacaggtagtagtgaacactggaaaccagaactagaagaaaagatactggcccttgaaaaagaaaaggagcaacttcaaaagaagctacaggaagccttaacctcccgcaaggcaattcttaaaaaggcacaggagaaagaaagacatctcagggaggagctaaagcaacagaaagatgactataatcgcttgcaagaacagtttgatgagcaaagcaaggaaaatgagaatattggagaccagctaaggcaactccagattcaagtaagggaatccatagacggaaaactcccaagcacagaccagcaggaatcgtgttcttccactccaggtttagaagaacctttattcaaagccacagaacagcatcacactcaacctgttttagagtccaacttgtgcccagactggccttctcattctgaagatgcgagtgctctgcagggcggaacttctgttgcccagattaaggcccagctgaaggaaatagaggctgagaaagtagagttagaattgaaagttagttctacaacaagtgagcttactaaaaaatcagaagaggtatttcagttacaagagcagataaataaacagggtttagaaatcgagagtctaaagacagtatcccatgaagctgaagtccatgccgaaagcctgcagcagaaattggaaagcagccaactacaaattgctggcctagaacatctaagagaattgcaacctaaactggatgaactgcaaaaactcataagcaaaaaggaagaagacgttagctacctttctggacaacttagtgagaaagaagcagctctcactaaaatacagacagagataatagaacaagaagatttaattaaggctctgcatacacagctagaaatgcaagccaaagagcatgatgagaggataaagcagctacaggtggaactttgtgaaatgaagcaaaaaccagaagagattggagaagaaagtagagcaaagcaacaaatacaaaggaaactgcaagctgcccttatttcccgaaaagaagcactaaaagaaaacaaaagtctccaagaggaattgtctttggccagaggtaccattgaacgtctcaccaagtctctggcagatgtggaaagccaagtttctgctcaaaataaagaaaaagatacggtcttaggaaggttagctcttcttcaagaagaaagagacaaactcattacagaaatggacaggtctttattggaaaatcagagtctcagcagctcctgtgaaagtctaaaactagctctagagggtcttactgaagacaaggaaaagttagtgaaggaaattgaatctttgaaatcttctaagattgcagaaagtactgagtggcaagagaaacacaaggagctacaaaaagagtatgaaattcttctgcagtcctatgagaatgttagtaatgaagcagaaaggattcagcatgtggtggaagctgtgaggcaagagaaacaagaactgtatggcaagttaagaagcacagaggcaaacaagaaggagacagaaaagcagttgcaggaagctgagcaagaaatggaggaaatgaaagaaaagatgagaaagtttgctaaatctaaacagcagaaaatcctagagctggaagaagagaatgaccggcttagggcagaggtgcaccctgcaggagatacagctaaagagtgtatggaaacacttctttcttccaatgccagcatgaaggaagaacttgaaagggtcaaaatggagtatgaaaccctttctaagaagtttcagtctttaatgtctgagaaagactctctaagtgaagaggttcaagatttaaagcatcagatagaaggtaatgtatctaaacaagctaacctagaggccaccgagaaacatgataaccaaacgaatgtcactgaagagggaacacagtctataccaggtgagactgaagagcaagactctctgagtatgagcacaagacctacatgttcagaatcggttccatcagcgaagagtgccaaccctgctgtaagtaaggatttcagctcacatgatgaaattaataactacctacagcagattgatcagctcaaagaaagaattgctggattagaggaggagaagcagaaaaacaaggaatttagccagactttagaaaatgagaaaaataccttactgagtcagatatcaacaaaggatggtgaactaaaaatgcttcaggaggaagtaaccaaaatgaacctgttaaatcagcaaatccaagaagaactctccagagttaccaaactaaaggagacagcagaagaagagaaagatgatttggaagagaggcttatgaatcaattagcagaacttaatggaagcattgggaattactgtcaggatgttacagatgcccaaataaaaaatgagctattggaatctgaaatgaagaaccttaaaaagtgtgtgagtgaattggaagaagaaaagcagcagttagtcaaggaaaaaactaaggtggaatcagaaatacgaaaggaatatttggagaaaatacaaggtgctcagaaagaacccggaaataaaagccatgcaaaggaacttcaggaactgttaaaagaaaaacaacaagaagtaaagcagctacagaaggactgcatcaggtatcaagagaaaattagtgctctggagagaactgttaaagctctagaatttgttcaaactgaatctcaaaaagatttggaaataaccaaagaaaatctggctcaagcagttgaacaccgcaaaaaggcacaagcagaattagctagcttcaaagtcctgctagatgacactcaaagtgaagcagcaagggtcctagcagacaatctcaagttgaaaaaggaacttcagtcaaataaagaatcagttaaaagccagatgaaacaaaaggatgaagatcttgagcgaagactggaacaggcagaagagaagcacctgaaagagaagaagaatatgcaagagaaactggatgctttgcgcagagaaaaagtccacttggaagagacaattggagagattcaggttactttgaacaagaaagacaaggaagttcagcaacttcaggaaaacttggacagtactgtgacccagcttgcagcctttactaagagcatgtcttccctccaggatgatcgtgacagggtgatagatgaagctaagaaatgggagaggaagtttagtgatgcgattcaaagcaaagaagaagaaattagactcaaagaagataattgcagtgttctaaaggatcaacttagacagatgtccatccatatggaagaattaaagattaacatttccagg

SEQ ID NO: 2917 - protein, 2219 aa, Homo sapiens
MLSRLSGLANVVLHELSGDDDTDQNMRAPLDPELHQESDMEFNNTTQEDVQERLAYAEQLVVELKDIIRQKDVQLQQKDEALQEERKAADNKIKKLKLHAKAKLTSLNKYIEEMKAQGGTVLPTEPQSEEQLSKHDKSSTEEEMEIEKIKHKLQEKEELISTLQAQLTQAQAEQPAQSSTEMEEFVMMKQQLQEKEEFISTLQAQLSQTQAEQAAQKLRVLQRKLEEHEESLVGRAQVVDLLQQELTAAEQRNQILSQQLQQMEAEHNTLRNTVETEREESKILLEKMELEVAERKLSFHNLQEEMHHLLEQFEQAGQAQAELESRYSALEQKHKAEMEEKTSHILSLQKTGQELQSACDALKDQNSKLLQDKNEQAVQSAQTIQQLEDQLQQKSKEISQFLNRLPLQQHETASQTSFPDVYNEGTQAVTEENIASLQKRVVELENEKGALLLSSIELEELKAENEKLSSQITLLEAQNRTGEADREVSEISIVDIANKRSSSAEESGQDVLENTFSQKHKELSVLLLEMKEAQEEIAFLKLQLQGKRAEEADHEVLDQKEMKQMEGEGIAPIKMKVFLEDTGQDFPLMPNEESSLPAVEKEQASTEHQSRTSEEISLNDAGVELKSTKQDGDKSLSAVPDIGQCHQDELERLKSQILELELNFHKAQEIYEKNLDEKAKEISNLNQLIEEFKKNADNNSSAFTALSEERDQLLSQVKELSMVTELRAQVKQLEMNLAEAERQRRLDYESQTAHDNLLTEQIHSLSIEAKSKDVKIEVLQNELDDVQLQFSEQSTLIRSLQSQLQNKESEVLEGAERVRHISSKVEELSQALSQKELEITKMDQLLLEKKRDVETLQQTIEEKDQQVTEISFSMTEKMVQLNEEKFSLGVEIKTLKEQLNLLSRAEEAKKEQVEEDNEVSSGLKQNYDEMSPAGQISKEELQHEFDLLKKENEQRKRKLQAALINRKELLQRVSRLEEELANLKDESKKEIPLSETERGEVEEDKENKEYSEKCVTSKCQEIEIYLKQTISEKEVELQHIRKDLEEKLAAEEQFQALVKQMNQTLQDKTNQIDLLQAEISENQAIIQKLITSNTDASDGDSVALVKETVVISPPCTGSSEHWKPELEEKILALEKEKEQLQKKLQEALTSRKAILKKAQEKERHLREELKQQKDDYNRLQEQFDEQSKENENIGDQLRQLQIQVRESIDGKLPSTDQQESCSSTPGLEEPLFKATEQHHTQPVLESNLCPDWPSHSEDASALQGGTSVAQIKAQLKEIEAEKVELELKVSSTTSELTKKSEEVFQLQEQINKQGLEIESLKTVSHEAEVHAESLQQKLESSQLQIAGLEHLRELQPKLDELQKLISKKEEDVSYLSGQLSEKEAALTKIQTEIIEQEDLIKALHTQLEMQAKEHDERIKQLQVELCEMKQKPEEIGEESRAKQQIQRKLQAALISRKEALKENKSLQEELSLARGTIERLTKSLADVESQVSAQNKEKDTVLGRLALLQEERDKLITEMDRSLLENQSLSSSCESLKLALEGLTEDKEKLVKEIESLKSSKIAESTEWQEKHKELQKEYEILLQSYENVSNEAERIQHVVEAVRQEKQELYGKLRSTEANKKETEKQLQEAEQEMEEMKEKMRKFAKSKQQKILELEEENDRLRAEVHPAGDTAKECMETLLSSNASMKEELERVKMEYETLSKKFQSLMSEKDSLSEEVQDLKHQIEGNVSKQANLEATEKHDNQTNVTEEGTQSIPGETEEQDSLSMSTRPTCSESVPSAKSANPAVSKDFSSHDEINNYLQQIDQLKERIAGLEEEKQKNKEFSQTLENEKNTLLSQISTKDGELKMLQEEVTKMNLLNQQIQEELSRVTKLKETAEEEKDDLEERLMNQLAELNGSIGNYCQDVTDAQIKNELLESEMKNLKKCVSELEEEKQQLVKEKTKVESEIRKEYLEKIQGAQKEPGNKSHAKELQELLKEKQQEVKQLQKDCIRYQEKISALERTVKALEFVQTESQKDLEITKENLAQAVEHRKKAQAELASFKVLLDDTQSEAARVLADNLKLKKELQSNKESVKSQMKQKDEDLERRLEQAEEKHLKEKKNMQEKLDALRREKVHLEETIGEIQVTLNKKDKEVQQLQENLDSTVTQLAAFTKSMSSLQDDRDRVIDEAKKWERKFSDAIQSKEEEIRLKEDNCSVLKDQLRQMSIHMEELKINIS

SEQ ID NO: 2918 - DNA, 2959 bp, Homo sapiens
tagtcccgcctccaggccccttcccgcgtcgcgacgcacgctgccccggaaggccgcggcgctgtagtgcggcgtgggagccccaggttctttagtggaagaacgcgaagcgaggatgagtgatccgtggaggcagtaacaggcgcggcgagggagaagtgattcccgaagaatcaaggctgggccggacccggtggcctggcaacagggtaataagagaaatgaagccaacaggtacagacccaaggatcttatctatagctgctgaagttgcaaaaagccctgagcagaatgtccctgttatactgttgaagttaaaagaaataataaacatcacacctttaggaagctcagagttgaagaaaatcaaacaagatatatattgttatgatctcattcaatattgcctcttggtcctcagtcaagattattctcgaatccagggtggttggactacaatttcccagcttacacagatattaagccattgctgtgtgggcttggagccaggagaagatgcagaggaattttacaatgaattacttccatcagctgcagaaaattttctagttttggggagacaattacaaacatgttttatcaatgcagctaaggctgaagaaaaagatgaattactacactttttccaaattgtgactgattctctcttctggcttttgggaggccatgttgaacttattcagaatgtactacaaagtgatcatttcttacatttactgcaagctgacaatgtccaaataggatctgcagtcatgatgatgctacagaatatactacagatcaacagtggtgatttactcagaataggaagaaaagccctgtattcaattttagatgaagttattttcaagcttttttcaactcctagtccagttataagaagtactgctacaaaactcctactgttgatggctgaatcccatcaggaaattttgattttactgagacaaagtacctgctacaaaggactcagacgtctactaagtaaacaggaaactgggactgaattcagtcaagaacttagacagcttgttggccttttaagcccaatggtctatcaggaagtagaagagcagaaactacatcaagcagcatgcttgattcaagcctattggaagggttttcagacaagaaagagattaaagaagcttccatctgctgtgattgctttgcagaggagtttcagatccaaacgatcaaagatgttgctggagataaataggcagaaggaagaagaggacctcaaattacaattgcaacttcaaagacagagagccatgagactttcccgagaattgcagctgagtatgctcgaaatagttcatccaggtcaggtggagaaacactatcgggaaatggaagagaaatcagcactgattatccagaaacattggagagggtacagggaaaggaaaaattttcaccaacagaggcagtctctcatagagtataaagcagctgtcacacttcaaagagcagcgcttaaattcctagcgaagtgccgtaagaaaaagaaactatttgctccttggcgaggactccaagaactcactgatgcacgccgagttgaactgaagaaacgagtggatgactatgtcagaagacatttgggctctccaatgtcagatgtggtcagtagggagctccatgcccaagctcaagaacgactgcaacactactttatgggcagggccctagaagagcgagcccagcagcacagagaagctctgatagcacagatcagcaccaacgttgaacagctaatgaaggcaccaagtctgaaggaggcagaagggaaagaacctgagctcttcctaagtagatccaggcctgtggcagccaaggccaagcaggcccatctcacaaccctgaagcacatacaagcaccctggtggaagaagcttggagaagaatctggagatgagattgatgttccaaaggatgagcttagtatagaattagaaaatttattcattggtggaaccaaaccaccttagtgagtaaccctaagaattgacacaaatctcatattttaggagattatattggttctgcctctggcatgctggtagactagggccatcctaacttattattttccagaggttctcctccagacaagacctgcagtaagcaaagagttatattctacctctctctcaattttctttttcttttctctgtatcctcatcgttagccacacacagatttgtgtggcttttattgtagaactaaacttagcatagtgttctgttgtttacatgaagtgtgtttttctttggtttcttctgttttccaactaaatatttttttctaaataaatattttcaacaattgatttgaaaaatttgtcaggattatttcaacttttcacatttgttatctgaaattcctatttcctgttaacataggaggtgtgtgcagactttattaatgtgaggaaaagaaatgctcaattgaaggacatttccctgttttctataaagcaatggttgaactcattttctattttgttatttctaaaaggaactgcataccaaaaaaatgcattctttctattaaactgtgagaactacataatgtactgtttccctttttgtcttttctcctaggaatctcaaagctaaatataatgtttaatttttgttacaatcctaggtacctttatgattatttggttccaacctaatacttttcagtttccctgtttactttaaatatgttttaataccataacattgaagccacttcaatttgtgtttgtaacaatatggaatttaagttaaaatcaattaacaaatcatgactccatatcataaagaatctggaagatgctctttgtaaaatgagtgaaaataccagtatttctggatgtaaagaccaaattgtataatattgcgcaatctctaatgttaactttagtaaaattctaatcaa

SEQ ID NO: 2919 - protein, 598 aa, Homo sapiens
MKPTGTDPRILSIAAEVAKSPEQNVPVILLKLKEIINITPLGSSELKKIKQDIYCYDLIQYCLLVLSQDYSRIQGGWTTISQLTQILSHCCVGLEPGEDAEEFYNELLPSAAENFLVLGRQLQTCFINAAKAEEKDELLHFFQIVTDSLFWLLGGHVELIQNVLQSDHFLHLLQADNVQIGSAVMMMLQNILQINSGDLLRIGRKALYSILDEVIFKLFSTPSPVIRSTATKLLLLMAESHQEILILLRQSTCYKGLRRLLSKQETGTEFSQELRQLVGLLSPMVYQEVEEQKLHQAACLIQAYWKGFQTRKRLKKLPSAVIALQRSFRSKRSKMLLEINRQKEEEDLKLQLQLQRQRAMRLSRELQLSMLEIVHPGQVEKHYREMEEKSALIIQKHWRGYRERKNFHQQRQSLIEYKAAVTLQRAALKFLAKCRKKKKLFAPWRGLQELTDARRVELKKRVDDYVRRHLGSPMSDVVSRELHAQAQERLQHYFMGRALEERAQQHREALIAQISTNVEQLMKAPSLKEAEGKEPELFLSRSRPVAAKAKQAHLTTLKHIQAPWWKKLGEESGDEIDVPKDELSIELENLFIGGTKPP

SEQ ID NO: 2920 - DNA, 1965 bp, Homo sapiens
tagtcccgcctccaggccccttcccgcgtcgcgacgcacgctgccccggaaggccgcggcgctgtagtgcggcgtgggagccccaggttctttagtggaagaacgcgaagcgaggatgagtgatccgtggaggcagtaacaggcgcggcgagggagaagtgattcccgaagaatcaaggctgggccggacccggtggcctggcaacagggtaataagagaaatgaagccaacaggtacagacccaaggatcttatctatagctgctgaagttgcaaaaagccctgagcagaatgtccctgttatactgttgaagttaaaagaaataataaacatcacacctttaggaagctcagagttgaagaaaatcaaacaagatatatattgttatgatctcattcaatattgcctcttggtcctcagtcaagattattctcgaatccagggtggttggactacaatttcccagcttacacagatattaagccattgctgtgtgggcttggagccaggagaagatgcagaggaattttacaatgaattacttccatcagctgcagaaaattttctagttttggggagacaattacaaacatgttttatcaatgcagctaaggctgaagaaaaagatgaattactacactttttccaaattgtgactgattctctcttctggcttttgggaggccatgttgaacttattcagaatgtactacaaagtgatcatttcttacatttactgcaagctgacaatgtccaaataggatctgcagtcatgatgatgctacagaatatactacagatcaacagatccaaacgatcaaagatgttgctggagataaataggcagaaggaagaagaggacctcaaattacaattgcaacttcaaagacagagagccatgagactttcccgagaattgcagctgagtatgctcgaaatagttcatccaggtcaggtggagaaacactatcgggaaatggaagagaaatcagcactgattatccagaaacattggagagggtacagggaaaggaaaaattttcaccaacagaggcagtctctcatagagtataaagcagctgtcacacttcaaagagcagcgcttaaattcctagcgaagtgccgtaagaaaaagaaactatttgctccttggcgaggactccaagaactcactgatgcacgccgagttgaactgaagaaacgagtggatgactatgtcagaagacatttgggctctccaatgtcagatgtggtcagtagggagctccatgcccaagctcaagaacgactgcaacactactttatgggcagggccctagaagagcgagcccagcagcacagagaagctctgatagcacagatcagcaccaacgttgaacagctaatgaaggcaccaagtctgaaggaggcagaagggaaagaacctgagctcttcctaagtagatccaggcctgtggcagccaaggccaagcaggcccatctcacaaccctgaagcacatacaagcaccctggtggaagaagcttggagaagaatctggagatgagattgatgttccaaaggatgagcttagtatagaattagaaaatttattcattggtggaaccaaaccaccttagtgagtaaccctaagaattgacacaaatctcatattttaggagattatattggttctgcctctggcatgctggtagactagggccatcctaacttattattttccagaggttctcctccagacaagacctgcagtaagcaaagagttatattctacctctctctcaattttctttttcttttctctgtatcctcatcgttagccacacacagatttgtgtggcttttattgtagaactaaacttagcatagtgttctgttgtttacatgaagtgtgtttttctttggtttcttctgttttccaactaaatatttttttctaaataaatattttcaacaattgatttg

SEQ ID NO: 2921 - protein, 465 aa, Homo sapiens
MKPTGTDPRILSIAAEVAKSPEQNVPVILLKLKEIINITPLGSSELKKIKQDIYCYDLIQYCLLVLSQDYSRIQGGWTTISQLTQILSHCCVGLEPGEDAEEFYNELLPSAAENFLVLGRQLQTCFINAAKAEEKDELLHFFQIVTDSLFWLLGGHVELIQNVLQSDHFLHLLQADNVQIGSAVMMMLQNILQINRSKRSKMLLEINRQKEEEDLKLQLQLQRQRAMRLSRELQLSMLEIVHPGQVEKHYREMEEKSALIIQKHWRGYRERKNFHQQRQSLIEYKAAVTLQRAALKFLAKCRKKKKLFAPWRGLQELTDARRVELKKRVDDYVRRHLGSPMSDVVSRELHAQAQERLQHYFMGRALEERAQQHREALIAQISTNVEQLMKAPSLKEAEGKEPELFLSRSRPVAAKAKQAHLTTLKHIQAPWWKKLGEESGDEIDVPKDELSIELENLFIGGTKPP

SEQ ID NO: 2922 - DNA, 2254 bp, Homo sapiens
tagtcccgcctccaggccccttcccgcgtcgcgacgcacgctgccccggaaggccgcggcgctgtagtgcggcgtgggagccccaggttctttagtggaagaacgcgaagcgaggatgagtgatccgtggaggcagtaacaggcgcggcgagggagaagtgattcccgaagaatcaaggctgggccggacccggtggcctggcaacagggtaataagagaaatgaagccaacaggtacagacccaaggatcttatctatagctgctgaagttgcaaaaagccctgagcagaatgtccctgttatactgttgaagttaaaagaaataataaacatcacacctttaggaagctcagagttgaagaaaatcaaacaagatatatattgttatgatctcattcaatattgcctcttggtcctcagtcaagattattctcgaatccagggtggttggactacaatttcccagcttacacagatattaagccattgctgtgtgggcttggagccaggagaagatgcagaggaattttacaatgaattacttccatcagctgcagaaaattttctagttttggggagacaattacaaacatgttttatcaatgcagctaaggctgaagaaaaagatgaattactacactttttccaaattgtgactgattctctcttctggcttttgggaggccatgttgaacttattcagaatgtactacaaagtgatcatttcttacatttactgcaagctgacaatgtccaaataggatctgcagtcatgatgatgctacagaatatactacagatcaacagtggtgatttactcagaataggaagaaaagccctgtattcaattttagatgaagttattttcaagcttttttcaactcctagtccagttataagaagtactgctacaaaactcctactgttgatggctgaatcccatcaggaaattttgattttactgagacaaagtacctgctacaaaggactcagacgtctactaagtaaacaggaaactgggactgaattcagtcaagaacttagacagcttgttggccttttaagcccaatggtctatcaggaagtagaagagcagatccaaacgatcaaagatgttgctggagataaataggcagaaggaagaagaggacctcaaattacaattgcaacttcaaagacagagagccatgagactttcccgagaattgcagctgagtatgctcgaaatagttcatccaggtcaggtggagaaacactatcgggaaatggaagagaaatcagcactgattatccagaaacattggagagggtacagggaaaggaaaaattttcaccaacagaggcagtctctcatagagtataaagcagctgtcacacttcaaagagcagcgcttaaattcctagcgaagtgccgtaagaaaaagaaactatttgctccttggcgaggactccaagaactcactgatgcacgccgagttgaactgaagaaacgagtggatgactatgtcagaagacatttgggctctccaatgtcagatgtggtcagtagggagctccatgcccaagctcaagaacgactgcaacactactttatgggcagggccctagaagagcgagcccagcagcacagagaagctctgatagcacagatcagcaccaacgttgaacagctaatgaaggcaccaagtctgaaggaggcagaagggaaagaacctgagctcttcctaagtagatccaggcctgtggcagccaaggccaagcaggcccatctcacaaccctgaagcacatacaagcaccctggtggaagaagcttggagaagaatctggagatgagattgatgttccaaaggatgagcttagtatagaattagaaaatttattcattggtggaaccaaaccaccttagtgagtaaccctaagaattgacacaaatctcatattttaggagattatattggttctgcctctggcatgctggtagactagggccatcctaacttattattttccagaggttctcctccagacaagacctgcagtaagcaaagagttatattctacctctctctcaattttctttttcttttctctgtatcctcatcgttagccacacacagatttgtgtggcttttattgtagaactaaacttagcatagtgttctgttgtttacatgaagtgtgtttttctttggtttcttctgttttccaactaaatatttttttctaaataaatattttcaacaattgatttg

SEQ ID NO: 2923 - protein, 303 aa, Homo sapiens
MKPTGTDPRILSIAAEVAKSPEQNVPVILLKLKEIINITPLGSSELKKIKQDIYCYDLIQYCLLVLSQDYSRIQGGWTTISQLTQILSHCCVGLEPGEDAEEFYNELLPSAAENFLVLGRQLQTCFINAAKAEEKDELLHFFQIVTDSLFWLLGGHVELIQNVLQSDHFLHLLQADNVQIGSAVMMMLQNILQINSGDLLRIGRKALYSILDEVIFKLFSTPSPVIRSTATKLLLLMAESHQEILILLRQSTCYKGLRRLLSKQETGTEFSQELRQLVGLLSPMVYQEVEEQIQTIKDVAGDK

SEQ ID NO: 2924 - DNA, 828 bp, Homo sapiens
gtctgggtgacttggctggcgggatcaagtgcagctgcttcaggctgaggtggcagatagtgagcgctggtggcggagttaaagtcaaagcaggagagtaattatgaatagcgcagcgggattctcacacctagaccgtcgcgagcgggttctcaagttaggggagagtttcgagaagcagccgcgctgcgccttccacactgtgcgctatgacttcaaacctgcttctattgacacttcttctgaaggataccttgaggttggtgaaggtgaacaggtgaccataactctgccaaatatagaaagttgaaggaagcagtaaaattcagtatcgtaaagaacaacagcaacaacaaatgtggaattcagccaggactcccaatcttgtaaaacattctccatctgaagataagatgtccccagcatctccaatagatgatatcgaaagagaactgaaggcagaagctagtctaatggaccagatgagtagttgtgatagttcatcagattccaaaagttcatcatcttcaagtagtgaggatagttctagtgactcagaagatgaagattgcaaatcctctacttctgatacagggaattgtgtctcaggacatcctaccatgacacagtacaggattcctgatatagatgccagtcataatagatttcgagacaacagtggccttctgatgaatactttaagaaatgatttgcagctgagtgaatcaggaagtgacagtgatgactgaagaaatatttagctataaataaaaatttatacagcatgtataatttattttgtattaacaataaaaattcctaagactg

SEQ ID NO: 2925 - protein, 130 aa, Homo sapiens
MWNSARTPNLVKHSPSEDKMSPASPIDDIERELKAEASLMDQMSSCDSSSDSKSSSSSSSEDSSSDSEDEDCKSSTSDTGNCVSGHPTMTQYRIPDIDASHNRFRDNSGLLMNTLRNDLQLSESGSDSDD

SEQ ID NO: 2926 - DNA, 887 bp, Homo sapiens
gtctgggtgacttggctggcgggatcaagtgcagctgcttcaggctgaggtggcagatagtgagcgctggtggcggagttaaagtcaaagcaggagagtaattatgaatagcgcagcgggattctcacacctagaccgtcgcgagcgggttctcaagttaggggagagtttcgagaagcagccgcgctgcgccttccacactgtgcgctatgacttcaaacctgcttctattgacacttcttctgaaggataccttgaggttggtgaaggtgaacaggtgaccataactctgccaaatatagaaagttgaaggaagcagtaaaattcagtatcgtaaagaacaacagcaacaacaaatgtggaattcagccaggactcccaatcttgtaaaacattctccatctgaagataagatgtccccagcatctccaatagatgatatcgaaagagaactgaaggcagaagctagtctaatggaccagatgagtagttgtgatagttcatcagattccaaaagttcatcatcttcaagtagtgaggatagttctagtgactcagaagatgaagattgcaaatcctctacttctgatacagggaattgtgtctcaggacatcctaccatgacacagtacaggattcctgatatagatgccagtcataatagatttcgagacaacagtggccttctgatgaatactttaagaaatgatttgcagctgagtgaatcaggaagtgacagtgatgactgaagaaatatttagctataaataaaaatttatacagcatgtataatttattttgtattaacaataaaaattcctaagactgagggaaatatgtcttaacttttgatgataaaagaaattaaatttgattcagaaatttca

SEQ ID NO: 2927 - protein, 130 aa, Homo sapiens; identical to SEQ ID NO: 2925

SEQ ID NO: 2928 - DNA, 961 bp, Homo sapiens
gggtgacttggctggcgggatcaagtgcagctgcttcaggctgaggtggcagatagtgagcgctggtggcggagttaaagtcaaagcaggagagtaattatgaatagcgcagcgggattctcacacctagaccgtcgcgagcgggttctcaagttaggggagagtttcgagaagcagccgcgctgcgccttccacactgtgcgctatgacttcaaacctgcttctattgacacttcttctgaaggataccttgaggttggtgaaggtgaacaggtgaccataactctgccaaatatagaaggttcaactccaccagtaactgttttcaaaggttcaaaaaaaccttacttaaaagaatgcattttgattattaaccatgatactggagaatgtcggctagaaaaactcagcagcaacatcactgtaaaaaaaacaagagttgaaggaagcagtaaaattcagtatcgtaaagaacaacagcaacaacaaatgtggaattcagccaggactcccaatcttgtaaaacattctccatctgaagataagatgtccccagcatctccaatagatgatatcgaaagagaactgaaggcagaagctagtctaatggaccagatgagtagttgtgatagttcatcagattccaaaagttcatcatcttcaagtagtgaggatagttctagtgactcagaagatgaagattgcaaatcctctacttctgatacagggaattgtgtctcaggacatcctaccatgacacagtacaggattcctgatatagatgccagtcataatagatttcgagacaacagtggccttctgatgaatactttaagaaatgatttgcagctgagtgaatcaggaagtgacagtgatgactgaagaaatatttagctataaataaaaatttatacagcatgtataatttattttgtattaacaataaaaattcctaagactg

SEQ ID NO: 2929 - protein, 260 aa, Homo sapiens; identical to SEQ ID NO: 264

SEQ ID NO: 2930 - DNA, 1020 bp, Homo sapiens
gggtgacttggctggcgggatcaagtgcagctgcttcaggctgaggtggcagatagtgagcgctggtggcggagttaaagtcaaagcaggagagtaattatgaatagcgcagcgggattctcacacctagaccgtcgcgagcgggttctcaagttaggggagagtttcgagaagcagccgcgctgcgccttccacactgtgcgctatgacttcaaacctgcttctattgacacttcttctgaaggataccttgaggttggtgaaggtgaacaggtgaccataactctgccaaatatagaaggttcaactccaccagtaactgttttcaaaggttcaaaaaaaccttacttaaaagaatgcattttgattattaaccatgatactggagaatgtcggctagaaaaactcagcagcaacatcactgtaaaaaaaacaagagttgaaggaagcagtaaaattcagtatcgtaaagaacaacagcaacaacaaatgtggaattcagccaggactcccaatcttgtaaaacattctccatctgaagataagatgtccccagcatctccaatagatgatatcgaaagagaactgaaggcagaagctagtctaatggaccagatgagtagttgtgatagttcatcagattccaaaagttcatcatcttcaagtagtgaggatagttctagtgactcagaagatgaagattgcaaatcctctacttctgatacagggaattgtgtctcaggacatcctaccatgacacagtacaggattcctgatatagatgccagtcataatagatttcgagacaacagtggccttctgatgaatactttaagaaatgatttgcagctgagtgaatcaggaagtgacagtgatgactgaagaaatatttagctataaataaaaatttatacagcatgtataatttattttgtattaacaataaaaattcctaagactgagggaaatatgtcttaacttttgatgataaaagaaattaaatttgattcagaaatttca

SEQ ID NO: 2931 - protein, 260 aa, Homo sapiens; identical to SEQ ID NO: 264

SEQ ID NO: 2932 - DNA, 765 bp, Homo sapiens
gacttggctggcgggatcaagtgcagctgcttcaggctgaggtggcagatagtgagcgctggtggcggagttaaagtcaaagcaggagagtaattatgaatagcgcagcgggattctcacacctagaccgtcgcgagcgggttctcaagttaggggagagtttcgagaagcagccgcgctgcgccttccacactgtgcgctaattgtagagcgggaaggaaacttcaagatcactgaattataacttctcatttttctgtggtaaaactagctccccacgatgagatggtgctgtgctggctctgcagtttctctctcttcagtcccattttccggaagtgtgatatgcgtctttatctggtttttccatgcctttttctcaaatagtatctactctctccttttctcttccttctcaggagcaattctgcctgtctgatataagacttcaggcaaacccggatgtgaatcctggtctccaccacctatatatataatgtgactttgggaacattctctaagctctcaacctcagttttcttatggctaaaagataatagtaatatttacatttcatggtttgtgtaaggattaaataagatagcataaacaacctggaacaatatttgccacagggtagagaataaatagtagtcaccattaatgttgaagagttatattcatatgtgtacgaggggtgctaatgaatgtaatttagtcagactttgaaacagcatttatcagagtttagcaataaaaactatc

SEQ ID NO: 2933 - protein, 52 aa, Homo sapiens
MRWCCAGSAVSLSSVPFSGSVICVFIWFFHAFFSNSIYSLLFSSFSGAILPV

SEQ ID NO: 2934 - DNA, 1070 bp, Homo sapiens
gacttggctggcgggatcaagtgcagctgcttcaggctgaggtggcagatagtgagcgctggtggcggagttaaagtcaaagcaggagagtaattatgaatagcgcagcgggattctcacacctagaccgtcgcgagcgggttctcaagttaggggagagtttcgagaagcagccgcgctgcgccttccacactgtgcgctaattgtagagcgggaaggaaacttcaagatcactgaattataacttctcatttttctgtggtaaaactagctccccacgatgagatggtgctgtgctggctctgcagtttctctctcttcagtcccattttccggaagtgtgatatgcgtctttatctggtttttccatgcctttttctcaaatagtatctactctctccttttctcttccttctcaggagcaattctgcctgtctgatataagacttcaggcaaacccggatgtgaatcctggtctccaccacctatatatataatgtgactttgggaacattctctaagctctcaacctcagttttcttatggctaaaagataatagtaatatttacatttcatggtttgtgtaaggattaaataagatagcataaacaacctggaacaatatttgccacagggtagagaataaatagtagtcaccattaatgttgaagagttatattcatatgtgtacgaggggtgctaatgaatgtaatttagtcagactttgaaacagcatttatcagagtttagcaataaaaactatcaaaaagatagtctggcatgtggtaggaagggcatgggatgttctatcaacgataagctgaatgcttagcaacaggtgctttaccgggtagaagagtttcaataacaggacctactagaatcaattttgaattgggagtagtactagttttactatttatatccagataaggcaatgaattgtgaaatcctaagtttgtaaatgacaccacttttttgtgtccttaaatgatgagctaatgagcagtgtgggttttggagttggttgaattcattcaaatcccggaaaataaactgatgataataa

SEQ ID NO: 2935 - protein, 52 aa, Homo sapiens; identical to SEQ ID NO: 2933

SEQ ID NO: 2936 - DNA, 255 bp, Homo sapiens
ccagcctctacctttagctccagacttgtatatccaactgccagtaccatatatatttgggtatttactaggaaatgatttgcagctgagtgaatcaggaagtgacagtgatgactgaagaaatatttagctataaataaaaatttatacagcatgtataatttattttgtattaacaataaaaattcctaagactgagggaaatatgtcttaacttttgatgataaaagaaattaaatttgattcagaaatttc

SEQ ID NO: 2937 - protein, 38 aa, Homo sapiens
QPLPLAPDLYIQLPVPYIFGYLLGNDLQLSESGSDSDD

SEQ ID NO: 2938 - DNA, 2878 bp, Homo sapiens
cttcttttcagagtaggctggcagctgtcctaactgcctactaaagccaaatgcttgaggagagagagagagtaaggagccagccatgaatcctttccagaaaaatgagtccaaggaaactcttttttcacctgtctccattgaagaggtaccacctcgaccacctagccctccaaagaagccatctccgacaatctgtggctccaactatccactgagcattgccttcattgtggtgaatgaattctgcgagcgcttttcctattatggaatgaaagctgtgctgatcctgtatttcctgtatttcctgcactggaatgaagatacctccacatctatataccatgccttcagcagcctctgttattttactcccatcctgggagcagccattgctgactcgtggttgggaaaattcaagacaatcatctatctctccttggtgtatgtgcttggccatgtgatcaagtccttgggtgccttaccaatactgggaggacaagtggtacacacagtcctatcattgatcggcctgagtctaatagctttggggacaggaggcatcaaaccctgtgtggcagcttttggtggagaccagtttgaagaaaaacatgcagaggaacggactagatacttctcagtcttctacctgtccatcaatgcagggagcttgatttctacatttatcacacccatgctgagaggagatgtgcaatgttttggagaagactgctatgcattggcttttggagttccaggactgctcatggtaattgcacttgttgtgtttgcaatgggaagcaaaatatacaataaaccaccccctgaaggaaacatagtggctcaagttttcaaatgtatctggtttgctatttccaatcgtttcaagaaccgttctggagacattccaaagcgacagcactggctagactgggcggctgagaaatatccaaagcagctcattatggatgtaaaggcactgaccagggtactattcctttatatcccattgcccatgttctgggctcttttggatcagcagggttcacgatggactttgcaagccatcaggatgaataggaatttggggttttttgtgcttcagccggaccagatgcaggttctaaatccccttctggttcttatcttcatcccgttgtttgactttgtcatttatcgtctggtctccaagtgtggaattaacttctcatcacttaggaaaatggctgttggtatgatcctagcatgcctggcatttgcagttgcggcagctgtagagataaaaataaatgaaatggccccagcccagccaggtccccaggaggttttcctacaagtcttgaatctggcagatgatgaggtgaaggtgacagtggtgggaaatgaaaacaattctctgttgatagagtccatcaaatcctttcagaaaacaccacactattccaaactgcacctgaaaacaaaaagccaggattttcacttccacctgaaatatcacaatttgtctctctacactgagcattctgtgcaggagaagaactggtacagtcttgtcattcgtgaagatgggaacagtatctccagcatgatggtaaaggatacagaaagcagaacaaccaatgggatgacaaccgtgaggtttgttaacactttgcataaagatgtcaacatctccctgagtacagatacctctctcaatgttggtgaagactatggtgtgtctgcttatagaactgtgcaaagaggagaataccctgcagtgcactgtagaacagaagataagaacttttctctgaatttgggtcttctagactttggtgcagcatatctgtttgttattactaataacaccaatcagggtcttcaggcctggaagattgaagacattccagccaacaaaatgtccattgcgtggcagctaccacaatatgccctggttacagctggggaggtcatgttctctgtcacaggtcttgagttttcttattctcaggctccctctagcatgaaatctgtgctccaggcagcttggctattgacaattgcagttgggaatatcatcgtgcttgttgtggcacagttcagtggcctggtacagtgggccgaattcattttgttttcctgcctcctgctggtgatctgcctgatcttctccatcatgggctactactatgttcctgtaaagacagaggatatgcggggtccagcagataagcacattcctcacatccaggggaacatgatcaaactagagaccaagaagacaaaactctgatgactccctagattctgtcctgaccccaattcctggccctgtcttgaagcattttttttcttctactggattagacaagagagatagcagcatatcagagctgatctcctccacctttctccaatgacagaagttccaggactggttttccagtacatctttaaacaaggccccagagactctatgtctgcccgtccatcagtgaactcattaaaacttgtgcagtgttgctggagctggcctggtgtctccaaatgaccatgaaaatacacacgtataatggagatcattctctgtgggtatgcaaagttatgggaattcctttataggtaactgccatttaggactgatggccctaatttttgaggtgctgatttagaggcaaaattgcagaataacaaagaaatggtatttcaagtttttttttttataagcaatgtaattatgctattcacaggggcctcaagaattggtatgtatgatgtgatctggtccagccagggcctggcttgtcagctctctaggtttgatatgactttagtaaatttgtcaatatagatggtaggaagcagaatgccattttattaaaacacaggagaagtt

SEQ ID NO: 2939 - protein, 729 aa, Homo sapiens
MNPFQKNESKETLFSPVSIEEVPPRPPSPPKKPSPTICGSNYPLSIAFIVVNEFCERFSYYGMKAVLILYFLYFLHWNEDTSTSIYHAFSSLCYFTPILGAAIADSWLGKFKTIIYLSLVYVLGHVIKSLGALPILGGQVVHTVLSLIGLSLIALGTGGIKPCVAAFGGDQFEEKHAEERTRYFSVFYLSINAGSLISTFITPMLRGDVQCFGEDCYALAFGVPGLLMVIALVVFAMGSKIYNKPPPEGNIVAQVFKCIWFAISNRFKNRSGDIPKRQHWLDWAAEKYPKQLIMDVKALTRVLFLYIPLPMFWALLDQQGSRWTLQAIRMNRNLGFFVLQPDQMQVLNPLLVLIFIPLFDFVIYRLVSKCGINFSSLRKMAVGMILACLAFAVAAAVEIKINEMAPAQPGPQEVFLQVLNLADDEVKVTVVGNENNSLLIESIKSFQKTPHYSKLHLKTKSQDFHFHLKYHNLSLYTEHSVQEKNWYSLVIREDGNSISSMMVKDTESRTTNGMTTVRFVNTLHKDVNISLSTDTSLNVGEDYGVSAYRTVQRGEYPAVHCRTEDKNFSLNLGLLDFGAAYLFVITNNTNQGLQAWKIEDIPANKMSIAWQLPQYALVTAGEVMFSVTGLEFSYSQAPSSMKSVLQAAWLLTIAVGNIIVLVVAQFSGLVQWAEFILFSCLLLVICLIFSIMGYYYVPVKTEDMRGPADKHIPHIQGNMIKLETKKTKL

SEQ ID NO: 2940 - DNA, 4097 bp, Homo sapiens
cttcttttcagagtaggctggcagctgtcctaactgcctactaaagccaaatgcttgaggagagagagagagtaaggagccagccatgaatcctttccagaaaaatgagtccaaggaaactcttttttcacctgtctccattgaagaggtaccacctcgaccacctagccctccaaagaagccatctccgacaatctgtggctccaactatccactgagcattgccttcattgtggtgaatgaattctgcgagcgcttttcctattatggaatgaaagctgtgctgatcctgtatttcctgtatttcctgcactggaatgaagatacctccacatctatataccatgccttcagcagcctctgttattttactcccatcctgggagcagccattgctgactcgtggttgggaaaattcaagacaatcatctatctctccttggtgtatgtgcttggccatgtgatcaagtccttgggtgccttaccaatactgggaggacaagtggtacacacagtcctatcattgatcggcctgagtctaatagctttggggacaggaggcatcaaaccctgtgtggcagcttttggtggagaccagtttgaagaaaaacatgcagaggaacggactagatacttctcagtcttctacctgtccatcaatgcagggagcttgatttctacatttatcacacccatgctgagaggagatgtgcaatgttttggagaagactgctatgcattggcttttggagttccaggactgctcatggtaattgcacttgttgtgtttgcaatgggaagcaaaatatacaataaaccaccccctgaaggaaacatagtggctcaagttttcaaatgtatctggtttgctatttccaatcgtttcaagaaccgttctggagacattccaaagcgacagcactggctagactgggcggctgagaaatatccaaagcagctcattatggatgtaaaggcactgaccagggtactattcctttatatcccattgcccatgttctgggctcttttggatcagcagggttcacgatggactttgcaagccatcaggatgaataggaatttggggttttttgtgcttcagccggaccagatgcaggttctaaatccccttctggttcttatcttcatcccgttgtttgactttgtcatttatcgtctggtctccaagtgtggaattaacttctcatcacttaggaaaatggctgttggtatgatcctagcatgcctggcatttgcagttgcggcagctgtagagataaaaataaatgaaatggccccagcccagccaggtccccaggaggttttcctacaagtcttgaatctggcagatgatgaggtgaaggtgacagtggtgggaaatgaaaacaattctctgttgatagagtccatcaaatcctttcagaaaacaccacactattccaaactgcacctgaaaacaaaaagccaggattttcacttccacctgaaatatcacaatttgtctctctacactgagcattctgtgcaggagaagaactggtacagtcttgtcattcgtgaagatgggaacagtatctccagcatgatggtaaaggatacagaaagcagaacaaccaatgggatgacaaccgtgaggtttgttaacactttgcataaagatgtcaacatctccctgagtacagatacctctctcaatgttggtgaagactatggtgtgtctgcttatagaactgtgcaaagaggagaataccctgcagtgcactgtagaacagaagataagaacttttctctgaatttgggtcttctagactttggtgcagcatatctgtttgttattactaataacaccaatcagggtcttcaggcctggaagattgaagacattccagccaacaaaatgtccattgcgtggcagctaccacaatatgccctggttacagctggggaggtcatgttctctgtcacaggtcttgagttttcttattctcaggctccctctagcatgaaatctgtgctccaggcagcttggctattgacaattgcagttgggaatatcatcgtgcttgttgtggcacagttcagtggcctggtacagtgggccgaattcattttgttttcctgcctcctgctggtgatctgcctgatcttctccatcatgggctactactatgttcctgtaaagacagaggatatgcggggtccagcagataagcacattcctcacatccaggggaacatgatcaaactagagaccaagaagacaaaactctgatgactccctagattctgtcctgaccccaattcctggccctgtcttgaagcattttttttcttctactggattagacaagagagatagcagcatatcagagctgatctcctccacctttctccaatgacagaagttccaggactggttttccagtacatctttaaacaaggccccagagactctatgtctgcccgtccatcagtgaactcattaaaacttgtgcagtgttgctggagctggcctggtgtctccaaatgaccatgaaaatacacacgtataatggagatcattctctgtgggtatgcaaagttatgggaattcctttataggtaactgccatttaggactgatggccctaatttttgaggtgctgatttagaggcaaaattgcagaataacaaagaaatggtatttcaagtttttttttttataagcaatgtaattatgctattcacaggggcctcaagaattggtatgtatgatgtgatctggtccagccagggcctggcttgtcagctctctaggtttgatatgactttagtaaatttgtcaatatagatggtaggaagcagaatgccattttattaaaacacaggagaagttatatctctctgattatgatagtattttatttacttatccaaaccctcctttctcagtatggatagatcatggaaaccagattagagatagtaagcattagtaaacattgttctggagaacaggaacaggtgtaagttgtagaaatcctgaagagccagtcattcttttacagagtacattcttcttagcctctatggcgctggtctatgcccttcagtgaacagttgtataaacaataattataatttgcaaccttgtcttgtcaaccttgctgatccagctttttcttattattacaccttgtcttgcttattgcagcaaatattcaataacaacaatgtttctataagtccaacttcctttattaatgtttccatttagcctcaaaaatatcaaagtagttcctttttgatgttgttttcctgatttacttttcccataagttttaaataccatttctgccttgaagcctagaaattttctttttattcaaaaaaagttacattaatgctctaggtttgaggttctaaaatggaaatgtcaatagaggagcatggtcctatgtgaggttcctatcaaaatttgtgggagtagggatggtagagcatgagggttttgtttgtgtatgtgtatggtcatgaaaaaaaattgagaaacattacctcatacacaatgaatgaatcagaggacagacacgggaatggcacgactgtgcagtgtgttactaggaaaaaagttcagaatcactgttctagagagcttcatttccattggttttaaaacattattctcatgtagaacagtgttgggtctcatactgttaatgttaatacgtaacaatgttcatgttaacaggcacctgttaatattaacagataatgttactgttaacaggtaagagaaattgctctaagtgcccaaactttatatacttcagttttaatgacaagcatttcagaaatataagagcggcagccagaccaaccagtttttccagatatcttgatgtgaacctgaccctactcctttagaagacagcctgttcatttttaaatagctttaacccaaactgttctatgaccattgtttcaagagacattaacacagttctgtaaatagaagtgtctatggacaaataagtttgggaaatgtggcatactgtatccttttcttaacatttgcatattaaagactctgagatatcctgcagtaaagacac

SEQ ID NO: 2941 - protein, 729 aa, Homo sapiens; identical to SEQ ID NO: 2939

SEQ ID NO: 2942 - DNA, 299 bp, Homo sapiens
gaacagtctaatgcagtctttaataataggctacagagtttggatttcatcctttagagtctaaagtttagatataattgtttctcctttccaccacagatcacttaggaaaatggctgttggtatgatcctagcatgcctggcatttgcagttgcggcagctgtagagataaaaataaatgaaatggccccagcccagccaggtccccaggaggttttcctacaagtcttgaatctggcagatgatgaggtgaaggtgacagtggtgggaaatgaaaacaattctctgttgatagagt

SEQ ID NO: 2943 - protein, 61 aa, Homo sapiens
MAVGMILACLAFAVAAAVEIKINEMAPAQPGPQEVFLQVLNLADDEVKVTVVGNENNSLLI

SEQ ID NO: 2944 - DNA, 804 bp, Homo sapiens
ccaagccttgatatttattctaacctaaattcatcctgttccagataccctgcagtgcactgtagaacagaagataagaacttttctctgaatttgggtcttctagactttggtgcagcatatctgtttgttattactaataacaccaatcagggtcttcaggcctggaagattgaagacattccagccaacaaaatgtccattgcgtggcagctaccacaatatgccctggttacagctggggaggtcatgttctctgtcacaggtcttgagttttcttattctcaggctccctctagcatgaaatctgtgctccaggcagcttggctattgacaattgcagttgggaatatcatcgtgcttgttgtggcacagttcagtggcctggtacagtgggccgaattcattttgttttcctgcctcctgctggtgatctgcctgatcttctccatcatgggctactactatgttcctgtaaagacagaggatatgcggggtccagcagataagcacattcctcacatccaggggaacatgatcaaactagagaccaagaagacaaaactctgatgactccctagattctgtcctgaccccaattcctggccctgtcttgaagcattttttttcttctactggattagacaagagagatagcagcatatcagagctgatctcctccacctttctccaatgacagaagttccaggactggttttccagtacatctttaaacaaggccccagagactctatgtctgcccgtccatcagtgaactcattaaaacttgtgcagtgttgctgg

SEQ ID NO: 2945 - protein, 124 aa, Homo sapiens [sequence omitted]

SEQ ID NO: 2946 - DNA, 1173 bp, Homo sapiens
ccaagccttgatatttattctaacctaaattcatcctgttccagataccctgcagtgcactgtagaacagaagataagaacttttctctgaatttgggtcttctagactttggtgcagcatatctgtttgttattactaataacaccaatcagggtcttcaggcctggaagattgaagacattccagccaacaaaatgtccattgcgtggcagctaccacaatatgccctggttacagctggggaggtcatgttctctgtcacaggtcttgagttttcttattctcaggctccctctagcatgaaatctgtgctccaggcagcttggctattgacaattgcagttgggaatatcatcgtgcttgttgtggcacagttcagtggcctggtacagtgggccgaattcattttgttttcctgcctcctgctggtgatctgcctgatcttctccatcatgggctactactatgttcctgtaaagacagaggatatgcggggtccagcagataagcacattcctcacatccaggggaacatgatcaaactagagaccaagaagacaaaactctgatgactccctagattctgtcctgaccccaattcctggccctgtcttgaagcattttttttcttctactggattagacaagagagatagcagcatatcagagctgatctcctccacctttctccaatgacagaagttccaggactggttttccagtacatctttaaacaaggccccagagactctatgtctgcccgtccatcagtgaactcattaaaacttgtgcagtgttgctggagctggcctggtgtctccaaatgaccatgaaaatacacacgtataatggagatcattctctgtgggtatgcaaagttatgggaattcctttataggtaactgccatttaggactgatggccctaatttttgaggtgctgatttagaggcaaaattgcagaataacaaagaaatggtatttcaagtttttttttttataagcaatgtaattatgctattcacaggggcctcaagaattggtatgtatgatgtgatctggtccagccagggcctggcttgtcagctctctaggtttgatatgactttagtaaatttgtcaatatagatggtaggaagcagaatgccattttattaaaacacaggagaagtt

SEQ ID NO: 2947 - protein, 124 aa, Homo sapiens [sequence omitted]

SEQ ID NO: 2948 - DNA, 2392 bp, Homo sapiens
ccaagccttgatatttattctaacctaaattcatcctgttccagataccctgcagtgcactgtagaacagaagataagaacttttctctgaatttgggtcttctagactttggtgcagcatatctgtttgttattactaataacaccaatcagggtcttcaggcctggaagattgaagacattccagccaacaaaatgtccattgcgtggcagctaccacaatatgccctggttacagctggggaggtcatgttctctgtcacaggtcttgagttttcttattctcaggctccctctagcatgaaatctgtgctccaggcagcttggctattgacaattgcagttgggaatatcatcgtgcttgttgtggcacagttcagtggcctggtacagtgggccgaattcattttgttttcctgcctcctgctggtgatctgcctgatcttctccatcatgggctactactatgttcctgtaaagacagaggatatgcggggtccagcagataagcacattcctcacatccaggggaacatgatcaaactagagaccaagaagacaaaactctgatgactccctagattctgtcctgaccccaattcctggccctgtcttgaagcattttttttcttctactggattagacaagagagatagcagcatatcagagctgatctcctccacctttctccaatgacagaagttccaggactggttttccagtacatctttaaacaaggccccagagactctatgtctgcccgtccatcagtgaactcattaaaacttgtgcagtgttgctggagctggcctggtgtctccaaatgaccatgaaaatacacacgtataatggagatcattctctgtgggtatgcaaagttatgggaattcctttataggtaactgccatttaggactgatggccctaatttttgaggtgctgatttagaggcaaaattgcagaataacaaagaaatggtatttcaagtttttttttttataagcaatgtaattatgctattcacaggggcctcaagaattggtatgtatgatgtgatctggtccagccagggcctggcttgtcagctctctaggtttgatatgactttagtaaatttgtcaatatagatggtaggaagcagaatgccattttattaaaacacaggagaagttatatctctctgattatgatagtattttatttacttatccaaaccctcctttctcagtatggatagatcatggaaaccagattagagatagtaagcattagtaaacattgttctggagaacaggaacaggtgtaagttgtagaaatcctgaagagccagtcattcttttacagagtacattcttcttagcctctatggcgctggtctatgcccttcagtgaacagttgtataaacaataattataatttgcaaccttgtcttgtcaaccttgctgatccagctttttcttattattacaccttgtcttgcttattgcagcaaatattcaataacaacaatgtttctataagtccaacttcctttattaatgtttccatttagcctcaaaaatatcaaagtagttcctttttgatgttgttttcctgatttacttttcccataagttttaaataccatttctgccttgaagcctagaaattttctttttattcaaaaaaagttacattaatgctctaggtttgaggttctaaaatggaaatgtcaatagaggagcatggtcctatgtgaggttcctatcaaaatttgtgggagtagggatggtagagcatgagggttttgtttgtgtatgtgtatggtcatgaaaaaaaattgagaaacattacctcatacacaatgaatgaatcagaggacagacacgggaatggcacgactgtgcagtgtgttactaggaaaaaagttcagaatcactgttctagagagcttcatttccattggttttaaaacattattctcatgtagaacagtgttgggtctcatactgttaatgttaatacgtaacaatgttcatgttaacaggcacctgttaatattaacagataatgttactgttaacaggtaagagaaattgctctaagtgcccaaactttatatacttcagttttaatgacaagcatttcagaaatataagagcggcagccagaccaaccagtttttccagatatcttgatgtgaacctgaccctactcctttagaagacagcctgttcatttttaaatagctttaacccaaactgttctatgaccattgtttcaagagacattaacacagttctgtaaatagaagtgtctatggacaaataagtttgggaaatgtggcatactgtatccttttcttaacatttgcatattaaagactctgagatatcctgcagtaaagacac

SEQ ID NO: 2949 - protein, 124 aa, Homo sapiens [sequence omitted]

SEQ ID NO: 2950 - DNA, 2734 bp, Homo sapiens
ggggacgagccgggcggcacctgccccgggaccagagcggacgctccctccccgctgcgccgagggaggggaaacccgaggggttccttggagaaggtggtgcgtcctggggcggcagctgaggaagaaagacgcagtgccccgaagcccctgagctgaaaagggccagaaagggggcggcatggcatggcccaaactgcccgcaccttggctgctgctctgcacctggctcccagcagggtgcctgtccttgcttgtgacggtccagcacacagaacgctatgtcaccctgtttgcctctatcatcctcaaatgtgactacaccacctctgcccagctccaggacgtggtggtgacatggcgcttcaagtccttctgcaaggaccctatctttgactactactcagcgtcataccaggcagctttatccctgggccaggacccatccaatgactgcaacgacaaccagcgggaagttcgcatagtggcccagcggcgggggcagaatgagcccgtgctgggggtagattaccggcagcgcaagatcaccatccagaaccgagcagatctcgtgataaatgaagtgatgtggtgggaccatggagtgtattactgcaccattgaggctccaggggacacatcaggagaccccgataaggaagtaaagctcatcgtcctacactggctgacagtgatcttcatcatcctgggagccctcctcctcctgctgctgattggagtgtgctggtgccagtgctgtcctcagtattgctgctgctatatccgctgtccctgctgtcctgcccactgctgctgtcctgaggaagatttgtccctgccgtccagcctcccgcagatgccaatgacccagaccaccaatcagcctcccatcgccaatggtgtcctggagtatttggagaaagaactgcggaacctcaacctggcccagcctctgccccctgacctcaaaggcagatttggccatccctgcagcatgctgtcctccctgggctctgaggtcgtggaacgcagaatcatccacctgcccccactgatcagagacctgtcatcctcaaggaggaccagtgactccctgcaccagcagtggctcaccccaattccctccaggccctgggatctgagggaggggagaagccaccaccattaccctgatttccaccaggagctccaggaccgggggccaaagtcttgggcattggaaagaagggagttggacccatcgtggagtggaaggcaccgtagctctaggctgaatgggtcacccatacactggtcagacagggacagcctaagcgatgtcccctcatccagtgaggcacgctggcggccgagccaccctcctttcaggagccgctgtcaggagaggccccgcaggcccagcccccgggagagcactcagaggcacgggagacgacgcaggcaccgcagctactctcctcccttgccctccggcctcagttcctggagctctgaagaggacaaggagaggcagccccagagctggcgggcccaccgccgcggctcgcactccccacactggcccgaggagaagccgcctagctaccgctcacttgatatcactccaggcaagaatagcaggaaaaaagggagtgtggagaggcgctcggagaaagacagctctcatagtggaaggagtgtggtcatttagtcaccaagcacagcacaacttctgtggctacttctcggctcctgtgtgtcatcagcatcacctaggtttccagctgacttgggaactgcaagtctgagtctaacagtttttggcttagattctgagaatcaaatagaagaattttaaatacaagagtttgagattgggtatagtggctcacacctgtaatcacagcactttgggaggctaagaatcacttgagactaggagttcaagatcagcctgggaaacatagtgagaccccgtctctacaaaaaatataaaaattagttaggtgtggtggcatgcacttgtagtcccagctactcaagaggctgaggcagaaggatcccttgagcccaggagtgcaaggctgcaatgagccaggatcccatgatcacacatctgtattccagcctgggcaatagagcaagtccccattactaaaaaacccaaaaggccaaaaaacaaaaaagttagagttcgaggaattaccaactgtagttttagccttggttcatgctctcttgcatatttatataatctctgacttgtaatggaccctgactggaatgtgatccctcaggaacttagtagcctgagtctttcagtagactacactgcccagaaccctggccattctcaaaatgagaacttgggaatgtttaagaagaaatcaaacatgtttcaggaaaaggaaatctatggagtattatagggacattcccatgggaatgtatcttcctccatggcatgtcttgagggtcctttcttgttaggagtttatcctgccagcccataaatggactatttattgtaagtgtagaaaatcacagagaagcagttttgcaccagccttattcctgtgccttgttttcctcttgctctttttttacctgtatatctaatttatattttcatatatattgtgtattgattgaagtcactttaaatccttcttgggaatgacacagtatataaataaggaagaaagaaaacatgccaagctgagcatgctgctccaaataaatatctgctttccta

SEQ ID NO: 2951 - protein, 502 aa, Homo sapiens; identical to SEQ ID NO: 268

SEQ ID NO: 2952 - DNA, 1736 bp, Homo sapiens
agccgtggggagcgccgcaggtggggacgagccgggcggcacctgccccgggaccagagcggacgctccctccccgctgcgccgagggaggggaaacccgaggggttccttggagaaggtggtgcgtcctggggcggcagctgaggaagaaagacgcagtgccccgaagcccctgagctgaaaagggccagaaagggggcggcatggcatggcccaaactgcccgcaccttggctgctgctctgcacctggctcccagcagggtgcctgtccttgcttgtgacggtccagcacacagaacgctatgtcaccctgtttgcctctatcatcctcaaatgtgactacaccacctctgcccagctccaggacgtggtggtgacatggcgcttcaagtccttctgcaaggaccctatctttgactactactcagcgtcataccaggcagctttatccctgggccaggacccatccaatgactgctgctgtcctgaggaagccctggcccgccaccgctacatgaagcaggcccaggccctaggtcctcagatgatgggaaaacccctgtactggggggcggacaggagctcccaggtttcatcttatccaatgcacccgctgctgcagcgagatttgtccctgccgtccagcctcccgcagatgccaatgacccagaccaccaatcagcctcccatcgccaatggtgtcctggagtatttggagaaagaactgcggaacctcaacctggcccagcctctgccccctgacctcaaaggcagatttggccatccctgcagcatgctgtcctccctgggctctgagaatcaaatagaagaattttaaatacaagagtttgagattgggtatagtggctcacacctgtaatcacagcactttgggaggctaagaatcacttgagactaggagttcaagatcagcctgggaaacatagtgagaccccgtctctacaaaaaatataaaaattagttaggtgtggtggcatgcacttgtagtcccagctactcaagaggctgaggcagaaggatcccttgagcccaggagtgcaaggctgcaatgagccaggatcccatgatcacacatctgtattccagcctgggcaatagagcaagtccccattactaaaaaacccaaaaggccaaaaaacaaaaaagttagagttcgaggaattaccaactgtagttttagccttggttcatgctctcttgcatatttatataatctctgacttgtaatggaccctgactggaatgtgatccctcaggaacttagtagcctgagtctttcagtagactacactgcccagaaccctggccattctcaaaatgagaacttgggaatgtttaagaagaaatcaaacatgtttcaggaaaaggaaatctatggagtattatagggacattcccatgggaatgtatcttcctccatggcatgtcttgagggtcctttcttgttaggagtttatcctgccagcccataaatggactatttattgtaagtgtagaaaatcacagagaagcagttttgcaccagccttattcctgtgccttgttttcctcttgctctttttttacctgtatatctaatttatattttcatatatattgtgtattgattgaagtcactttaaatccttcttgggaatgacacagtatataaataaggaagaaagaaaacatgccaagctgagcatgctgctccaaataaatatctgctttccta

SEQ ID NO: 2953 - protein, 211 aa, Homo sapiens
MAWPKLPAPWLLLCTWLPAGCLSLLVTVQHTERYVTLFASIILKCDYTTSAQLQDVVVTWRFKSFCKDPIFDYYSASYQAALSLGQDPSNDCCCPEEALARHRYMKQAQALGPQMMGKPLYWGADRSSQVSSYPMHPLLQRDLSLPSSLPQMPMTQTTNQPPIANGVLEYLEKELRNLNLAQPLPPDLKGRFGHPCSMLSSLGSENQIEEF

SEQ ID NO: 2954 - DNA, 882 bp, Homo sapiens
aacaggtgtataccggccaagtttggaagaagccagaaataccttgagaatgtcttaggacaagattagaaggaaagataattcattggaaggagtccaggagcctgggccactcaagtctgtactcactgaaggttaccatgaaatcatctgcatggaagcccttgtttgtcaatatctatttgtcaaatattactcttgagagagaaggttccacatgaacaacaacaaaaaaagttgttccatttatgtttctctaaatgccaaatgaagtattttaaataagcattttataaaaagttatggtaaagctgtagctgctgaaagcctgctttaggaaaatagtgatacatcttatcaactcaagcagtaaacaggaacttccagtgctgcatgatggaaggtcaccatctagaggcccaattgtattaggatgtttcactacaagctccaatgactccagaggctaggaaggcagcctgtgtaagaagcagcagccagccccaaggagaggagggaacagcaagactttggccctgcagactttgcctcagtaaatgcattcaaaattccagttacaaacaaaacaaactaaacacagtgccttcaaactgagcaatctgccaaatcaagctttgatcctgggcctctgctcactgtcagaatatgaatggaaagttgaatgtgataagtaaagtgataactccttgggagataagctcaaagagattccaaacaatggaggcttttacaatttcttgtacaaaatctttgcttcttgggagtaactttacaattgaaaatttggtttggttgtggtaggtggtaaaggaagctgtgatattttcagaaaattaggaagaaataaagtcaccagaagat

SEQ ID NO: 2955 - protein, 53 aa, Homo sapiens
MTPEARKAACVRSSSQPQGEEGTARLWPCRLCLSKCIQNSSYKQNKLNTVPSN

SEQ ID NO: 2956 - DNA, 1568 bp, Homo sapiens
ggggacgagccgggcggcacctgccccgggaccagagcggacgctccctccccgctgcgccgagggaggggaaacccgaggggttccttggagaaggtggtgcgtcctggggcggcagctgaggaagaaagacgcagtgccccgaagcccctgagctgaaaagggccagaaagggggcggcatggcatggcccaaactgcccgcaccttggctgctgctctgcacctggctcccagcagggtgcctgtccttgcttgtgacggtccagcacacagaacgctatgtcaccctgtttgcctctatcatcctcaaatgtgactacaccacctctgcccagctccaggacgtggtggtgacatggcgcttcaagtccttctgcaaggaccctatctttgactactactcagcgtcataccaggcagctttatccctgggccaggacccatccaatgactgcaacgacaaccagcgggaagttcgcatagtggcccagcggcgggggcagaatgagcccgtgctgggggtagattaccggcagcgcaagatcaccatccagaaccgagcagatctcgtgataaatgaagtgatgtggtgggaccatggagtgtattactgcaccattgaggctccaggggacacatcaggagaccccgataaggaagtaaagctcatcgtcctacactggctgacagtgatcttcatcatcctgggagccctcctcctcctgctgctgattggagtgtgctggtgccagtgctgtcctcagtattgctgctgctatatccgctgtccctgctgtcctgcccactgctgctgtcctgaggaagccctggcccgccaccgctacatgaagcaggcccaggccctaggtcctcagatgatgggaaaacccctgtactggggggcggacaggagctcccaggtttcatcttatccaatgcacccgctgctgcagcgagatttgtccctgccgtccagcctcccgcagatgccaatgacccagaccaccaatcagcctcccatcgccaatggtgtcctggagtatttggagaaagaactgcggaacctcaacctggcccagcctctgccccctgacctcaaaggcagatttggccatccctgcagcatgctgtcctccctgggctctgaggtcgtggaacgcagaatcatccacctgcccccactgatcagagacctgtcatcctcaaggaggaccagtgactccctgcaccagcagtggctcaccccaattccctccaggccctgggatctgagggaggggagaagccaccaccattaccctgatttccaccaggagctccaggaccgggggccaaagtcttgggcattggaaagaagggagttggacccatcgtggagtggaaggcaccgtagctctaggctgaatgggtcacccatacactggtcagacagggacagcctaagcgatgtcccctcatccagtgaggcacgctggcggccgagccaccctcctttcaggagccgctgtcaggagaggccccgcaggcccagcccccgggagagcactcagaggcacgggagacgac

SEQ ID NO: 2957 - protein, 461 aa, Homo sapiens
MAWPKLPAPWLLLCTWLPAGCLSLLVTVQHTERYVTLFASIILKCDYTTSAQLQDVVVTWRFKSFCKDPIFDYYSASYQAALSLGQDPSNDCNDNQREVRIVAQRRGQNEPVLGVDYRQRKITIQNRADLVINEVMWWDHGVYYCTIEAPGDTSGDPDKEVKLIVLHWLTVIFIILGALLLLLLIGVCWCQCCPQYCCCYIRCPCCPAHCCCPEEALARHRYMKQAQALGPQMMGKPLYWGADRSSQVSSYPMHPLLQRDLSLPSSLPQMPMTQTTNQPPIANGVLEYLEKELRNLNLAQPLPPDLKGRFGHPCSMLSSLGSEVVERRIIHLPPLIRDLSSSRRTSDSLHQQWLTPIPSRPWDLREGRSHHHYPDFHQELQDRGPKSWALERRELDPSWSGRHRSSRLNGSPIHWSDRDSLSDVPSSSEARWRPSHPPFRSRCQERPRRPSPRESTQRHGR

SEQ ID NO: 2958 - DNA, 1413 bp, Homo sapiens
gtaggtatacagtcattgccgaggaaggcttgcacagggtgaaagctttgcttctctgctgctgtaacagggactagcacagacacacggatgagtggggtcatttccagatattaggtcacagcagaagcagccaaaatggatccccagtgcactatgggactgagtaacattctctttgtgatggccttcctgctctctggtgctgctcctctgaagattcaagcttatttcaatgagactgcagacctgccatgccaatttgcaaactctcaaaaccaaagcctgagtgagctagtagtattttggcaggaccaggaaaacttggttctgaatgaggtatacttaggcaaagagaaatttgacagtgttcattccaagtatatgggccgcacaagttttgattcggacagttggaccctgagacttcacaatcttcagatcaaggacaagggcttgtatcaatgtatcatccatcacaaaaagcccacaggaatgattcgcatccaccagatgaattctgaactgtcagtgcttgctaacttcagtcaacctgaaatagtaccaatttctaatataacagaaaatgtgtacataaatttgacctgctcatctatacacggttacccagaacctaagaagatgagtgttttgctaagaaccaagaattcaactatcgagtatgatggtgttatgcagaaatctcaagataatgtcacagaactgtacgacgtttccatcagcttgtctgtttcattccctgatgttacgagcaatatgaccatcttctgtattctggaaactgacaagacgcggcttttatcttcacctttctctatagagcttgaggaccctcagcctcccccagaccacattccttggattacagctgtacttccaacagttattatatgtgtgatggttttctgtctaattctatggaaatggaagaagaagaagcggcctcgcaactcttataaatgtggaaccaacacaatggagagggaagagagtgaacagaccaagaaaagagaaaaaatccatatacctgaaagatctgatgaagcccagcgtgtttttaaaagttcgaagacatcttcatgcgacaaaagtgatacatgtttttaattaaagagtaaagcccatacaagtattcattttttctaccctttcctttgtaagttcctgggcaacctttttgatttcttccagaaggcaaaaagacattaccatgagtaataagggggctccaggactccctctaagtggaatagcctccctgtaactccagctctgctccgtatgccaagaggagactttaattctcttactgcttcttttcacttcagagcacacttatgggccaagcccagcttaatggctcatgacctggaaataaaatttaggaccaat

SEQ ID NO: 2959 - protein, 329 aa, Homo sapiens; identical to SEQ ID NO: 272

SEQ ID NO: 2960 - DNA, 2733 bp, Homo sapiens
gtaggtatacagtcattgccgaggaaggcttgcacagggtgaaagctttgcttctctgctgctgtaacagggactagcacagacacacggatgagtggggtcatttccagatattaggtcacagcagaagcagccaaaatggatccccagtgcactatgggactgagtaacattctctttgtgatggccttcctgctctctggtgctgctcctctgaagattcaagcttatttcaatgagactgcagacctgccatgccaatttgcaaactctcaaaaccaaagcctgagtgagctagtagtattttggcaggaccaggaaaacttggttctgaatgaggtatacttaggcaaagagaaatttgacagtgttcattccaagtatatgggccgcacaagttttgattcggacagttggaccctgagacttcacaatcttcagatcaaggacaagggcttgtatcaatgtatcatccatcacaaaaagcccacaggaatgattcgcatccaccagatgaattctgaactgtcagtgcttgctaacttcagtcaacctgaaatagtaccaatttctaatataacagaaaatgtgtacataaatttgacctgctcatctatacacggttacccagaacctaagaagatgagtgttttgctaagaaccaagaattcaactatcgagtatgatggtgttatgcagaaatctcaagataatgtcacagaactgtacgacgtttccatcagcttgtctgtttcattccctgatgttacgagcaatatgaccatcttctgtattctggaaactgacaagacgcggcttttatcttcacctttctctatagagcttgaggaccctcagcctcccccagaccacattccttggattacagctgtacttccaacagttattatatgtgtgatggttttctgtctaattctatggaaatggaagaagaagaagcggcctcgcaactcttataaatgtggaaccaacacaatggagagggaagagagtgaacagaccaagaaaagagaaaaaatccatatacctgaaagatctgatgaagcccagcgtgtttttaaaagttcgaagacatcttcatgcgacaaaagtgatacatgtttttaattaaagagtaaagcccatacaagtattcattttttctaccctttcctttgtaagttcctgggcaacctttttgatttcttccagaaggcaaaaagacattaccatgagtaataagggggctccaggactccctctaagtggaatagcctccctgtaactccagctctgctccgtatgccaagaggagactttaattctcttactgcttcttttcacttcagagcacacttatgggccaagcccagcttaatggctcatgacctggaaataaaatttaggaccaatacctcctccagatcagattcttctcttaatttcatagattgtgttttttttttaaatagacctctcaatttctggaaaactgccttttatctgcccagaattctaagctggtgccccactgaattttgtgtgtacctgtgactaaacaactacctcctcagtctgggtgggacttatgtatttatgaccttatagtgttaatatcttgaaacatagagatctatgtactgtaatagtgtgattactatgctctagagaaaagtctacccctgctaaggagttctcatccctctgtcagggtcagtaaggaaaacggtggcctagggtacaggcaacaatgagcagaccaacctaaatttggggaaattaggagaggcagagatagaacctggagccacttctatctgggctgttgctaatattgaggaggcttgccccacccaacaagccatagtggagagaactgaataaacaggaaaatgccagagcttgtgaaccctgtttctcttgaagaactgactagtgagatggcctggggaagctgtgaaagaaccaaaagagatcacaatactcaaaagagagagagagagaaaaaagagagatcttgatccacagaaatacatgaaatgtctggtctgtccaccccatcaacaagtcttgaaacaagcaacagatggatagtctgtccaaatggacataagacagacagcagtttccctggtggtcagggaggggttttggtgatacccaagttattgggatgtcatcttcctggaagcagagctggggagggagagccatcaccttgataatgggatgaatggaaggaggcttaggactttccactcctggctgagagaggaagagctgcaacggaattaggaagaccaagacacagatcacccggggcttacttagcctacagatgtcctacgggaacgtgggctggcccagcatagggctagcaaatttgagttggatgattgtttttgctcaaggcaaccagaggaaacttgcatacagagacagatatactgggagaaatgactttgaaaacctggctctaaggtgggatcactaagggatggggcagtctctgcccaaacataaagagaactctggggagcctgagccacaaaaatgttcctttattttatgtaaaccctcaagggttatagactgccatgctagacaagcttgtccatgtaatattcccatgtttttaccctgcccctgccttgattagactcctagcacctggctagtttctaacatgttttgtgcagcacagtttttaataaatgcttgttacattcattt

SEQ ID NO: 2961 - protein, 329 aa, Homo sapiens; identical to SEQ ID NO: 272

SEQ ID NO: 2962 - DNA, 700 bp, Homo sapiens
attgccgaggaaggcttgcacagggtgaaagctttgcttctctgctgctgtaacagggactagcacagacacacggatgagtggggtcatttccagatattaggtcacagcagaagcagccaaaatggatccccagtgcactatgggactgagtaacattctctttgtgatggccttcctgctctctggtaagaacctttcagctttgttaagtcctggaatcctactgtctcctgatgagtctgaccacagcaagcccaggcctgagacttggtgggttttactcactttctactgagcattgtacaagaccacatgcaaaaaagactttcctggagaagaaggaagtgttatgattgagagcagctgatggcaggcagctgggatggagctctcccccccgtgtgcttcttcctcctctgcagtctcacatcagtgagcctagatgctcagagtagggtagcctggcccatcccatggggatgggggaaggctgctgcactgaggcccctgagacttgactcttttgttccacacatattctcttctggtcttctctgaccctgtttctgtctttctcaggctcctaggaaacaactgacagaattccaaaagtctcccttcattcggagcactggctttcacgtccctgacttccctaccctctctcactcccttccctacagcccatgcacatacc

SEQ ID NO: 2963 - protein, 57 aa, Homo sapiens
MDPQCTMGLSNILFVMAFLLSGKNLSALLSPGILLSPDESDHSKPRPETWWVLLTFY

SEQ ID NO: 2964 - DNA, 630 bp, Homo sapiens
gagggggatttggatatagttaatgtgaaggaggtttaccttatggtgatgagactaaaatttttgtcatttttaaggaaattagcatgtttaagtcactaatatgttgggaatgtggtaggaaaaaactatactgggcccaatctcctctgttaggttagagtcataaaatattaatgtttttgaaatttgtgtatgaggtgcaaatcactatggtggatgttgggagattagaaagataattactccacttctttttgggagtctaagtaatggcaactcttgagagtcttccttactttcagtagtaacagtattcacatgtagtttatgtattgctaaattttgtatttgtgacaattattctctttgttttgcaaatggtacattgtaacctgttctagagcagagacttcctgtagtctctagggaaactaacagcaggttgattcttaagtgcttaataaatacctgttgaatgactgatagaaagtagtgttcactgttagtgataatagtgggattgtatgaaattgcctgatttagtggttactatgtaccagacctgtactaagccattggattgccttatttcacttaatcacctccaataaaatactttttatagct

SEQ ID NO: 2965 - protein, 35 aa, Homo sapiens
ESSLLSVVTVFTCSLCIAKFCICDNYSLCFANGTL

SEQ ID NO: 2966 - DNA, 3482 bp, Homo sapiens
gggcgggccgggcgctgggagctggctgtcccaggagcagagcagtctccctgtccagatcaccaggatccctgcttgctggagaatgacccagatgtcccaggtgcaggagctcttccatgaggcagcccagcaggatgccctggcccagccccagccctggtggaagacccagctgttcatgtgggagcctgtgctgtttgggacctgggatggtgtgttcacatcctgcatgatcaacatctttggggttgtgctcttcctgaggactggctggctggtgggaaacacaggagtgctcctgggcatgttcctggtgtccttcgtcatcctggtggccctcgtcacggtgctgtctggcattggcgtcggggagcgcagcagcatcggcagcggtggcgtctactccatgatctcctcggtcctgggtgggcagacgggaggcaccatcgggctgctctatgtgtttggacagtgtgttgcaggtgccatgtatatcaccggctttgctgaatccatctcggatttgctgggcctcgggaatatctgggctgtgcgaggaatttcagttgcggtgcttctggccttgctgggcattaacctcgcaggtgtcaaatggataatccgcctccagctgctgttgctgttcctgctggccgtgtccacactggactttgtggtgggttctttcacccacctggacccagaacatggtttcattggatattcacccgaactgctacagaacaacacgctgcccgattacagcccgggggaatcttttttcactgtctttggggttttcttcccagcggctacaggagtcatggccggcttcaacatggggggcgacctcagggagcctgccgccagcattcccccgggctccctggcagctgttggcatctcgtggtttctgtacatcatcttcgtcttcctcctgggcgccatctgcactcgagaggcccttcgctatgacttcctgatagcggaaaaggtatccctcatgggcttcctgttccttttgggcttatacatctcgtccctggcttcctgcatgggaggactttatggagctccccgcatcctgcagtgcattgcccaggagaaagtgatccctgcacttgcctgtctgggacaagggaaggggccaaacaaaacacccgtggctgccatctgcctgaccagcttggtgaccatggcctttgtttttgtgggtcaagtgaacgttctggcccccatcgtcaccatcaacttcatgctgacatacgttgcagtggactactcttacttctccctgtccatgtgttcctgcagcctgaccccggtgcctgagccggtgctcagggagggcgcagaaggcctccactgctctgagcacctgctcttagagaaagctcccagttacggctctgagggacctgcccaaagagtcttggagggcacgctactggaattcaccaaggacatggatcagctcctccagctaaccaggaagcttgagagtagccagcccaggcaaggagagggtaacaggaccccagaaagtcagaagaggaaaagcaagaaggccaccaagcagaccctacaagatagcttcctcttggacctcaaatcccctccttctttccctgtcgagatctctgacaggttgcccgctgcctcctgggaggggcaggagtcctgctggaacaagcagacttccaagagcgaagggactcagcctgagggaacatatggagagcaacttgttcctgagctgtgcaaccaatcagagtccagtggagaagatttcttcctgaagtccaggctccaagaacaagatgtctggagaagatccacttctttctatacccacatgtgcaacccctgggtctccctgttgggggctgttgggtcccttctcatcatgtttgtgatacagtgggtgtataccctggttaacatgggtgttgctgccatcgtgtatttctacattggccgggccagtccagggcttcaccttggatcagcctccaacttcagctttttccggtggatgaggtctctcttgctcccctcctgcaggagcttgcggtcccctcaggagcagatcatcttggcgccgtccctggctaaggttgacatggagatgactcagctcacccaggagaatgcagacttcgccactcgggatcgctaccaccactcctccctcgtgaaccgggagcagctgatgcctcactactagatgcagtgctgggaccttcctcttttggagctgtcccatgtacagtggacccaagctcaggaccttcgtggagctgcttctccaacctgagaaactcaagacccatcctcccgctgtcactttggacaatggaaatctacattttcttttccctttttttttttttttgagacagagtctcgccctgtcacccaggctggagtccagtggcacaatcttggctcactgcaacctctgcttcccgagttcaagcaattctcctgcctcagcctcctgagtagctgggattataggcatgcaccaccacacccagctattttttgtatttttactggagacagggtttcaccatgttggccaggctggtctcgaactcctgacctcgtgatccacccgtctcagcctcccaaagtactgggattacaggcgtgagccaccatgcctggccagaaatctatgttttcttagaacatgtggaagaaggaaaaagacaaaaaaggaaatctggattctgaggaccacgtctcacccagggtgacatcaggaatggtgctagcctctgcaacacgacacccagtctgaagagctctatacaggtactaagactagcaggggacaccaagactctgcacaaccagattgcttgtgcagagggccacaataagtgtatgttttatattttattgtattatttattcaaaaataaataatacactcacatgtttccacacccaaaagatatatagagtgaaaagtctccctccaatccttattctccacctgctcagttcctgtctaccctggcctagaggtaaccactattctcatccgtacatccagcatttctttatggatatacaagcaaatgggaatgtagagtctcacattctctctttatacacaaaagttagcacgttatacacatgttctgcaccttgcttttttcccttaacaatctatcttggagacatttcatatcaattcatatgccatttgttcatttttttcattgtataaatgtgttataatttatttcgccagttccacaatgatgagcatttggattctttccaatcttttgcaatgacaatcagctctgcagtgaataatcttgtacaaatgtgcaagcataaagtgtatctctaggataaattcccaaaagtggaattgcaggatcaaaaggtacatgcatttgtaaactattattgtttagtgagggtctttttaattaaagaattaacatgaattgcct

SEQ ID NO: 2967 - protein, 714 aa, Homo sapiens
MTQMSQVQELFHEAAQQDALAQPQPWWKTQLFMWEPVLFGTWDGVFTSCMINIFGVVLFLRTGWLVGNTGVLLGMFLVSFVILVALVTVLSGIGVGERSSIGSGGVYSMISSVLGGQTGGTIGLLYVFGQCVAGAMYITGFAESISDLLGLGNIWAVRGISVAVLLALLGINLAGVKWIIRLQLLLLFLLAVSTLDFVVGSFTHLDPEHGFIGYSPELLQNNTLPDYSPGESFFTVFGVFFPAATGVMAGFNMGGDLREPAASIPPGSLAAVGISWFLYIIFVFLLGAICTREALRYDFLIAEKVSLMGFLFLLGLYISSLASCMGGLYGAPRILQCIAQEKVIPALACLGQGKGPNKTPVAAICLTSLVTMAFVFVGQVNVLAPIVTINFMLTYVAVDYSYFSLSMCSCSLTPVPEPVLREGAEGLHCSEHLLLEKAPSYGSEGPAQRVLEGTLLEFTKDMDQLLQLTRKLESSQPRQGEGNRTPESQKRKSKKATKQTLQDSFLLDLKSPPSFPVEISDRLPAASWEGQESCWNKQTSKSEGTQPEGTYGEQLVPELCNQSESSGEDFFLKSRLQEQDVWRRSTSFYTHMCNPWVSLLGAVGSLLIMFVIQWVYTLVNMGVAAIVYFYIGRASPGLHLGSASNFSFFRWMRSLLLPSCRSLRSPQEQIILAPSLAKVDMEMTQLTQENADFATRDRYHHSSLVNREQLMPHY

SEQ ID NO: 2968 - DNA, 2923 bp, Homo sapiens
agcagtctccctgtccagatcaccaggatccctgcttgctggagaatgacccagatgtcccaggtgcaggagctcttccatgaggcagcccagcaggatgccctggcccagccccagccctggtggaagacccagctgttcatgtgggagcctgtgctgtttgggacctgggatggtgtgttcacatcctgcatgatcaacatctttggggttgtgctcttcctgaggactggctggctggtgggaaacacaggagtgctcctgggcatgttcctggtgtccttcgtcatcctggtggccctcgtcacggtgctgtctggcattggcgtcggggagcgcagcagcatcggcagcggtggcgtctactccatgatctcctcggtcctgggtgggcagacgggaggcaccatcgggctgctctatgtgtttggacagtgtgttgcaggtgccatgtatatcaccggctttgctgaatccatctcggatttgctgggcctcgggaatatctgggctgtgcgaggaatttcagttgcggtgcttctggccttgctgggcattaacctcgcaggtgtcaaatggataatccgcctccagctgctgttgctgttcctgctggccgtgtccacactggactttgtggtgggttctttcacccacctggacccagaacatggtttcattggatattcacccgaactgctacagaacaacacgctgcccgattacagcccgggggaatcttttttcactgtctttggggttttcttcccagcggctacaggagtcatggccggcttcaacatggggggcgacctcagggagcctgccgccagcattcccccgggctccctggcagctgttggcatctcgtggtttctgtacatcatcttcgtcttcctcctgggcgccatctgcactcgagaggcccttcgctatgacttcctgatagcggaaaaggtatccctcatgggcttcctgttccttttgggcttatacatctcgtccctggcttcctgcatgggaggactttatggagctccccgcatcctgcagtgcattgcccaggagaaagtgatccctgcacttgcctgtctgggacaagggaaggggccaaacaaaacacccgtggctgccatctgcctgaccagcttggtgaccatggcctttgtttttgtgggtcaagtgaacgttctggcccccatcgtcaccatcaacttcatgctgacatacgttgcagtggactactcttacttctccctgtccatgtgttcctgcagcctgaccccggtgcctgagccggtgctcagggagggcgcagaaggcctccactgctctgagcacctgctcttagagaaagctcccagttacggctctgagggacctgcccaaagagtcttggagggcacgctactggaattcaccaaggacatggatcagctcctccagctaaccaggaagcttgagagtagccagcccaggcaaggagagggtaacaggaccccagaaagtcagaagaggaaaagcaagaaggccaccaagcagaccctacaagatagcttcctcttggacctcaaatcccctccttctttccctgtcgagatctctgacaggttgcccgctgcctcctgggaggggcaggagtcctgctggaacaagcagacttccaagagcgaagggactcagcctgagggaacatatggagagcaacttgttcctgagctgtgcaaccaatcagagtccagtggagaagatttcttcctgaagtccaggctccaagaacaagatgtctggagaagatccacttctttctatacccacatgtgcaacccctgggtctccctgttgggggctgttgggtcccttctcatcatgtttgtgatacagtgggtgtataccctggttaacatgggtgttgctgccatcgtgtatttctacattggccgggccagtccagggcttcaccttggatcagcctccaacttcagctttttccggtggatgaggtctctcttgctcccctcctgcaggagcttgcggtcccctcaggagcagatcatcttggcgccgtccctggctaaggttgacatggagatgactcagctcacccaggagaatgcagacttcgccactcgggatcgctaccaccactcctccctcgtgaaccgggagcagctgatgcctcactactagatgcagtgctgggaccttcctcttttggagctgtcccatgtacagtggacccaagctcaggaccttcgtggagctgcttctccaacctgagaaactcaagacccatcctcccgctgtcactttggacaatggaaatctacattttcttttccctttttttttttttttgagacagagtctcgccctgtcacccaggctggagtccagtggcacaatcttggctcactgcaacctctgcttcccgagttcaagcaattctcctgcctcagcctcctgagtagctgggattataggcatgcaccaccacacccagctattttttgtatttttactggagacagggtttcaccatgttggccaggctggtctcgaactcctgacctcgtgatccacccgtctcagcctcccaaagtactgggattacaggcgtgagccaccatgcctggccagaaatctatgttttcttagaacatgtggaagaaggaaaaagacaaaaaaggaaatctggattctgaggaccacgtctcacccagggtgacatcaggaatggtgctagcctctgcaacacgacacccagtctgaagagctctatacaggtactaagactagcaggggacaccaagactctgcacaaccagattgcttgtgcagagggccacaataagtgtatgttttatattttattgtattatttattcaaaaataaataatacactcacatgtttccacaccc

SEQ ID NO: 2969 - protein, 714 aa, Homo sapiens; identical to SEQ ID NO: 2967

SEQ ID NO: 2970 - DNA, 438 bp, Homo sapiens
cgcctcctcgccacctgggcccgagactcccggtgctggcgtggcaggggtgcccccgccgggacgggacagctgggacccgcgcagccgagccggggcagccacgtggcggcggggcggggaccgggcgggccgggcgctgggagctggctgtcccaggagcagagcagtctccctgtccagatcaccaggatccctgcttgctggagaatgacccagatgtcccaggtgcaggagctcttccatgaggcagcccagcagtgtgcagcacctcccaggacctcttgctcctgctctggtgacataagatgcctgcctcgcctttgccttccaccatgattgaaagtttcctgaggcctccctggaagcagaagctgctatgcttcccgtacagcctgtggaaccataagccaattaaacctcttttctttataaatt

SEQ ID NO: 2971 - protein, 42 aa, Homo sapiens
MTQMSQVQELFHEAAQQCAAPPRTSCSCSGDIRCLPRLCLPP

SEQ ID NO: 2972 - DNA, 7243 bp, Homo sapiens
agaaaaggcagaaaacggagaaaaaatcatctggaatggacaaagagagtgctttggacaaatctgacctgaaaaaagacaaaaatgattacttgcctctttattcttcaacattctcttccatagacaagcaggtctatgccaccatgcccatcaatagctttcgatcaggaatgaattctccactaagaacaactccagataagtcccactttggactaatagttggtgattcacagcactcatttcccttttcaggtgatgagacaaaccatgcttctgccacatcaacacaggactttctggatcaagtgacttctcagaagaaagctgaggcccagcctgtccaccaagcttaccaaatgagctcctttgaacagcccttccgtgctccctatcatggatcaagagctggaatagctactcaatttagcactgccaatggacaggtgaaccttcggggaccagggacaagtgctgaattttcagaatttcccttggtgaatgtaaatgataatagagctgggatgacatcttcacctgatgccacaactggccagacttttggctaaaaaaaaaaaaaaagtgtaaataatactggcactttagaacagattaatcaagagtggggttactctgtgtaaatggagtgctgtacagatttaagagcaatgcgtaataacaagttaagctgatatgaatagcaagataatccaataactgcatttcgtttggttagtcagcattctttgaactgccttacatgttgtcacctttatagaagcaatgcattacttgttttagatcagaaacttgctattccacccacaccaagttaaaaaggaaaaaaaaaagactttcgcacaattgtttcctaactgataacattgtacattcttaggagattagtaattgtgtgaaatttactcatactgtttctaagtttttcagcatagtcattgcacttcagcagggaatctgagtatactttacagacagagtgaacttaaaagtttaatgtcaagagattatggcttaaataaattagtgtgtcctatagggggaaaaaaaccaagaaaccaccttttaaaaagaatgatatgccatatacccttgattttcattttgcattatattgacgtgtttttttgaaggaaaaaaagtaataaaaatctgatagtctaagactccactatttaaaagcctaattactttaaaaatatgcatactttcagaacttttaccaaaacacacaactgttgaagcagtcacttctctatggaagtatgcatattggtgtcagtttctttgtacagttgtacttagatattttttatgatttttcatgtgcaggtatcaaggttttgaagttttagtaaaagaaattctgtagattacattcccaagaacataatgcttacacaaaatgtatattccacgttttaaagcttaattgtattttactttacatatacacttcagttaacatagagcacttagaatctatttggtatttttgatttctcaaagtaaaaaaaaaattagatttttaggtttgatatggttgtgtcataatcatctcgtaattgacaattttaacttttggcaataaaaggaaattgggatatctttggaactgtaaaacctggtttaatctttttctttctagactcttgatagattggataattaaacagtatccagagaaactaaagaaatgggcattttaattgcatattttatcttgagttactttttaatgaacactgctcattacaactttacaaaccaaaagtgtttactaattccagtaactaccatttctttttcagctagatgagtgatcggaaaatttttgttgcatttcaaaatctaaataaactacagactttatccttataccatgaatgtttttttttaatactctgtcttaaaataatacagcatggtacaataaatagtgcttttatgtatatatacacacacacacttttctgaagaatgatggtttgagttatgcgttgggcagttttgatttttggaagttatattagttattgactctttgttacaactttttcatttttacattttaaattttctgccatcgttgtcacaatgcacatcctgatatagcaccagtgaaaatctaaaattaatacccttggaaaatgaaaatattcttaatttccattttgactcttatactggccctatagctctgcagtctttgtttcaatatagaatatgttatccatttaaattattttttcttttatttaatgttatcccaagactgttctcataaagaaagggaagaaataactatccacccttaacatccttcatttattttgaatatattggtgtttttatgataaggaatataaattatatttaatgtggtttcctgtatactttggttattaagttttgcttgaaatagtagttttcccgtttgacagctttctttgctgccaaagttttcaagaatttaagacttctttgaagtaaatatttaagttctgccattattgactcttaagattgtgtgtgttgtgttgtgcattacataattacaaaaaggcttcattcaggtgatacgttaaaaatggaactgtgctcaccctaaataggcattggtatttttctcttttggtgagagtaggcatttatttcttgagttgttttggagcctgatcaaaaattttgttcatggagaacttgatgcaattttgatacagtggagaggtttttttcggttgttttaacatcaccagcatagtttttagaatgtgactcttgctgagcatttagggtgagcttgggaaggaaggcctttgaaaatggtagttatgcaagcagactttcaggtgttgcattcctgttttcaacacatttctttaaatctacataatggcagacttttctaccaggttataagcagtttttagataagtgatactcagccagcataacttattgacttaccatttacgtatagtcatcactctcttactgtgaaattccaaatgcctaccagagttaccttgttctatcataatatgacaaacatctcaacagttttggatttccccactttggttcagaaggttatttaatttctatctgggcattaatggagaaaataagtagccttgtgtgctgcttcagattgaaacatggaggatatgagatattcttctgcaattcatgtttctcatttctcaaagtgagcacattgttctataaaaacatgctggtacacccttaaacttttgatcaatctgagtgaggtgtgcttttcctcttgggacctactcacgtttgaagattggaaacatcacgttaggcgaggcagtatctcttgaacatcttctaaagggttttttaaaaccttattctcacatatttcatttgtcttgaatatttaagtggctcttaaacgttttgggtctacatgcaaatgtggtacttaacaaggtaggaatccatcttcttagctctggctgagggtgccagccatcggtcaggtcatttttatctcaagaggcagaaggcagttatgtcaagaattgtgctcagggcaggatttcgtttccacagaggagagacacttgcagagtgccagctaggttagatcttttgccgcttctttcatttgattaatttgggtttttaaagggctgtttaaaaaaaaaaaaaaaaggccgggaaactttaaaagtaggcattactgtagtactgcatttcttagaacattttaaactagaactcatttttttttcacagtatatttacttgaagaagcactataataatcattgagaagtattttgagtctgaaatttaatttaattttccgtttcaaattgctttatttcagggaaataattttccagttgttttgctatattctgcaaataaaaaccgtgtttccttttttcacttaaactttggtaggaaacaaactaaagcagacaaacatttcttgttatgtttgttgctttctttaatccaatggataaaaaagtaaaaccctgtaaacattattttatttttttatgcaataccatgctgtaaatatggttcatcaaataaggatgtacctatgattgaatctttaattctgcacagttagagtttatatataaacgtgtcttgacaatcaaggacttttatgtgagtcttcctttatgatgtttattaatgttatgcattccatttgttttgaagtgagtaccaatgtgctaatttgtattgtctgaaagtatgtaatgtttttacagcttgtttttaagaatctgtaaatatgtacaaacaaatcacagtactgctttatgttagaaggcatatgatgttgtactgtatgtaagcaataatacatagcagtgctaactttacaagtagcatcaggaaagttctaaaaacatttcagagttattaattatccttatttcatttaataatgattatctttaatcagtttttataagcaaattccattgttcctcctattggaacgtaacactgtttacacagcataattgaagttgcaggggagacaggctaaatctgacttcatctgtactcactttcactaagcattgaatggccttaccactcttctgcaagatggaggaagaccgcaaaacttagtgcccatcacactgaaggaagggatgtggttttttttcctgcttctgtactgctacctaactttgtgatttgctttggattttaatatttgtttctgttttagattcaagcccgtaagttttgaggtgacttcagctccattgtgaaatagatagttctcttcatatttcataactacatttcaataattctaaactttctacattgatttttagatacttatttttcaagcttggtttctcagctgatcagatgaatttattcaacttcaatacaaagaaagacaaacctattatagtttcaagtgagtagatattatactgtacaggacagctatttgaacacacacatcactgctttagaaataaaaccgccaatttataaatgtatatgacctacattttataggaaaaaatgtttttaaatgctagtcatttatataatgtgctttgaaggatttgctagtccacttctgtcactttttagtacactggtatcttttatatgtaatgtatgctttttattattgtagcaaagcatttcagtagaaagaattttgcaacaatatgggggaaatttttcattgttggatttgaattatactggattttatctgtgtagtcttacttgtctttattttaatgctgtctgaagggaacttggtatccaaataaagcaggtaacctcattttacttcaagggcatactgtgtagtgctgaatttaatctgaaaatctgatgattttgaaaagaaaaacaagtttataaacattgtacagaagaaattaaatgtgtgtgatggaaatcctgatggtggagcacgttgaattttctgatatatagtgttattttcctgggatcccctatgccttctttgtatttcaactaataaaggaaaaaccctgtcattaaaactggtaagataataggatattctgattatacagtattactattcctatcccattttctgaccttttctcaatcactgtaaatttttattttctatttcctattgataattaaatatgtacataatatagacactgttgtatagaactaaatgaattgggttgctatgcttgagtgggtagtgaaatggaaatatttgatgaatactgagagttcctaaaatgctagagcaaatttccgagggaaaggggggcatcgtgtgtcttgggaaggttgcagcaggttgtttcttcaactccctaagaaatcattgggaaggactcaactgcaaactcgggatcagatacaaaatgggtctttccttcccctctcccccaaaaaataggagcactaaattttaaaatctactcaggtgacagttgctttgcaatgaaacttatcacattgaaattttcagtgttaaataaaaagagatttgtgatatttttaaatataaacttttacatcagtagtcagcagcctgacaattgaaatttggtaagtcgatatattttaaaatattttgctctccaaatagaattgtttttaaacaattgggaggttttttgtttctttaaatatgttttaattgtcattgtaaaaacaaaatcttgcttgaccctatattatgccatgaatgaattgctgagcctttataatacagtgacagcttgtttcatgcatagtcatggaacatagagatgttctttaaactgacctattgataagaggtttaatgagtttcacggctttcaacactattgtcatatagttatctttgccatttggagtttataaaaccattttatgtattgtgatactaaaggaagttgttttgctttactttaaattgaattattagactaatatttgcaaattctgcattttaaatgtggacactggctgtttgaaaaataaaatatagaatacagttttatggataattttcgagctgaatttttcacaatattctgaaccaaataacgaatggtaaatatgcaaaaatcatggtgcatagatataaccgtaaagagaaaagaatttctgtgtggaattaacagttacacaaattgggtaacaattatcagggcctttattatagctttatgtggaatgttattctaaaatgcaagagtcaaatgttactgtcattgaatattttagacttgaaacgtgtttatcatagagcgaagaaaatatgtgttcttttctttacagataagactctgttaacccactgtcagcatacgtgggatttcttttcttttttctttcattagtggagatttgttttcatccatctaccaccttgccagtaccctagcttgtgaccagcgggatgcattgtaagaaagttgtctgtggttaggagtgcagtctgggtccatggaacaaatttaaactaattggccctcgcaatgatcagtcctaggaccctggccttattattagcatggtgctttaaccaattgtacataataataccactgatagtctactaatgcatttcctagatcccagtttttcttgaatgattaggaatggtggggagaggggaggggagatattctacatgatacttctccaatcttctaaagattataagaaaaaataaaaaattgaagtcacttga

SEQ ID NO: 2973 - protein, 178 aa, Homo sapiens
MDKESALDKSDLKKDKNDYLPLYSSTFSSIDKQVYATMPINSFRSGMNSPLRTTPDKSHFGLIVGDSQHSFPFSGDETNHASATSTQDFLDQVTSQKKAEAQPVHQAYQMSSFEQPFRAPYHGSRAGIATQFSTANGQVNLRGPGTSAEFSEFPLVNVNDNRAGMTSSPDATTGQTFG

SEQ ID NO: 2974 - DNA, 7748 bp, Homo sapiens
aaatagatgtgccatcaaaggtggccttctgacatctgaggaagattctggcttttctacatcaccaaaagacaactcactgccaaaaaagaaaaggcagaaaacggagaaaaaatcatctggaatggacaaagagagtgctttggacaaatctgacctgaaaaaagacaaaaatgattacttgcctctttattcttcaagtactaaagtaaaagatgagtatatggttgcagaatatgctgttgaaatgccacattcgtcagttgggggctcgcatttagaagatgcgtcaggagaaatacacccacctaagttagttctcaaaaaaattaatagtaagagaagtctgaaacagccactggagcaaaatcaaacaatttcacctttatccacatatgaagagagcaaagtttcaaagtatgcttttgaacttgtggataaacaggctttactggactcagaaggcaatgctgacattgatcaggttgataatttgcaggaggggcccagtaaacctgtgcatagtagtactaattatgatgatgccatgcagtttttgaagaagaagcggtatcttcaagcagcaagtaacaacagcagggaatatgcgctgaatgtgggtaccatagcttctcagccttctgtaacacaagcagctgtggcaagtgtcattgatgaaagtaccacggcatccatattagagtcacaggcactgaatgtggagattaagagtaatcatgacaaaaatgttattccagatgaggtgatgagacaaaccatgcttctgccacatcaacacaggactttctggatcaagtgacttctcagaagaaagctgaggcccagcctgtccaccaagcttaccaaatgagctcctttgaacagcccttccgtgctccctatcatggatcaagagctggaatagctactcaatttagcactgccaatggacaggtgaaccttcggggaccagggacaagtgctgaattttcagaatttcccttggtgaatgtaaatgataatagagctgggatgacatcttcacctgatgccacaactggccagacttttggctaaaaaaaaaaaaaaagtgtaaataatactggcactttagaacagattaatcaagagtggggttactctgtgtaaatggagtgctgtacagatttaagagcaatgcgtaataacaagttaagctgatatgaatagcaagataatccaataactgcatttcgtttggttagtcagcattctttgaactgccttacatgttgtcacctttatagaagcaatgcattacttgttttagatcagaaacttgctattccacccacaccaagttaaaaaggaaaaaaaaaagactttcgcacaattgtttcctaactgataacattgtacattcttaggagattagtaattgtgtgaaatttactcatactgtttctaagtttttcagcatagtcattgcacttcagcagggaatctgagtatactttacagacagagtgaacttaaaagtttaatgtcaagagattatggcttaaataaattagtgtgtcctatagggggaaaaaaaccaagaaaccaccttttaaaaagaatgatatgccatatacccttgattttcattttgcattatattgacgtgtttttttgaaggaaaaaaagtaataaaaatctgatagtctaagactccactatttaaaagcctaattactttaaaaatatgcatactttcagaacttttaccaaaacacacaactgttgaagcagtcacttctctatggaagtatgcatattggtgtcagtttctttgtacagttgtacttagatattttttatgatttttcatgtgcaggtatcaaggttttgaagttttagtaaaagaaattctgtagattacattcccaagaacataatgcttacacaaaatgtatattccacgttttaaagcttaattgtattttactttacatatacacttcagttaacatagagcacttagaatctatttggtatttttgatttctcaaagtaaaaaaaaaattagatttttaggtttgatatggttgtgtcataatcatctcgtaattgacaattttaacttttggcaataaaaggaaattgggatatctttggaactgtaaaacctggtttaatctttttctttctagactcttgatagattggataattaaacagtatccagagaaactaaagaaatgggcattttaattgcatattttatcttgagttactttttaatgaacactgctcattacaactttacaaaccaaaagtgtttactaattccagtaactaccatttctttttcagctagatgagtgatcggaaaatttttgttgcatttcaaaatctaaataaactacagactttatccttataccatgaatgtttttttttaatactctgtcttaaaataatacagcatggtacaataaatagtgcttttatgtatatatacacacacacacttttctgaagaatgatggtttgagttatgcgttgggcagttttgatttttggaagttatattagttattgactctttgttacaactttttcatttttacattttaaattttctgccatcgttgtcacaatgcacatcctgatatagcaccagtgaaaatctaaaattaatacccttggaaaatgaaaatattcttaatttccattttgactcttatactggccctatagctctgcagtctttgtttcaatatagaatatgttatccatttaaattattttttcttttatttaatgttatcccaagactgttctcataaagaaagggaagaaataactatccacccttaacatccttcatttattttgaatatattggtgtttttatgataaggaatataaattatatttaatgtggtttcctgtatactttggttattaagttttgcttgaaatagtagttttcccgtttgacagctttctttgctgccaaagttttcaagaatttaagacttctttgaagtaaatatttaagttctgccattattgactcttaagattgtgtgtgttgtgttgtgcattacataattacaaaaaggcttcattcaggtgatacgttaaaaatggaactgtgctcaccctaaataggcattggtatttttctcttttggtgagagtaggcatttatttcttgagttgttttggagcctgatcaaaaattttgttcatggagaacttgatgcaattttgatacagtggagaggtttttttcggttgttttaacatcaccagcatagtttttagaatgtgactcttgctgagcatttagggtgagcttgggaaggaaggcctttgaaaatggtagttatgcaagcagactttcaggtgttgcattcctgttttcaacacatttctttaaatctacataatggcagacttttctaccaggttataagcagtttttagataagtgatactcagccagcataacttattgacttaccatttacgtatagtcatcactctcttactgtgaaattccaaatgcctaccagagttaccttgttctatcataatatgacaaacatctcaacagttttggatttccccactttggttcagaaggttatttaatttctatctgggcattaatggagaaaataagtagccttgtgtgctgcttcagattgaaacatggaggatatgagatattcttctgcaattcatgtttctcatttctcaaagtgagcacattgttctataaaaacatgctggtacacccttaaacttttgatcaatctgagtgaggtgtgcttttcctcttgggacctactcacgtttgaagattggaaacatcacgttaggcgaggcagtatctcttgaacatcttctaaagggttttttaaaaccttattctcacatatttcatttgtcttgaatatttaagtggctcttaaacgttttgggtctacatgcaaatgtggtacttaacaaggtaggaatccatcttcttagctctggctgagggtgccagccatcggtcaggtcatttttatctcaagaggcagaaggcagttatgtcaagaattgtgctcagggcaggatttcgtttccacagaggagagacacttgcagagtgccagctaggttagatcttttgccgcttctttcatttgattaatttgggtttttaaagggctgtttaaaaaaaaaaaaaaaaggccgggaaactttaaaagtaggcattactgtagtactgcatttcttagaacattttaaactagaactcatttttttttcacagtatatttacttgaagaagcactataataatcattgagaagtattttgagtctgaaatttaatttaattttccgtttcaaattgctttatttcagggaaataattttccagttgttttgctatattctgcaaataaaaaccgtgtttccttttttcacttaaactttggtaggaaacaaactaaagcagacaaacatttcttgttatgtttgttgctttctttaatccaatggataaaaaagtaaaaccctgtaaacattattttatttttttatgcaataccatgctgtaaatatggttcatcaaataaggatgtacctatgattgaatctttaattctgcacagttagagtttatatataaacgtgtcttgacaatcaaggacttttatgtgagtcttcctttatgatgtttattaatgttatgcattccatttgttttgaagtgagtaccaatgtgctaatttgtattgtctgaaagtatgtaatgtttttacagcttgtttttaagaatctgtaaatatgtacaaacaaatcacagtactgctttatgttagaaggcatatgatgttgtactgtatgtaagcaataatacatagcagtgctaactttacaagtagcatcaggaaagttctaaaaacatttcagagttattaattatccttatttcatttaataatgattatctttaatcagtttttataagcaaattccattgttcctcctattggaacgtaacactgtttacacagcataattgaagttgcaggggagacaggctaaatctgacttcatctgtactcactttcactaagcattgaatggccttaccactcttctgcaagatggaggaagaccgcaaaacttagtgcccatcacactgaaggaagggatgtggttttttttcctgcttctgtactgctacctaactttgtgatttgctttggattttaatatttgtttctgttttagattcaagcccgtaagttttgaggtgacttcagctccattgtgaaatagatagttctcttcatatttcataactacatttcaataattctaaactttctacattgatttttagatacttatttttcaagcttggtttctcagctgatcagatgaatttattcaacttcaatacaaagaaagacaaacctattatagtttcaagtgagtagatattatactgtacaggacagctatttgaacacacacatcactgctttagaaataaaaccgccaatttataaatgtatatgacctacattttataggaaaaaatgtttttaaatgctagtcatttatataatgtgctttgaaggatttgctagtccacttctgtcactttttagtacactggtatcttttatatgtaatgtatgctttttattattgtagcaaagcatttcagtagaaagaattttgcaacaatatgggggaaatttttcattgttggatttgaattatactggattttatctgtgtagtcttacttgtctttattttaatgctgtctgaagggaacttggtatccaaataaagcaggtaacctcattttacttcaagggcatactgtgtagtgctgaatttaatctgaaaatctgatgattttgaaaagaaaaacaagtttataaacattgtacagaagaaattaaatgtgtgtgatggaaatcctgatggtggagcacgttgaattttctgatatatagtgttattttcctgggatcccctatgccttctttgtatttcaactaataaaggaaaaaccctgtcattaaaactggtaagataataggatattctgattatacagtattactattcctatcccattttctgaccttttctcaatcactgtaaatttttattttctatttcctattgataattaaatatgtacataatatagacactgttgtatagaactaaatgaattgggttgctatgcttgagtgggtagtgaaatggaaatatttgatgaatactgagagttcctaaaatgctagagcaaatttccgagggaaaggggggcatcgtgtgtcttgggaaggttgcagcaggttgtttcttcaactccctaagaaatcattgggaaggactcaactgcaaactcgggatcagatacaaaatgggtctttccttcccctctcccccaaaaaataggagcactaaattttaaaatctactcaggtgacagttgctttgcaatgaaacttatcacattgaaattttcagtgttaaataaaaagagatttgtgatatttttaaatataaacttttacatcagtagtcagcagcctgacaattgaaatttggtaagtcgatatattttaaaatattttgctctccaaatagaattgtttttaaacaattgggaggttttttgtttctttaaatatgttttaattgtcattgtaaaaacaaaatcttgcttgaccctatattatgccatgaatgaattgctgagcctttataatacagtgacagcttgtttcatgcatagtcatggaacatagagatgttctttaaactgacctattgataagaggtttaatgagtttcacggctttcaacactattgtcatatagttatctttgccatttggagtttataaaaccattttatgtattgtgatactaaaggaagttgttttgctttactttaaattgaattattagactaatatttgcaaattctgcattttaaatgtggacactggctgtttgaaaaataaaatatagaatacagttttatggataattttcgagctgaatttttcacaatattctgaaccaaataacgaatggtaaatatgcaaaaatcatggtgcatagatataaccgtaaagagaaaagaatttctgtgtggaattaacagttacacaaattgggtaacaattatcagggcctttattatagctttatgtggaatgttattctaaaatgcaagagtcaaatgttactgtcattgaatattttagacttgaaacgtgtttatcatagagcgaagaaaatatgtgttcttttctttacagataagactctgttaacccactgtcagcatacgtgggatttcttttcttttttctttcattagtggagatttgttttcatccatctaccaccttgccagtaccctagcttgtgaccagcgggatgcattgtaagaaagttgtctgtggttaggagtgcagtctgggtccatggaacaaatttaaactaattggccctcgcaatgatcagtcctaggaccctggccttattattagcatggtgctttaaccaattgtacataataataccactgatagtctactaatgcatttcctagatcccagtttttcttgaatgattaggaatggtggggagaggggaggggagatattctacatgatacttctccaatcttctaaagattataagaaaaaataaaaaattgaagtcacttga

SEQ ID NO: 2975 - protein, 231 aa, Homo sapiens
MDKESALDKSDLKKDKNDYLPLYSSSTKVKDEYMVAEYAVEMPHSSVGGSHLEDASGEIHPPKLVLKKINSKRSLKQPLEQNQTISPLSTYEESKVSKYAFELVDKQALLDSEGNADIDQVDNLQEGPSKPVHSSTNYDDAMQFLKKKRYLQAASNNSREYALNVGTIASQPSVTQAAVASVIDESTTASILESQALNVEIKSNHDKNVIPDEVMRQTMLLPHQHRTFWIK

SEQ ID NO: 2976 - DNA, 8192 bp, Homo sapiens
gagtcagggttgtggcctgctcagagaatggggcaaaacggagctgcatgctgccttcctctgcaaaccagcctgtttgctggggataagcgtaaagcaggaaattacttttactgatgtatctgagcaactgatgagagacaaaaaacaaatcagagagccagtagacttacagaaaaagaagaagcggaaacaacgttctcccgcaaaaatccttacaataaatgaggatggatcacttggtttgaaaacccctaaatctcacgtttgtgagcactgcaatgctgcctttagaacgaactatcacttacagagacatgtcttcattcatacaggtgaaaaaccatttcaatgtagtcaatgtgacatgcgtttcatacagaagtacctgcttcagagacatgagaagattcatactggtgaaaaaccatttcgctgtgatgaatgtggtatgagattcatacaaaaatatcatatggaaaggcataagagaactcatagtggagaaaaaccttaccagtgtgaatactgtttacagtatttttccagaacagatcgtgtattgaaacataaacgtatgtgccatgaaaatcatgacaaaaaactaaatagatgtgccatcaaaggtggccttctgacatctgaggaagattctggcttttctacatcaccaaaagacaactcactgccaaaaaagaaaaggcagaaaacggagaaaaaatcatctggaatggacaaagagagtgctttggacaaatctgacctgaaaaaagacaaaaatgattacttgcctctttattcttcaagtactaaagtaaaagatgagtatatggttgcagaatatgctgttgaaatgccacattcgtcagttgggggctcgcatttagaagatgcgtcaggagaaatacacccacctaagttagttctcaaaaaaattaatagtaagagaagtctgaaacagccactggagcaaaatcaaacaatttcacctttatccacatatgaagagagcaaagtttcaaagtatgcttttgaacttgtggataaacaggctttactggactcagaaggcaatgctgacattgatcaggttgataatttgcaggaggggcccagtaaacctgtgcatagtagtactaattatgatgatgccatgcagtttttgaagaagaagcggtatcttcaagcagcaagtaacaacagcagggaatatgcgctgaatgtgggtaccatagcttctcagccttctgtaacacaagcagctgtggcaagtgtcattgatgaaagtaccacggcatccatattagagtcacaggcactgaatgtggagattaagagtaatcatgacaaaaatgttattccagatgaggtactgcagactctgttggatcattattcccacaaagctaatggacagcatgagatatccttcagtgttgcagatactgaagtgacttctagcatatcaataaattcttcagaagtaccagaggtcaccccgtcagagaatgttggatcaagctcccaagcatcctcatcagataaagccaacatgttgcaggaatactccaagtttctgcagcaggctttggacagaactagccaaaatgatgcctatttgaatagcccgagccttaactttgtgactgataaccagaccctcccaaatcagccagcattctcttccatagacaagcaggtctatgccaccatgcccatcaatagctttcgatcaggaatgaattctccactaagaacaactccagataagtcccactttggactaatagttggtgattcacagcactcatttcccttttcaggtgatgagacaaaccatgcttctgccacatcaacacaggactttctggatcaagtgacttctcagaagaaagctgaggcccagcctgtccaccaagcttaccaaatgagctcctttgaacagcccttccgtgctccctatcatggatcaagagctggaatagctactcaatttagcactgccaatggacaggtgaaccttcggggaccagggacaagtgctgaattttcagaatttcccttggtgaatgtaaatgataatagagctgggatgacatcttcacctgatgccacaactggccagacttttggctaaaaaaaaaaaaaaagtgtaaataatactggcactttagaacagattaatcaagagtggggttactctgtgtaaatggagtgctgtacagatttaagagcaatgcgtaataacaagttaagctgatatgaatagcaagataatccaataactgcatttcgtttggttagtcagcattctttgaactgccttacatgttgtcacctttatagaagcaatgcattacttgttttagatcagaaacttgctattccacccacaccaagttaaaaaggaaaaaaaaaagactttcgcacaattgtttcctaactgataacattgtacattcttaggagattagtaattgtgtgaaatttactcatactgtttctaagtttttcagcatagtcattgcacttcagcagggaatctgagtatactttacagacagagtgaacttaaaagtttaatgtcaagagattatggcttaaataaattagtgtgtcctatagggggaaaaaaaccaagaaaccaccttttaaaaagaatgatatgccatatacccttgattttcattttgcattatattgacgtgtttttttgaaggaaaaaaagtaataaaaatctgatagtctaagactccactatttaaaagcctaattactttaaaaatatgcatactttcagaacttttaccaaaacacacaactgttgaagcagtcacttctctatggaagtatgcatattggtgtcagtttctttgtacagttgtacttagatattttttatgatttttcatgtgcaggtatcaaggttttgaagttttagtaaaagaaattctgtagattacattcccaagaacataatgcttacacaaaatgtatattccacgttttaaagcttaattgtattttactttacatatacacttcagttaacatagagcacttagaatctatttggtatttttgatttctcaaagtaaaaaaaaaattagatttttaggtttgatatggttgtgtcataatcatctcgtaattgacaattttaacttttggcaataaaaggaaattgggatatctttggaactgtaaaacctggtttaatctttttctttctagactcttgatagattggataattaaacagtatccagagaaactaaagaaatgggcattttaattgcatattttatcttgagttactttttaatgaacactgctcattacaactttacaaaccaaaagtgtttactaattccagtaactaccatttctttttcagctagatgagtgatcggaaaatttttgttgcatttcaaaatctaaataaactacagactttatccttataccatgaatgtttttttttaatactctgtcttaaaataatacagcatggtacaataaatagtgcttttatgtatatatacacacacacacttttctgaagaatgatggtttgagttatgcgttgggcagttttgatttttggaagttatattagttattgactctttgttacaactttttcatttttacattttaaattttctgccatcgttgtcacaatgcacatcctgatatagcaccagtgaaaatctaaaattaatacccttggaaaatgaaaatattcttaatttccattttgactcttatactggccctatagctctgcagtctttgtttcaatatagaatatgttatccatttaaattattttttcttttatttaatgttatcccaagactgttctcataaagaaagggaagaaataactatccacccttaacatccttcatttattttgaatatattggtgtttttatgataaggaatataaattatatttaatgtggtttcctgtatactttggttattaagttttgcttgaaatagtagttttcccgtttgacagctttctttgctgccaaagttttcaagaatttaagacttctttgaagtaaatatttaagttctgccattattgactcttaagattgtgtgtgttgtgttgtgcattacataattacaaaaaggcttcattcaggtgatacgttaaaaatggaactgtgctcaccctaaataggcattggtatttttctcttttggtgagagtaggcatttatttcttgagttgttttggagcctgatcaaaaattttgttcatggagaacttgatgcaattttgatacagtggagaggtttttttcggttgttttaacatcaccagcatagtttttagaatgtgactcttgctgagcatttagggtgagcttgggaaggaaggcctttgaaaatggtagttatgcaagcagactttcaggtgttgcattcctgttttcaacacatttctttaaatctacataatggcagacttttctaccaggttataagcagtttttagataagtgatactcagccagcataacttattgacttaccatttacgtatagtcatcactctcttactgtgaaattccaaatgcctaccagagttaccttgttctatcataatatgacaaacatctcaacagttttggatttccccactttggttcagaaggttatttaatttctatctgggcattaatggagaaaataagtagccttgtgtgctgcttcagattgaaacatggaggatatgagatattcttctgcaattcatgtttctcatttctcaaagtgagcacattgttctataaaaacatgctggtacacccttaaacttttgatcaatctgagtgaggtgtgcttttcctcttgggacctactcacgtttgaagattggaaacatcacgttaggcgaggcagtatctcttgaacatcttctaaagggttttttaaaaccttattctcacatatttcatttgtcttgaatatttaagtggctcttaaacgttttgggtctacatgcaaatgtggtacttaacaaggtaggaatccatcttcttagctctggctgagggtgccagccatcggtcaggtcatttttatctcaagaggcagaaggcagttatgtcaagaattgtgctcagggcaggatttcgtttccacagaggagagacacttgcagagtgccagctaggttagatcttttgccgcttctttcatttgattaatttgggtttttaaagggctgtttaaaaaaaaaaaaaaaaggccgggaaactttaaaagtaggcattactgtagtactgcatttcttagaacattttaaactagaactcatttttttttcacagtatatttacttgaagaagcactataataatcattgagaagtattttgagtctgaaatttaatttaattttccgtttcaaattgctttatttcagggaaataattttccagttgttttgctatattctgcaaataaaaaccgtgtttccttttttcacttaaactttggtaggaaacaaactaaagcagacaaacatttcttgttatgtttgttgctttctttaatccaatggataaaaaagtaaaaccctgtaaacattattttatttttttatgcaataccatgctgtaaatatggttcatcaaataaggatgtacctatgattgaatctttaattctgcacagttagagtttatatataaacgtgtcttgacaatcaaggacttttatgtgagtcttcctttatgatgtttattaatgttatgcattccatttgttttgaagtgagtaccaatgtgctaatttgtattgtctgaaagtatgtaatgtttttacagcttgtttttaagaatctgtaaatatgtacaaacaaatcacagtactgctttatgttagaaggcatatgatgttgtactgtatgtaagcaataatacatagcagtgctaactttacaagtagcatcaggaaagttctaaaaacatttcagagttattaattatccttatttcatttaataatgattatctttaatcagtttttataagcaaattccattgttcctcctattggaacgtaacactgtttacacagcataattgaagttgcaggggagacaggctaaatctgacttcatctgtactcactttcactaagcattgaatggccttaccactcttctgcaagatggaggaagaccgcaaaacttagtgcccatcacactgaaggaagggatgtggttttttttcctgcttctgtactgctacctaactttgtgatttgctttggattttaatatttgtttctgttttagattcaagcccgtaagttttgaggtgacttcagctccattgtgaaatagatagttctcttcatatttcataactacatttcaataattctaaactttctacattgatttttagatacttatttttcaagcttggtttctcagctgatcagatgaatttattcaacttcaatacaaagaaagacaaacctattatagtttcaagtgagtagatattatactgtacaggacagctatttgaacacacacatcactgctttagaaataaaaccgccaatttataaatgtatatgacctacattttataggaaaaaatgtttttaaatgctagtcatttatataatgtgctttgaaggatttgctagtccacttctgtcactttttagtacactggtatcttttatatgtaatgtatgctttttattattgtagcaaagcatttcagtagaaagaattttgcaacaatatgggggaaatttttcattgttggatttgaattatactggattttatctgtgtagtcttacttgtctttattttaatgctgtctgaagggaacttggtatccaaataaagcaggtaacctcattttacttcaagggcatactgtgtagtgctgaatttaatctgaaaatctgatgattttgaaaagaaaaacaagtttataaacattgtacagaagaaattaaatgtgtgtgatggaaatcctgatggtggagcacgttgaattttctgatatatagtgttattttcctgggatcccctatgccttctttgtatttcaactaataaaggaaaaaccctgtcattaaaactggtaagataataggatattctgattatacagtattactattcctatcccattttctgaccttttctcaatcactgtaaatttttattttctatttcctattgataattaaatatgtacataatatagacactgttgtatagaactaaatgaattgggttgctatgcttgagtgggtagtgaaatggaaatatttgatgaatactgagagttcctaaaatgctagagcaaatttccgagggaaaggggggcatcgtgtgtcttgggaaggttgcagcaggttgtttcttcaactccctaagaaatcattgggaaggactcaactgcaaactcgggatcagatacaaaatgggtctttccttcccctctcccccaaaaaataggagcactaaattttaaaatctactcaggtgacagttgctttgcaatgaaacttatcacattgaaattttcagtgttaaataaaaagagatttgtgatatttttaaatataaacttttacatcagtagtcagcagcctgacaattgaaatttggtaagtcgatatattttaaaatattttgctctccaaatagaattgtttttaaacaattgggaggttttttgtttctttaaatatgttttaattgtcattgtaaaaacaaaatcttgcttgaccctatattatgccatgaatgaattgctgagcctttataatacagtgacagcttgtttcatgcatagtcatggaacatagagatgttctttaaactgacctattgataagaggtttaatgagtttcacggctttcaacactattgtcatatagttatctttgccatttggagtttataaaaccattttatgtattgtgatactaaaggaagttgttttgctttactttaaattgaattattagactaatatttgcaaattctgcattttaaatgtggacactggctgtttgaaaaataaaatatagaatacagttttatggataattttcgagctgaatttttcacaatattctgaaccaaataacgaatggtaaatatgcaaaaatcatggtgcata

SEQ ID NO: 2977 - protein, 667 aa, Homo sapiens
MRDKKQIREPVDLQKKKKRKQRSPAKILTINEDGSLGLKTPKSHVCEHCNAAFRTNYHLQRHVFIHTGEKPFQCSQCDMRFIQKYLLQRHEKIHTGEKPFRCDECGMRFIQKYHMERHKRTHSGEKPYQCEYCLQYFSRTDRVLKHKRMCHENHDKKLNRCAIKGGLLTSEEDSGFSTSPKDNSLPKKKRQKTEKKSSGMDKESALDKSDLKKDKNDYLPLYSSSTKVKDEYMVAEYAVEMPHSSVGGSHLEDASGEIHPPKLVLKKINSKRSLKQPLEQNQTISPLSTYEESKVSKYAFELVDKQALLDSEGNADIDQVDNLQEGPSKPVHSSTNYDDAMQFLKKKRYLQAASNNSREYALNVGTIASQPSVTQAAVASVIDESTTASILESQALNVEIKSNHDKNVIPDEVLQTLLDHYSHKANGQHEISFSVADTEVTSSISINSSEVPEVTPSENVGSSSQASSSDKANMLQEYSKFLQQALDRTSQNDAYLNSPSLNFVTDNQTLPNQPAFSSIDKQVYATMPINSFRSGMNSPLRTTPDKSHFGLIVGDSQHSFPFSGDETNHASATSTQDFLDQVTSQKKAEAQPVHQAYQMSSFEQPFRAPYHGSRAGIATQFSTANGQVNLRGPGTSAEFSEFPLVNVNDNRAGMTSSPDATTGQTFG

SEQ ID NO: 2978 - DNA, 8192 bp, Homo sapiens
aaaggttggagctgccgccgcctgcagtcggtgaccgcgcgactcggcgcccgcccgcggaatcggatggcataagtgattaaggtggtattgaggatttctgaagcctatgaaaggtagaaactcaaccatgatttctttttcaactctacagcattcctttccttgaagtcttcgtttttaccttagtctcgggcagttatacttaagcatgaacattgacgacaaactggaaggattgtttcttaaatgtggcggcatagacgaaatgcagtcttccaggacaatggttgtaatgggtggagtgtctggccagtctactgtgtctggagagctacaggattcagtacttcaagatcgaagtatgcctcaccaggagatccttgctgcagatgaagtgttacaagaaagtgaaatgagacaacaggatatgatatcacatgatgaactcatggtccatgaggagacagtgaaaaatgatgaagagcagatggaaacacatgaaagacttcctcaaggactacagtatgcacttaatgtccctataagcgtaaagcaggaaattacttttactgatgtatctgagcaactgatgagagacaaaaaacaaatcagagagccagtagacttacagaaaaagaagaagcggaaacaacgttctcccgcaaaaatccttacaataaatgaggatggatcacttggtttgaaaacccctaaatctcacgtttgtgagcactgcaatgctgcctttagaacgaactatcacttacagagacatgtcttcattcatacaggtgaaaaaccatttcaatgtagtcaatgtgacatgcgtttcatacagaagtacctgcttcagagacatgagaagattcatactggtgaaaaaccatttcgctgtgatgaatgtggtatgagattcatacaaaaatatcatatggaaaggcataagagaactcatagtggagaaaaaccttaccagtgtgaatactgtttacagtatttttccagaacagatcgtgtattgaaacataaacgtatgtgccatgaaaatcatgacaaaaaactaaatagatgtgccatcaaaggtggccttctgacatctgaggaagattctggcttttctacatcaccaaaagacaactcactgccaaaaaagaaaaggcagaaaacggagaaaaaatcatctggaatggacaaagagagtgctttggacaaatctgacctgaaaaaagacaaaaatgattacttgcctctttattcttcaagtactaaagtaaaagatgagtatatggttgcagaatatgctgttgaaatgccacattcgtcagttgggggctcgcatttagaagatgcgtcaggagaaatacacccacctaagttagttctcaaaaaaattaatagtaagagaagtctgaaacagccactggagcaaaatcaaacaatttcacctttatccacatatgaagagagcaaagtttcaaagtatgcttttgaacttgtggataaacaggctttactggactcagaaggcaatgctgacattgatcaggttgataatttgcaggaggggcccagtaaacctgtgcatagtagtactaattatgatgatgccatgcagtttttgaagaagaagcggtatcttcaagcagcaagtaacaacagcagggaatatgcgctgaatgtgggtaccatagcttctcagccttctgtaacacaagcagctgtggcaagtgtcattgatgaaagtaccacggcatccatattagagtcacaggcactgaatgtggagattaagagtaatcatgacaaaaatgttattccagatgaggtactgcagactctgttggatcattattcccacaaagctaatggacagcatgagatatccttcagtgttgcagatactgaagtgacttctagcatatcaataaattcttcagaagtaccagaggtcaccccgtcagagaatgttggatcaagctcccaagcatcctcatcagataaagccaacatgttgcaggaatactccaagtttctgcagcaggctttggacagaactagccaaaatgatgcctatttgaatagcccgagccttaactttgtgactgataaccagaccctcccaaatcagccagcattctcttccatagacaagcaggtctatgccaccatgcccatcaatagctttcgatcaggaatgaattctccactaagaacaactccagataagtcccactttggactaatagttggtgattcacagcactcatttcccttttcaggtgatgagacaaaccatgcttctgccacatcaacacaggactttctggatcaagtgacttctcagaagaaagctgaggcccagcctgtccaccaagcttaccaaatgagctcctttgaacagcccttccgtgctccctatcatggatcaagagctggaatagctactcaatttagcactgccaatggacaggtgaaccttcggggaccagggacaagtgctgaattttcagaatttcccttggtgaatgtaaatgataatagagctgggatgacatcttcacctgatgccacaactggccagacttttggctaaaaaaaaaaaaaaagtgtaaataatactggcactttagaacagattaatcaagagtggggttactctgtgtaaatggagtgctgtacagatttaagagcaatgcgtaataacaagttaagctgatatgaatagcaagataatccaataactgcatttcgtttggttagtcagcattctttgaactgccttacatgttgtcacctttatagaagcaatgcattacttgttttagatcagaaacttgctattccacccacaccaagttaaaaaggaaaaaaaaaagactttcgcacaattgtttcctaactgataacattgtacattcttaggagattagtaattgtgtgaaatttactcatactgtttctaagtttttcagcatagtcattgcacttcagcagggaatctgagtatactttacagacagagtgaacttaaaagtttaatgtcaagagattatggcttaaataaattagtgtgtcctatagggggaaaaaaaccaagaaaccaccttttaaaaagaatgatatgccatatacccttgattttcattttgcattatattgacgtgtttttttgaaggaaaaaaagtaataaaaatctgatagtctaagactccactatttaaaagcctaattactttaaaaatatgcatactttcagaacttttaccaaaacacacaactgttgaagcagtcacttctctatggaagtatgcatattggtgtcagtttctttgtacagttgtacttagatattttttatgatttttcatgtgcaggtatcaaggttttgaagttttagtaaaagaaattctgtagattacattcccaagaacataatgcttacacaaaatgtatattccacgttttaaagcttaattgtattttactttacatatacacttcagttaacatagagcacttagaatctatttggtatttttgatttctcaaagtaaaaaaaaaattagatttttaggtttgatatggttgtgtcataatcatctcgtaattgacaattttaacttttggcaataaaaggaaattgggatatctttggaactgtaaaacctggtttaatctttttctttctagactcttgatagattggataattaaacagtatccagagaaactaaagaaatgggcattttaattgcatattttatcttgagttactttttaatgaacactgctcattacaactttacaaaccaaaagtgtttactaattccagtaactaccatttctttttcagctagatgagtgatcggaaaatttttgttgcatttcaaaatctaaataaactacagactttatccttataccatgaatgtttttttttaatactctgtcttaaaataatacagcatggtacaataaatagtgcttttatgtatatatacacacacacacttttctgaagaatgatggtttgagttatgcgttgggcagttttgatttttggaagttatattagttattgactctttgttacaactttttcatttttacattttaaattttctgccatcgttgtcacaatgcacatcctgatatagcaccagtgaaaatctaaaattaatacccttggaaaatgaaaatattcttaatttccattttgactcttatactggccctatagctctgcagtctttgtttcaatatagaatatgttatccatttaaattattttttcttttatttaatgttatcccaagactgttctcataaagaaagggaagaaataactatccacccttaacatccttcatttattttgaatatattggtgtttttatgataaggaatataaattatatttaatgtggtttcctgtatactttggttattaagttttgcttgaaatagtagttttcccgtttgacagctttctttgctgccaaagttttcaagaatttaagacttctttgaagtaaatatttaagttctgccattattgactcttaagattgtgtgtgttgtgttgtgcattacataattacaaaaaggcttcattcaggtgatacgttaaaaatggaactgtgctcaccctaaataggcattggtatttttctcttttggtgagagtaggcatttatttcttgagttgttttggagcctgatcaaaaattttgttcatggagaacttgatgcaattttgatacagtggagaggtttttttcggttgttttaacatcaccagcatagtttttagaatgtgactcttgctgagcatttagggtgagcttgggaaggaaggcctttgaaaatggtagttatgcaagcagactttcaggtgttgcattcctgttttcaacacatttctttaaatctacataatggcagacttttctaccaggttataagcagtttttagataagtgatactcagccagcataacttattgacttaccatttacgtatagtcatcactctcttactgtgaaattccaaatgcctaccagagttaccttgttctatcataatatgacaaacatctcaacagttttggatttccccactttggttcagaaggttatttaatttctatctgggcattaatggagaaaataagtagccttgtgtgctgcttcagattgaaacatggaggatatgagatattcttctgcaattcatgtttctcatttctcaaagtgagcacattgttctataaaaacatgctggtacacccttaaacttttgatcaatctgagtgaggtgtgcttttcctcttgggacctactcacgtttgaagattggaaacatcacgttaggcgaggcagtatctcttgaacatcttctaaagggttttttaaaaccttattctcacatatttcatttgtcttgaatatttaagtggctcttaaacgttttgggtctacatgcaaatgtggtacttaacaaggtaggaatccatcttcttagctctggctgagggtgccagccatcggtcaggtcatttttatctcaagaggcagaaggcagttatgtcaagaattgtgctcagggcaggatttcgtttccacagaggagagacacttgcagagtgccagctaggttagatcttttgccgcttctttcatttgattaatttgggtttttaaagggctgtttaaaaaaaaaaaaaaaaggccgggaaactttaaaagtaggcattactgtagtactgcatttcttagaacattttaaactagaactcatttttttttcacagtatatttacttgaagaagcactataataatcattgagaagtattttgagtctgaaatttaatttaattttccgtttcaaattgctttatttcagggaaataattttccagttgttttgctatattctgcaaataaaaaccgtgtttccttttttcacttaaactttggtaggaaacaaactaaagcagacaaacatttcttgttatgtttgttgctttctttaatccaatggataaaaaagtaaaaccctgtaaacattattttatttttttatgcaataccatgctgtaaatatggttcatcaaataaggatgtacctatgattgaatctttaattctgcacagttagagtttatatataaacgtgtcttgacaatcaaggacttttatgtgagtcttcctttatgatgtttattaatgttatgcattccatttgttttgaagtgagtaccaatgtgctaatttgtattgtctgaaagtatgtaatgtttttacagcttgtttttaagaatctgtaaatatgtacaaacaaatcacagtactgctttatgttagaaggcatatgatgttgtactgtatgtaagcaataatacatagcagtgctaactttacaagtagcatcaggaaagttctaaaaacatttcagagttattaattatccttatttcatttaataatgattatctttaatcagtttttataagcaaattccattgttcctcctattggaacgtaacactgtttacacagcataattgaagttgcaggggagacaggctaaatctgacttcatctgtactcactttcactaagcattgaatggccttaccactcttctgcaagatggaggaagaccgcaaaacttagtgcccatcacactgaaggaagggatgtggttttttttcctgcttctgtactgctacctaactttgtgatttgctttggattttaatatttgtttctgttttagattcaagcccgtaagttttgaggtgacttcagctccattgtgaaatagatagttctcttcatatttcataactacatttcaataattctaaactttctacattgatttttagatacttatttttcaagcttggtttctcagctgatcagatgaatttattcaacttcaatacaaagaaagacaaacctattatagtttcaagtgagtagatattatactgtacaggacagctatttgaacacacacatcactgctttagaaataaaaccgccaatttataaatgtatatgacctacattttataggaaaaaatgtttttaaatgctagtcatttatataatgtgctttgaaggatttgctagtccacttctgtcactttttagtacactggtatcttttatatgtaatgtatgctttttattattgtagcaaagcatttcagtagaaagaattttgcaacaatatgggggaaatttttcattgttggatttgaattatactggattttatctgtgtagtcttacttgtctttattttaatgctgtctgaagggaacttggtatccaaataaagcaggtaacctcattttacttcaagggcatactgtgtagtgctgaatttaatctgaaaatctgatgattttgaaaagaaaaacaagtttataaacattgtacagaagaaattaaatgtgtgtgatggaaatcctgatggtggagcacgttgaattttctgatatatagtgttattttcctgggatcccctatgccttctttgtatttcaactaataaaggaaaaaccctgtcattaaaactggtaagataataggatattctgattatacagtattactattcctatcccattttctgaccttttctcaatcactgtaaatttttattttctatttcctattgataattaaatatgtacataatatagacactgttgtatagaactaaatgaattgggttgctatgcttgagtgggtagtgaaatggaaatatttgatgaatactgagagttcctaaaatgctagagcaaatttccgagggaaaggggggcatcgtgtgtcttgggaaggttgcagcaggttgtttcttcaactccctaagaaatcattgggaaggactcaactgcaaactcgggatcagatacaaaatgggtctttccttcccctctcccccaaaaaataggagcactaaattttaaaatctactcaggtgacagttgctttgcaatgaaacttatcacattgaaattttcagtgttaaataaaaagagatttgtgatatttttaaatataaacttttacatcagtagtcagcagcctgacaattgaaatttggtaagtcgatatattttaaaatattttgctctccaaatagaattgtttttaaacaattgg

SEQ ID NO: 2979 - protein, 794 aa, Homo sapiens
MNIDDKLEGLFLKCGGIDEMQSSRTMVVMGGVSGQSTVSGELQDSVLQDRSMPHQEILAADEVLQESEMRQQDMISHDELMVHEETVKNDEEQMETHERLPQGLQYALNVPISVKQEITFTDVSEQLMRDKKQIREPVDLQKKKKRKQRSPAKILTINEDGSLGLKTPKSHVCEHCNAAFRTNYHLQRHVFIHTGEKPFQCSQCDMRFIQKYLLQRHEKIHTGEKPFRCDECGMRFIQKYHMERHKRTHSGEKPYQCEYCLQYFSRTDRVLKHKRMCHENHDKKLNRCAIKGGLLTSEEDSGFSTSPKDNSLPKKKRQKTEKKSSGMDKESALDKSDLKKDKNDYLPLYSSSTKVKDEYMVAEYAVEMPHSSVGGSHLEDASGEIHPPKLVLKKINSKRSLKQPLEQNQTISPLSTYEESKVSKYAFELVDKQALLDSEGNADIDQVDNLQEGPSKPVHSSTNYDDAMQFLKKKRYLQAASNNSREYALNVGTIASQPSVTQAAVASVIDESTTASILESQALNVEIKSNHDKNVIPDEVLQTLLDHYSHKANGQHEISFSVADTEVTSSISINSSEVPEVTPSENVGSSSQASSSDKANMLQEYSKFLQQALDRTSQNDAYLNSPSLNFVTDNQTLPNQPAFSSIDKQVYATMPINSFRSGMNSPLRTTPDKSHFGLIVGDSQHSFPFSGDETNHASATSTQDFLDQVTSQKKAEAQPVHQAYQMSSFEQPFRAPYHGSRAGIATQFSTANGQVNLRGPGTSAEFSEFPLVNVNDNRAGMTSSPDATTGQTFG

SEQ ID NO: 2980 - DNA, 8192 bp, Homo sapiens
agaaaggcgcaggggtgggagctgttgccgaagctgccacagcaaaagttctcccccctccccccttcccctcctctcaaggcccctagaaaggttggagctgccgccgcctgcagtcggtgaccgcgcgactcggcgcccgcccgcggatagagggaggaatcagcagcttggaaattcaagcacgtgatctggcgggatgggcgtttgcctaacgtatttaatggaggaatcggatggcataagtgattaaggtggtattgaggatttctgaagcctatgaaaggcagttatacttaagcatgaacattgacgacaaactggaaggattgtttcttaaatgtggcggcatagacgaaatgcagtcttccaggacaatggttgtaatgggtggagtgtctggccagtctactgtgtctggagagctacaggattcagtacttcaagatcgaagtatgcctcaccaggagatccttgctgcagatgaagtgttacaagaaagtgaaatgagacaacaggatatgatatcacatgatgaactcatggtccatgaggagacagtgaaaaatgatgaagagcagatggaaacacatgaaagacttcctcaaggactacagtatgcacttaatgtccctataagcgtaaagcaggaaattacttttactgatgtatctgagcaactgatgagagacaaaaaacaaatcagagagccagtagacttacagaaaaagaagaagcggaaacaacgttctcccgcaaaaatccttacaataaatgaggatggatcacttggtttgaaaacccctaaatctcacgtttgtgagcactgcaatgctgcctttagaacgaactatcacttacagagacatgtcttcattcatacaggtgaaaaaccatttcaatgtagtcaatgtgacatgcgtttcatacagaagtacctgcttcagagacatgagaagattcatactggtgaaaaaccatttcgctgtgatgaatgtggtatgagattcatacaaaaatatcatatggaaaggcataagagaactcatagtggagaaaaaccttaccagtgtgaatactgtttacagtatttttccagaacagatcgtgtattgaaacataaacgtatgtgccatgaaaatcatgacaaaaaactaaatagatgtgccatcaaaggtggccttctgacatctgaggaagattctggcttttctacatcaccaaaagacaactcactgccaaaaaagaaaaggcagaaaacggagaaaaaatcatctggaatggacaaagagagtgctttggacaaatctgacctgaaaaaagacaaaaatgattacttgcctctttattcttcaagtactaaagtaaaagatgagtatatggttgcagaatatgctgttgaaatgccacattcgtcagttgggggctcgcatttagaagatgcgtcaggagaaatacacccacctaagttagttctcaaaaaaattaatagtaagagaagtctgaaacagccactggagcaaaatcaaacaatttcacctttatccacatatgaagagagcaaagtttcaaagtatgcttttgaacttgtggataaacaggctttactggactcagaaggcaatgctgacattgatcaggttgataatttgcaggaggggcccagtaaacctgtgcatagtagtactaattatgatgatgccatgcagtttttgaagaagaagcggtatcttcaagcagcaagtaacaacagcagggaatatgcgctgaatgtgggtaccatagcttctcagccttctgtaacacaagcagctgtggcaagtgtcattgatgaaagtaccacggcatccatattagagtcacaggcactgaatgtggagattaagagtaatcatgacaaaaatgttattccagatgaggtactgcagactctgttggatcattattcccacaaagctaatggacagcatgagatatccttcagtgttgcagatactgaagtgacttctagcatatcaataaattcttcagaagtaccagaggtcaccccgtcagagaatgttggatcaagctcccaagcatcctcatcagataaagccaacatgttgcaggaatactccaagtttctgcagcaggctttggacagaactagccaaaatgatgcctatttgaatagcccgagccttaactttgtgactgataaccagaccctcccaaatcagccagcattctcttccatagacaagcaggtctatgccaccatgcccatcaatagctttcgatcaggaatgaattctccactaagaacaactccagataagtcccactttggactaatagttggtgattcacagcactcatttcccttttcaggtgatgagacaaaccatgcttctgccacatcaacacaggactttctggatcaagtgacttctcagaagaaagctgaggcccagcctgtccaccaagcttaccaaatgagctcctttgaacagcccttccgtgctccctatcatggatcaagagctggaatagctactcaatttagcactgccaatggacaggtgaaccttcggggaccagggacaagtgctgaattttcagaatttcccttggtgaatgtaaatgataatagagctgggatgacatcttcacctgatgccacaactggccagacttttggctaaaaaaaaaaaaaaagtgtaaataatactggcactttagaacagattaatcaagagtggggttactctgtgtaaatggagtgctgtacagatttaagagcaatgcgtaataacaagttaagctgatatgaatagcaagataatccaataactgcatttcgtttggttagtcagcattctttgaactgccttacatgttgtcacctttatagaagcaatgcattacttgttttagatcagaaacttgctattccacccacaccaagttaaaaaggaaaaaaaaaagactttcgcacaattgtttcctaactgataacattgtacattcttaggagattagtaattgtgtgaaatttactcatactgtttctaagtttttcagcatagtcattgcacttcagcagggaatctgagtatactttacagacagagtgaacttaaaagtttaatgtcaagagattatggcttaaataaattagtgtgtcctatagggggaaaaaaaccaagaaaccaccttttaaaaagaatgatatgccatatacccttgattttcattttgcattatattgacgtgtttttttgaaggaaaaaaagtaataaaaatctgatagtctaagactccactatttaaaagcctaattactttaaaaatatgcatactttcagaacttttaccaaaacacacaactgttgaagcagtcacttctctatggaagtatgcatattggtgtcagtttctttgtacagttgtacttagatattttttatgatttttcatgtgcaggtatcaaggttttgaagttttagtaaaagaaattctgtagattacattcccaagaacataatgcttacacaaaatgtatattccacgttttaaagcttaattgtattttactttacatatacacttcagttaacatagagcacttagaatctatttggtatttttgatttctcaaagtaaaaaaaaaattagatttttaggtttgatatggttgtgtcataatcatctcgtaattgacaattttaacttttggcaataaaaggaaattgggatatctttggaactgtaaaacctggtttaatctttttctttctagactcttgatagattggataattaaacagtatccagagaaactaaagaaatgggcattttaattgcatattttatcttgagttactttttaatgaacactgctcattacaactttacaaaccaaaagtgtttactaattccagtaactaccatttctttttcagctagatgagtgatcggaaaatttttgttgcatttcaaaatctaaataaactacagactttatccttataccatgaatgtttttttttaatactctgtcttaaaataatacagcatggtacaataaatagtgcttttatgtatatatacacacacacacttttctgaagaatgatggtttgagttatgcgttgggcagttttgatttttggaagttatattagttattgactctttgttacaactttttcatttttacattttaaattttctgccatcgttgtcacaatgcacatcctgatatagcaccagtgaaaatctaaaattaatacccttggaaaatgaaaatattcttaatttccattttgactcttatactggccctatagctctgcagtctttgtttcaatatagaatatgttatccatttaaattattttttcttttatttaatgttatcccaagactgttctcataaagaaagggaagaaataactatccacccttaacatccttcatttattttgaatatattggtgtttttatgataaggaatataaattatatttaatgtggtttcctgtatactttggttattaagttttgcttgaaatagtagttttcccgtttgacagctttctttgctgccaaagttttcaagaatttaagacttctttgaagtaaatatttaagttctgccattattgactcttaagattgtgtgtgttgtgttgtgcattacataattacaaaaaggcttcattcaggtgatacgttaaaaatggaactgtgctcaccctaaataggcattggtatttttctcttttggtgagagtaggcatttatttcttgagttgttttggagcctgatcaaaaattttgttcatggagaacttgatgcaattttgatacagtggagaggtttttttcggttgttttaacatcaccagcatagtttttagaatgtgactcttgctgagcatttagggtgagcttgggaaggaaggcctttgaaaatggtagttatgcaagcagactttcaggtgttgcattcctgttttcaacacatttctttaaatctacataatggcagacttttctaccaggttataagcagtttttagataagtgatactcagccagcataacttattgacttaccatttacgtatagtcatcactctcttactgtgaaattccaaatgcctaccagagttaccttgttctatcataatatgacaaacatctcaacagttttggatttccccactttggttcagaaggttatttaatttctatctgggcattaatggagaaaataagtagccttgtgtgctgcttcagattgaaacatggaggatatgagatattcttctgcaattcatgtttctcatttctcaaagtgagcacattgttctataaaaacatgctggtacacccttaaacttttgatcaatctgagtgaggtgtgcttttcctcttgggacctactcacgtttgaagattggaaacatcacgttaggcgaggcagtatctcttgaacatcttctaaagggttttttaaaaccttattctcacatatttcatttgtcttgaatatttaagtggctcttaaacgttttgggtctacatgcaaatgtggtacttaacaaggtaggaatccatcttcttagctctggctgagggtgccagccatcggtcaggtcatttttatctcaagaggcagaaggcagttatgtcaagaattgtgctcagggcaggatttcgtttccacagaggagagacacttgcagagtgccagctaggttagatcttttgccgcttctttcatttgattaatttgggtttttaaagggctgtttaaaaaaaaaaaaaaaaggccgggaaactttaaaagtaggcattactgtagtactgcatttcttagaacattttaaactagaactcatttttttttcacagtatatttacttgaagaagcactataataatcattgagaagtattttgagtctgaaatttaatttaattttccgtttcaaattgctttatttcagggaaataattttccagttgttttgctatattctgcaaataaaaaccgtgtttccttttttcacttaaactttggtaggaaacaaactaaagcagacaaacatttcttgttatgtttgttgctttctttaatccaatggataaaaaagtaaaaccctgtaaacattattttatttttttatgcaataccatgctgtaaatatggttcatcaaataaggatgtacctatgattgaatctttaattctgcacagttagagtttatatataaacgtgtcttgacaatcaaggacttttatgtgagtcttcctttatgatgtttattaatgttatgcattccatttgttttgaagtgagtaccaatgtgctaatttgtattgtctgaaagtatgtaatgtttttacagcttgtttttaagaatctgtaaatatgtacaaacaaatcacagtactgctttatgttagaaggcatatgatgttgtactgtatgtaagcaataatacatagcagtgctaactttacaagtagcatcaggaaagttctaaaaacatttcagagttattaattatccttatttcatttaataatgattatctttaatcagtttttataagcaaattccattgttcctcctattggaacgtaacactgtttacacagcataattgaagttgcaggggagacaggctaaatctgacttcatctgtactcactttcactaagcattgaatggccttaccactcttctgcaagatggaggaagaccgcaaaacttagtgcccatcacactgaaggaagggatgtggttttttttcctgcttctgtactgctacctaactttgtgatttgctttggattttaatatttgtttctgttttagattcaagcccgtaagttttgaggtgacttcagctccattgtgaaatagatagttctcttcatatttcataactacatttcaataattctaaactttctacattgatttttagatacttatttttcaagcttggtttctcagctgatcagatgaatttattcaacttcaatacaaagaaagacaaacctattatagtttcaagtgagtagatattatactgtacaggacagctatttgaacacacacatcactgctttagaaataaaaccgccaatttataaatgtatatgacctacattttataggaaaaaatgtttttaaatgctagtcatttatataatgtgctttgaaggatttgctagtccacttctgtcactttttagtacactggtatcttttatatgtaatgtatgctttttattattgtagcaaagcatttcagtagaaagaattttgcaacaatatgggggaaatttttcattgttggatttgaattatactggattttatctgtgtagtcttacttgtctttattttaatgctgtctgaagggaacttggtatccaaataaagcaggtaacctcattttacttcaagggcatactgtgtagtgctgaatttaatctgaaaatctgatgattttgaaaagaaaaacaagtttataaacattgtacagaagaaattaaatgtgtgtgatggaaatcctgatggtggagcacgttgaattttctgatatatagtgttattttcctgggatcccctatgccttctttgtatttcaactaataaaggaaaaaccctgtcattaaaactggtaagataataggatattctgattatacagtattactattcctatcccattttctgaccttttctcaatcactgtaaatttttattttctatttcctattgataattaaatatgtacataatatagacactgttgtatagaactaaatgaattgggttgctatgcttgagtgggtagtgaaatggaaatatttgatgaatactgagagttcctaaaatgctagagcaaatttccgagggaaaggggggcatcgtgtgtcttgggaaggttgcagcaggttgtttcttcaactccctaagaaatcattgggaaggactcaactgcaaactcgggatcagatacaaaatgggtctttccttcccctctcccccaaaaaataggagcactaaattttaaaatctactcaggtgacagttgctttgcaatgaaacttatcacattgaaattttcagtgttaaataaaaagagatttgtgatatttttaaatataaacttttacat

SEQ ID NO: 2981 - protein, 794 aa, Homo sapiens; identical to SEQ ID NO: 2979

SEQ ID NO: 2982 - DNA, 8192 bp, Homo sapiens
gagggggaggaagaggagaaaggcgcaggggtgggagctgttgccgaagctgccacagcaaaagttctcccccctccccccttcccctcctctcaaggcccctagaaaggttggagctgccgccgcctgcagtcggtgaccgcgcgactcggcgcccgcccgcggatagagggaggaatcagcagcttggaaattcaagcacgtgatctggcgggatgggcgtttgcctaacgtatttaatggaggaatcggatggcataagtgattaaggtggtattgaggatttctgaagcctatgaaaggtagaaactcaaccatgatttctttttcaactctacagcattcctttccttgaagtcttcgtttttaccttagtctcgggcagttatacttaagcatgaacattgacgacaaactggaaggattgtttcttaaatgtggcggcatagacgaaatgcagtcttccaggacaatggttgtaatgggtggagtgtctggccagtctactgtgtctggagagctacaggattcagtacttcaagatcgaagtatgcctcaccaggagatccttgctgcagatgaagtgttacaagaaagtgaaatgagacaacaggatatgatatcacatgatgaactcatggtccatgaggagacagtgaaaaatgatgaagagcagatggaaacacatgaaagacttcctcaaggactacagtatgcacttaatgtccctataagcgtaaagcaggaaattacttttactgatgtatctgagcaactgatgagagacaaaaaacaaatcagagagccagtagacttacagaaaaagaagaagcggaaacaacgttctcccgcaaaaatccttacaataaatgaggatggatcacttggtttgaaaacccctaaatctcacgtttgtgagcactgcaatgctgcctttagaacgaactatcacttacagagacatgtcttcattcatacaggtgaaaaaccatttcaatgtagtcaatgtgacatgcgtttcatacagaagtacctgcttcagagacatgagaagattcatactggtgaaaaaccatttcgctgtgatgaatgtggtatgagattcatacaaaaatatcatatggaaaggcataagagaactcatagtggagaaaaaccttaccagtgtgaatactgtttacagtatttttccagaacagatcgtgtattgaaacataaacgtatgtgccatgaaaatcatgacaaaaaactaaatagatgtgccatcaaaggtggccttctgacatctgaggaagattctggcttttctacatcaccaaaagacaactcactgccaaaaaagaaaaggcagaaaacggagaaaaaatcatctggaatggacaaagagagtgctttggacaaatctgacctgaaaaaagacaaaaatgattacttgcctctttattcttcaagtactaaagtaaaagatgagtatatggttgcagaatatgctgttgaaatgccacattcgtcagttgggggctcgcatttagaagatgcgtcaggagaaatacacccacctaagttagttctcaaaaaaattaatagtaagagaagtctgaaacagccactggagcaaaatcaaacaatttcacctttatccacatatgaagagagcaaagtttcaaagtatgcttttgaacttgtggataaacaggctttactggactcagaaggcaatgctgacattgatcaggttgataatttgcaggaggggcccagtaaacctgtgcatagtagtactaattatgatgatgccatgcagtttttgaagaagaagcggtatcttcaagcagcaagtaacaacagcagggaatatgcgctgaatgtgggtaccatagcttctcagccttctgtaacacaagcagctgtggcaagtgtcattgatgaaagtaccacggcatccatattagagtcacaggcactgaatgtggagattaagagtaatcatgacaaaaatgttattccagatgaggtactgcagactctgttggatcattattcccacaaagctaatggacagcatgagatatccttcagtgttgcagatactgaagtgacttctagcatatcaataaattcttcagaagtaccagaggtcaccccgtcagagaatgttggatcaagctcccaagcatcctcatcagataaagccaacatgttgcaggaatactccaagtttctgcagcaggctttggacagaactagccaaaatgatgcctatttgaatagcccgagccttaactttgtgactgataaccagaccctcccaaatcagccagcattctcttccatagacaagcaggtctatgccaccatgcccatcaatagctttcgatcaggaatgaattctccactaagaacaactccagataagtcccactttggactaatagttggtgattcacagcactcatttcccttttcaggtgatgagacaaaccatgcttctgccacatcaacacaggactttctggatcaagtgacttctcagaagaaagctgaggcccagcctgtccaccaagcttaccaaatgagctcctttgaacagcccttccgtgctccctatcatggatcaagagctggaatagctactcaatttagcactgccaatggacaggtgaaccttcggggaccagggacaagtgctgaattttcagaatttcccttggtgaatgtaaatgataatagagctgggatgacatcttcacctgatgccacaactggccagacttttggctaaaaaaaaaaaaaaagtgtaaataatactggcactttagaacagattaatcaagagtggggttactctgtgtaaatggagtgctgtacagatttaagagcaatgcgtaataacaagttaagctgatatgaatagcaagataatccaataactgcatttcgtttggttagtcagcattctttgaactgccttacatgttgtcacctttatagaagcaatgcattacttgttttagatcagaaacttgctattccacccacaccaagttaaaaaggaaaaaaaaaagactttcgcacaattgtttcctaactgataacattgtacattcttaggagattagtaattgtgtgaaatttactcatactgtttctaagtttttcagcatagtcattgcacttcagcagggaatctgagtatactttacagacagagtgaacttaaaagtttaatgtcaagagattatggcttaaataaattagtgtgtcctatagggggaaaaaaaccaagaaaccaccttttaaaaagaatgatatgccatatacccttgattttcattttgcattatattgacgtgtttttttgaaggaaaaaaagtaataaaaatctgatagtctaagactccactatttaaaagcctaattactttaaaaatatgcatactttcagaacttttaccaaaacacacaactgttgaagcagtcacttctctatggaagtatgcatattggtgtcagtttctttgtacagttgtacttagatattttttatgatttttcatgtgcaggtatcaaggttttgaagttttagtaaaagaaattctgtagattacattcccaagaacataatgcttacacaaaatgtatattccacgttttaaagcttaattgtattttactttacatatacacttcagttaacatagagcacttagaatctatttggtatttttgatttctcaaagtaaaaaaaaaattagatttttaggtttgatatggttgtgtcataatcatctcgtaattgacaattttaacttttggcaataaaaggaaattgggatatctttggaactgtaaaacctggtttaatctttttctttctagactcttgatagattggataattaaacagtatccagagaaactaaagaaatgggcattttaattgcatattttatcttgagttactttttaatgaacactgctcattacaactttacaaaccaaaagtgtttactaattccagtaactaccatttctttttcagctagatgagtgatcggaaaatttttgttgcatttcaaaatctaaataaactacagactttatccttataccatgaatgtttttttttaatactctgtcttaaaataatacagcatggtacaataaatagtgcttttatgtatatatacacacacacacttttctgaagaatgatggtttgagttatgcgttgggcagttttgatttttggaagttatattagttattgactctttgttacaactttttcatttttacattttaaattttctgccatcgttgtcacaatgcacatcctgatatagcaccagtgaaaatctaaaattaatacccttggaaaatgaaaatattcttaatttccattttgactcttatactggccctatagctctgcagtctttgtttcaatatagaatatgttatccatttaaattattttttcttttatttaatgttatcccaagactgttctcataaagaaagggaagaaataactatccacccttaacatccttcatttattttgaatatattggtgtttttatgataaggaatataaattatatttaatgtggtttcctgtatactttggttattaagttttgcttgaaatagtagttttcccgtttgacagctttctttgctgccaaagttttcaagaatttaagacttctttgaagtaaatatttaagttctgccattattgactcttaagattgtgtgtgttgtgttgtgcattacataattacaaaaaggcttcattcaggtgatacgttaaaaatggaactgtgctcaccctaaataggcattggtatttttctcttttggtgagagtaggcatttatttcttgagttgttttggagcctgatcaaaaattttgttcatggagaacttgatgcaattttgatacagtggagaggtttttttcggttgttttaacatcaccagcatagtttttagaatgtgactcttgctgagcatttagggtgagcttgggaaggaaggcctttgaaaatggtagttatgcaagcagactttcaggtgttgcattcctgttttcaacacatttctttaaatctacataatggcagacttttctaccaggttataagcagtttttagataagtgatactcagccagcataacttattgacttaccatttacgtatagtcatcactctcttactgtgaaattccaaatgcctaccagagttaccttgttctatcataatatgacaaacatctcaacagttttggatttccccactttggttcagaaggttatttaatttctatctgggcattaatggagaaaataagtagccttgtgtgctgcttcagattgaaacatggaggatatgagatattcttctgcaattcatgtttctcatttctcaaagtgagcacattgttctataaaaacatgctggtacacccttaaacttttgatcaatctgagtgaggtgtgcttttcctcttgggacctactcacgtttgaagattggaaacatcacgttaggcgaggcagtatctcttgaacatcttctaaagggttttttaaaaccttattctcacatatttcatttgtcttgaatatttaagtggctcttaaacgttttgggtctacatgcaaatgtggtacttaacaaggtaggaatccatcttcttagctctggctgagggtgccagccatcggtcaggtcatttttatctcaagaggcagaaggcagttatgtcaagaattgtgctcagggcaggatttcgtttccacagaggagagacacttgcagagtgccagctaggttagatcttttgccgcttctttcatttgattaatttgggtttttaaagggctgtttaaaaaaaaaaaaaaaaggccgggaaactttaaaagtaggcattactgtagtactgcatttcttagaacattttaaactagaactcatttttttttcacagtatatttacttgaagaagcactataataatcattgagaagtattttgagtctgaaatttaatttaattttccgtttcaaattgctttatttcagggaaataattttccagttgttttgctatattctgcaaataaaaaccgtgtttccttttttcacttaaactttggtaggaaacaaactaaagcagacaaacatttcttgttatgtttgttgctttctttaatccaatggataaaaaagtaaaaccctgtaaacattattttatttttttatgcaataccatgctgtaaatatggttcatcaaataaggatgtacctatgattgaatctttaattctgcacagttagagtttatatataaacgtgtcttgacaatcaaggacttttatgtgagtcttcctttatgatgtttattaatgttatgcattccatttgttttgaagtgagtaccaatgtgctaatttgtattgtctgaaagtatgtaatgtttttacagcttgtttttaagaatctgtaaatatgtacaaacaaatcacagtactgctttatgttagaaggcatatgatgttgtactgtatgtaagcaataatacatagcagtgctaactttacaagtagcatcaggaaagttctaaaaacatttcagagttattaattatccttatttcatttaataatgattatctttaatcagtttttataagcaaattccattgttcctcctattggaacgtaacactgtttacacagcataattgaagttgcaggggagacaggctaaatctgacttcatctgtactcactttcactaagcattgaatggccttaccactcttctgcaagatggaggaagaccgcaaaacttagtgcccatcacactgaaggaagggatgtggttttttttcctgcttctgtactgctacctaactttgtgatttgctttggattttaatatttgtttctgttttagattcaagcccgtaagttttgaggtgacttcagctccattgtgaaatagatagttctcttcatatttcataactacatttcaataattctaaactttctacattgatttttagatacttatttttcaagcttggtttctcagctgatcagatgaatttattcaacttcaatacaaagaaagacaaacctattatagtttcaagtgagtagatattatactgtacaggacagctatttgaacacacacatcactgctttagaaataaaaccgccaatttataaatgtatatgacctacattttataggaaaaaatgtttttaaatgctagtcatttatataatgtgctttgaaggatttgctagtccacttctgtcactttttagtacactggtatcttttatatgtaatgtatgctttttattattgtagcaaagcatttcagtagaaagaattttgcaacaatatgggggaaatttttcattgttggatttgaattatactggattttatctgtgtagtcttacttgtctttattttaatgctgtctgaagggaacttggtatccaaataaagcaggtaacctcattttacttcaagggcatactgtgtagtgctgaatttaatctgaaaatctgatgattttgaaaagaaaaacaagtttataaacattgtacagaagaaattaaatgtgtgtgatggaaatcctgatggtggagcacgttgaattttctgatatatagtgttattttcctgggatcccctatgccttctttgtatttcaactaataaaggaaaaaccctgtcattaaaactggtaagataataggatattctgattatacagtattactattcctatcccattttctgaccttttctcaatcactgtaaatttttattttctatttcctattgataattaaatatgtacataatatagacactgttgtatagaactaaatgaattgggttgctatgcttgagtgggtagtgaaatggaaatatttgatgaatactgagagttcctaaaatgctagagcaaatttccgagggaaaggggggcatcgtgtgtcttgggaaggttgcagcaggttgtttcttcaactccctaagaaatcattgggaaggactcaactgcaaactcgggatcagatacaaaatgggtctttccttcccctctcccccaaaaaataggagcactaaattttaaaatctactca

SEQ ID NO: 2983 - protein, 794 aa, Homo sapiens; identical to SEQ ID NO: 2979

SEQ ID NO: 2984 - DNA, 7414 bp, Homo sapiens
ggaggaggaggaggagggggaggaagaggagaaaggcgcaggggtgggagctgttgccgaagctgccacagcaaaagttctcccccctccccccttcccctcctctcaaggcccctagaaaggttggagctgccgccgcctgcagtcggtgaccgcgcgactcggcgcccgcccgcggatagagggaggaatcagcagcttggaaattcaagcacgtgatctggcgggatgggcgtttgcctaacgtatttaatggaggaatcggatggcataagtgattaaggtggtattgaggatttctgaagcctatgaaaggtgaaaaaccatttcaatgtagtcaatgtgacatgcgtttcatacagaagtacctgcttcagagacatgagaagattcatactggtgaaaaaccatttcgctgtgatgaatgtggtgatgagacaaaccatgcttctgccacatcaacacaggactttctggatcaagtgacttctcagaagaaagctgaggcccagcctgtccaccaagcttaccaaatgagctcctttgaacagcccttccgtgctccctatcatggatcaagagctggaatagctactcaatttagcactgccaatggacaggtgaaccttcggggaccagggacaagtgctgaattttcagaatttcccttggtgaatgtaaatgataatagagctgggatgacatcttcacctgatgccacaactggccagacttttggctaaaaaaaaaaaaaaagtgtaaataatactggcactttagaacagattaatcaagagtggggttactctgtgtaaatggagtgctgtacagatttaagagcaatgcgtaataacaagttaagctgatatgaatagcaagataatccaataactgcatttcgtttggttagtcagcattctttgaactgccttacatgttgtcacctttatagaagcaatgcattacttgttttagatcagaaacttgctattccacccacaccaagttaaaaaggaaaaaaaaaagactttcgcacaattgtttcctaactgataacattgtacattcttaggagattagtaattgtgtgaaatttactcatactgtttctaagtttttcagcatagtcattgcacttcagcagggaatctgagtatactttacagacagagtgaacttaaaagtttaatgtcaagagattatggcttaaataaattagtgtgtcctatagggggaaaaaaaccaagaaaccaccttttaaaaagaatgatatgccatatacccttgattttcattttgcattatattgacgtgtttttttgaaggaaaaaaagtaataaaaatctgatagtctaagactccactatttaaaagcctaattactttaaaaatatgcatactttcagaacttttaccaaaacacacaactgttgaagcagtcacttctctatggaagtatgcatattggtgtcagtttctttgtacagttgtacttagatattttttatgatttttcatgtgcaggtatcaaggttttgaagttttagtaaaagaaattctgtagattacattcccaagaacataatgcttacacaaaatgtatattccacgttttaaagcttaattgtattttactttacatatacacttcagttaacatagagcacttagaatctatttggtatttttgatttctcaaagtaaaaaaaaaattagatttttaggtttgatatggttgtgtcataatcatctcgtaattgacaattttaacttttggcaataaaaggaaattgggatatctttggaactgtaaaacctggtttaatctttttctttctagactcttgatagattggataattaaacagtatccagagaaactaaagaaatgggcattttaattgcatattttatcttgagttactttttaatgaacactgctcattacaactttacaaaccaaaagtgtttactaattccagtaactaccatttctttttcagctagatgagtgatcggaaaatttttgttgcatttcaaaatctaaataaactacagactttatccttataccatgaatgtttttttttaatactctgtcttaaaataatacagcatggtacaataaatagtgcttttatgtatatatacacacacacacttttctgaagaatgatggtttgagttatgcgttgggcagttttgatttttggaagttatattagttattgactctttgttacaactttttcatttttacattttaaattttctgccatcgttgtcacaatgcacatcctgatatagcaccagtgaaaatctaaaattaatacccttggaaaatgaaaatattcttaatttccattttgactcttatactggccctatagctctgcagtctttgtttcaatatagaatatgttatccatttaaattattttttcttttatttaatgttatcccaagactgttctcataaagaaagggaagaaataactatccacccttaacatccttcatttattttgaatatattggtgtttttatgataaggaatataaattatatttaatgtggtttcctgtatactttggttattaagttttgcttgaaatagtagttttcccgtttgacagctttctttgctgccaaagttttcaagaatttaagacttctttgaagtaaatatttaagttctgccattattgactcttaagattgtgtgtgttgtgttgtgcattacataattacaaaaaggcttcattcaggtgatacgttaaaaatggaactgtgctcaccctaaataggcattggtatttttctcttttggtgagagtaggcatttatttcttgagttgttttggagcctgatcaaaaattttgttcatggagaacttgatgcaattttgatacagtggagaggtttttttcggttgttttaacatcaccagcatagtttttagaatgtgactcttgctgagcatttagggtgagcttgggaaggaaggcctttgaaaatggtagttatgcaagcagactttcaggtgttgcattcctgttttcaacacatttctttaaatctacataatggcagacttttctaccaggttataagcagtttttagataagtgatactcagccagcataacttattgacttaccatttacgtatagtcatcactctcttactgtgaaattccaaatgcctaccagagttaccttgttctatcataatatgacaaacatctcaacagttttggatttccccactttggttcagaaggttatttaatttctatctgggcattaatggagaaaataagtagccttgtgtgctgcttcagattgaaacatggaggatatgagatattcttctgcaattcatgtttctcatttctcaaagtgagcacattgttctataaaaacatgctggtacacccttaaacttttgatcaatctgagtgaggtgtgcttttcctcttgggacctactcacgtttgaagattggaaacatcacgttaggcgaggcagtatctcttgaacatcttctaaagggttttttaaaaccttattctcacatatttcatttgtcttgaatatttaagtggctcttaaacgttttgggtctacatgcaaatgtggtacttaacaaggtaggaatccatcttcttagctctggctgagggtgccagccatcggtcaggtcatttttatctcaagaggcagaaggcagttatgtcaagaattgtgctcagggcaggatttcgtttccacagaggagagacacttgcagagtgccagctaggttagatcttttgccgcttctttcatttgattaatttgggtttttaaagggctgtttaaaaaaaaaaaaaaaaggccgggaaactttaaaagtaggcattactgtagtactgcatttcttagaacattttaaactagaactcatttttttttcacagtatatttacttgaagaagcactataataatcattgagaagtattttgagtctgaaatttaatttaattttccgtttcaaattgctttatttcagggaaataattttccagttgttttgctatattctgcaaataaaaaccgtgtttccttttttcacttaaactttggtaggaaacaaactaaagcagacaaacatttcttgttatgtttgttgctttctttaatccaatggataaaaaagtaaaaccctgtaaacattattttatttttttatgcaataccatgctgtaaatatggttcatcaaataaggatgtacctatgattgaatctttaattctgcacagttagagtttatatataaacgtgtcttgacaatcaaggacttttatgtgagtcttcctttatgatgtttattaatgttatgcattccatttgttttgaagtgagtaccaatgtgctaatttgtattgtctgaaagtatgtaatgtttttacagcttgtttttaagaatctgtaaatatgtacaaacaaatcacagtactgctttatgttagaaggcatatgatgttgtactgtatgtaagcaataatacatagcagtgctaactttacaagtagcatcaggaaagttctaaaaacatttcagagttattaattatccttatttcatttaataatgattatctttaatcagtttttataagcaaattccattgttcctcctattggaacgtaacactgtttacacagcataattgaagttgcaggggagacaggctaaatctgacttcatctgtactcactttcactaagcattgaatggccttaccactcttctgcaagatggaggaagaccgcaaaacttagtgcccatcacactgaaggaagggatgtggttttttttcctgcttctgtactgctacctaactttgtgatttgctttggattttaatatttgtttctgttttagattcaagcccgtaagttttgaggtgacttcagctccattgtgaaatagatagttctcttcatatttcataactacatttcaataattctaaactttctacattgatttttagatacttatttttcaagcttggtttctcagctgatcagatgaatttattcaacttcaatacaaagaaagacaaacctattatagtttcaagtgagtagatattatactgtacaggacagctatttgaacacacacatcactgctttagaaataaaaccgccaatttataaatgtatatgacctacattttataggaaaaaatgtttttaaatgctagtcatttatataatgtgctttgaaggatttgctagtccacttctgtcactttttagtacactggtatcttttatatgtaatgtatgctttttattattgtagcaaagcatttcagtagaaagaattttgcaacaatatgggggaaatttttcattgttggatttgaattatactggattttatctgtgtagtcttacttgtctttattttaatgctgtctgaagggaacttggtatccaaataaagcaggtaacctcattttacttcaagggcatactgtgtagtgctgaatttaatctgaaaatctgatgattttgaaaagaaaaacaagtttataaacattgtacagaagaaattaaatgtgtgtgatggaaatcctgatggtggagcacgttgaattttctgatatatagtgttattttcctgggatcccctatgccttctttgtatttcaactaataaaggaaaaaccctgtcattaaaactggtaagataataggatattctgattatacagtattactattcctatcccattttctgaccttttctcaatcactgtaaatttttattttctatttcctattgataattaaatatgtacataatatagacactgttgtatagaactaaatgaattgggttgctatgcttgagtgggtagtgaaatggaaatatttgatgaatactgagagttcctaaaatgctagagcaaatttccgagggaaaggggggcatcgtgtgtcttgggaaggttgcagcaggttgtttcttcaactccctaagaaatcattgggaaggactcaactgcaaactcgggatcagatacaaaatgggtctttccttcccctctcccccaaaaaataggagcactaaattttaaaatctactcaggtgacagttgctttgcaatgaaacttatcacattgaaattttcagtgttaaataaaaagagatttgtgatatttttaaatataaacttttacatcagtagtcagcagcctgacaattgaaatttggtaagtcgatatattttaaaatattttgctctccaaatagaattgtttttaaacaattgggaggttttttgtttctttaaatatgttttaattgtcattgtaaaaacaaaatcttgcttgaccctatattatgccatgaatgaattgctgagcctttataatacagtgacagcttgtttcatgcatagtcatggaacatagagatgttctttaaactgacctattgataagaggtttaatgagtttcacggctttcaacactattgtcatatagttatctttgccatttggagtttataaaaccattttatgtattgtgatactaaaggaagttgttttgctttactttaaattgaattattagactaatatttgcaaattctgcattttaaatgtggacactggctgtttgaaaaataaaatatagaatacagttttatggataattttcgagctgaatttttcacaatattctgaaccaaataacgaatggtaaatatgcaaaaatcatggtgcatagatataaccgtaaagagaaaagaatttctgtgtggaattaacagttacacaaattgggtaacaattatcagggcctttattatagctttatgtggaatgttattctaaaatgcaagagtcaaatgttactgtcattgaatattttagacttgaaacgtgtttatcatagagcgaagaaaatatgtgttcttttctttacagataagactctgttaacccactgtcagcatacgtgggatttcttttcttttttctttcattagtggagatttgttttcatccatctaccaccttgccagtaccctagcttgtgaccagcgggatgcattgtaagaaagttgtctgtggttaggagtgcagtctgggtccatggaacaaatttaaactaattggccctcgcaatgatcagtcctaggaccctggccttattattagcatggtgctttaaccaattgtacataataataccactgatagtctactaatgcatttcctagatcccagtttttcttgaatgattaggaatggtggggagaggggaggggagatattctacatgatacttctccaatcttctaaagattataagaaaaaataaaaaattgaagtcacttga

SEQ ID NO: 2985 - protein, 144 aa, Homo sapiens
MKGEKPFQCSQCDMRFIQKYLLQRHEKIHTGEKPFRCDECGDETNHASATSTQDFLDQVTSQKKAEAQPVHQAYQMSSFEQPFRAPYHGSRAGIATQFSTANGQVNLRGPGTSAEFSEFPLVNVNDNRAGMTSSPDATTGQTFG

SEQ ID NO: 2986 - DNA, 8192 bp, Homo sapiens
ctactgctctgggaggaggaagagaaggaggaagaggaggaggaggaggagggggaggaagaggagaaaggcgcaggggtgggagctgttgccgaagctgccacagcaaaagttctcccccctccccccttcccctcctctcaaggcccctagaaaggttggagctgccgccgcctgcagtcggtgaccgcgcgactcggcgcccgcccgcggatagagggaggaatcagcagcttggaaattcaagcacgtgatctggcgggatgggcgtttgcctaacgtatttaatggaggaatcggatggcataagtgattaaggtggtattgaggatttctgaagcctatgaaaggtagaaactcaaccatgatttctttttcaactctacagcattcctttccttgaagtcttcgtttttaccttagtctcggggtcttattctgtcacctaggtggagtgcagtagtacagtcacagctcactgcagccccaacatcctgggctcaagccatcctcctgcctcagcctcccaagtagctgggaccacaggcagttatacttaagcatgaacattgacgacaaactggaaggattgtttcttaaatgtggcggcatagacgaaatgcagtcttccaggacaatggttgtaatgggtggagtgtctggccagtctactgtgtctggagagctacaggattcagtacttcaagatcgaagtatgcctcaccaggagatccttgctgcagatgaagtgttacaagaaagtgaaatgagacaacaggatatgatatcacatgatgaactcatggtccatgaggagacagtgaaaaatgatgaagagcagatggaaacacatgaaagacttcctcaaggactacagtatgcacttaatgtccctataagcgtaaagcaggaaattacttttactgatgtatctgagcaactgatgagagacaaaaaacaaatcagagagccagtagacttacagaaaaagaagaagcggaaacaacgttctcccgcaaaaatccttacaataaatgaggatggatcacttggtttgaaaacccctaaatctcacgtttgtgagcactgcaatgctgcctttagaacgaactatcacttacagagacatgtcttcattcatacaggtgaaaaaccatttcaatgtagtcaatgtgacatgcgtttcatacagaagtacctgcttcagagacatgagaagattcatactggtgaaaaaccatttcgctgtgatgaatgtggtatgagattcatacaaaaatatcatatggaaaggcataagagaactcatagtggagaaaaaccttaccagtgtgaatactgtttacagtatttttccagaacagatcgtgtattgaaacataaacgtatgtgccatgaaaatcatgacaaaaaactaaatagatgtgccatcaaaggtggccttctgacatctgaggaagattctggcttttctacatcaccaaaagacaactcactgccaaaaaagaaaaggcagaaaacggagaaaaaatcatctggaatggacaaagagagtgctttggacaaatctgacctgaaaaaagacaaaaatgattacttgcctctttattcttcaagtactaaagtaaaagatgagtatatggttgcagaatatgctgttgaaatgccacattcgtcagttgggggctcgcatttagaagatgcgtcaggagaaatacacccacctaagttagttctcaaaaaaattaatagtaagagaagtctgaaacagccactggagcaaaatcaaacaatttcacctttatccacatatgaagagagcaaagtttcaaagtatgcttttgaacttgtggataaacaggctttactggactcagaaggcaatgctgacattgatcaggttgataatttgcaggaggggcccagtaaacctgtgcatagtagtactaattatgatgatgccatgcagtttttgaagaagaagcggtatcttcaagcagcaagtaacaacagcagggaatatgcgctgaatgtgggtaccatagcttctcagccttctgtaacacaagcagctgtggcaagtgtcattgatgaaagtaccacggcatccatattagagtcacaggcactgaatgtggagattaagagtaatcatgacaaaaatgttattccagatgaggtactgcagactctgttggatcattattcccacaaagctaatggacagcatgagatatccttcagtgttgcagatactgaagtgacttctagcatatcaataaattcttcagaagtaccagaggtcaccccgtcagagaatgttggatcaagctcccaagcatcctcatcagataaagccaacatgttgcaggaatactccaagtttctgcagcaggctttggacagaactagccaaaatgatgcctatttgaatagcccgagccttaactttgtgactgataaccagaccctcccaaatcagccagcattctcttccatagacaagcaggtctatgccaccatgcccatcaatagctttcgatcaggaatgaattctccactaagaacaactccagataagtcccactttggactaatagttggtgattcacagcactcatttcccttttcaggtgatgagacaaaccatgcttctgccacatcaacacaggactttctggatcaagtgacttctcagaagaaagctgaggcccagcctgtccaccaagcttaccaaatgagctcctttgaacagcccttccgtgctccctatcatggatcaagagctggaatagctactcaatttagcactgccaatggacaggtgaaccttcggggaccagggacaagtgctgaattttcagaatttcccttggtgaatgtaaatgataatagagctgggatgacatcttcacctgatgccacaactggccagacttttggctaaaaaaaaaaaaaaagtgtaaataatactggcactttagaacagattaatcaagagtggggttactctgtgtaaatggagtgctgtacagatttaagagcaatgcgtaataacaagttaagctgatatgaatagcaagataatccaataactgcatttcgtttggttagtcagcattctttgaactgccttacatgttgtcacctttatagaagcaatgcattacttgttttagatcagaaacttgctattccacccacaccaagttaaaaaggaaaaaaaaaagactttcgcacaattgtttcctaactgataacattgtacattcttaggagattagtaattgtgtgaaatttactcatactgtttctaagtttttcagcatagtcattgcacttcagcagggaatctgagtatactttacagacagagtgaacttaaaagtttaatgtcaagagattatggcttaaataaattagtgtgtcctatagggggaaaaaaaccaagaaaccaccttttaaaaagaatgatatgccatatacccttgattttcattttgcattatattgacgtgtttttttgaaggaaaaaaagtaataaaaatctgatagtctaagactccactatttaaaagcctaattactttaaaaatatgcatactttcagaacttttaccaaaacacacaactgttgaagcagtcacttctctatggaagtatgcatattggtgtcagtttctttgtacagttgtacttagatattttttatgatttttcatgtgcaggtatcaaggttttgaagttttagtaaaagaaattctgtagattacattcccaagaacataatgcttacacaaaatgtatattccacgttttaaagcttaattgtattttactttacatatacacttcagttaacatagagcacttagaatctatttggtatttttgatttctcaaagtaaaaaaaaaattagatttttaggtttgatatggttgtgtcataatcatctcgtaattgacaattttaacttttggcaataaaaggaaattgggatatctttggaactgtaaaacctggtttaatctttttctttctagactcttgatagattggataattaaacagtatccagagaaactaaagaaatgggcattttaattgcatattttatcttgagttactttttaatgaacactgctcattacaactttacaaaccaaaagtgtttactaattccagtaactaccatttctttttcagctagatgagtgatcggaaaatttttgttgcatttcaaaatctaaataaactacagactttatccttataccatgaatgtttttttttaatactctgtcttaaaataatacagcatggtacaataaatagtgcttttatgtatatatacacacacacacttttctgaagaatgatggtttgagttatgcgttgggcagttttgatttttggaagttatattagttattgactctttgttacaactttttcatttttacattttaaattttctgccatcgttgtcacaatgcacatcctgatatagcaccagtgaaaatctaaaattaatacccttggaaaatgaaaatattcttaatttccattttgactcttatactggccctatagctctgcagtctttgtttcaatatagaatatgttatccatttaaattattttttcttttatttaatgttatcccaagactgttctcataaagaaagggaagaaataactatccacccttaacatccttcatttattttgaatatattggtgtttttatgataaggaatataaattatatttaatgtggtttcctgtatactttggttattaagttttgcttgaaatagtagttttcccgtttgacagctttctttgctgccaaagttttcaagaatttaagacttctttgaagtaaatatttaagttctgccattattgactcttaagattgtgtgtgttgtgttgtgcattacataattacaaaaaggcttcattcaggtgatacgttaaaaatggaactgtgctcaccctaaataggcattggtatttttctcttttggtgagagtaggcatttatttcttgagttgttttggagcctgatcaaaaattttgttcatggagaacttgatgcaattttgatacagtggagaggtttttttcggttgttttaacatcaccagcatagtttttagaatgtgactcttgctgagcatttagggtgagcttgggaaggaaggcctttgaaaatggtagttatgcaagcagactttcaggtgttgcattcctgttttcaacacatttctttaaatctacataatggcagacttttctaccaggttataagcagtttttagataagtgatactcagccagcataacttattgacttaccatttacgtatagtcatcactctcttactgtgaaattccaaatgcctaccagagttaccttgttctatcataatatgacaaacatctcaacagttttggatttccccactttggttcagaaggttatttaatttctatctgggcattaatggagaaaataagtagccttgtgtgctgcttcagattgaaacatggaggatatgagatattcttctgcaattcatgtttctcatttctcaaagtgagcacattgttctataaaaacatgctggtacacccttaaacttttgatcaatctgagtgaggtgtgcttttcctcttgggacctactcacgtttgaagattggaaacatcacgttaggcgaggcagtatctcttgaacatcttctaaagggttttttaaaaccttattctcacatatttcatttgtcttgaatatttaagtggctcttaaacgttttgggtctacatgcaaatgtggtacttaacaaggtaggaatccatcttcttagctctggctgagggtgccagccatcggtcaggtcatttttatctcaagaggcagaaggcagttatgtcaagaattgtgctcagggcaggatttcgtttccacagaggagagacacttgcagagtgccagctaggttagatcttttgccgcttctttcatttgattaatttgggtttttaaagggctgtttaaaaaaaaaaaaaaaaggccgggaaactttaaaagtaggcattactgtagtactgcatttcttagaacattttaaactagaactcatttttttttcacagtatatttacttgaagaagcactataataatcattgagaagtattttgagtctgaaatttaatttaattttccgtttcaaattgctttatttcagggaaataattttccagttgttttgctatattctgcaaataaaaaccgtgtttccttttttcacttaaactttggtaggaaacaaactaaagcagacaaacatttcttgttatgtttgttgctttctttaatccaatggataaaaaagtaaaaccctgtaaacattattttatttttttatgcaataccatgctgtaaatatggttcatcaaataaggatgtacctatgattgaatctttaattctgcacagttagagtttatatataaacgtgtcttgacaatcaaggacttttatgtgagtcttcctttatgatgtttattaatgttatgcattccatttgttttgaagtgagtaccaatgtgctaatttgtattgtctgaaagtatgtaatgtttttacagcttgtttttaagaatctgtaaatatgtacaaacaaatcacagtactgctttatgttagaaggcatatgatgttgtactgtatgtaagcaataatacatagcagtgctaactttacaagtagcatcaggaaagttctaaaaacatttcagagttattaattatccttatttcatttaataatgattatctttaatcagtttttataagcaaattccattgttcctcctattggaacgtaacactgtttacacagcataattgaagttgcaggggagacaggctaaatctgacttcatctgtactcactttcactaagcattgaatggccttaccactcttctgcaagatggaggaagaccgcaaaacttagtgcccatcacactgaaggaagggatgtggttttttttcctgcttctgtactgctacctaactttgtgatttgctttggattttaatatttgtttctgttttagattcaagcccgtaagttttgaggtgacttcagctccattgtgaaatagatagttctcttcatatttcataactacatttcaataattctaaactttctacattgatttttagatacttatttttcaagcttggtttctcagctgatcagatgaatttattcaacttcaatacaaagaaagacaaacctattatagtttcaagtgagtagatattatactgtacaggacagctatttgaacacacacatcactgctttagaaataaaaccgccaatttataaatgtatatgacctacattttataggaaaaaatgtttttaaatgctagtcatttatataatgtgctttgaaggatttgctagtccacttctgtcactttttagtacactggtatcttttatatgtaatgtatgctttttattattgtagcaaagcatttcagtagaaagaattttgcaacaatatgggggaaatttttcattgttggatttgaattatactggattttatctgtgtagtcttacttgtctttattttaatgctgtctgaagggaacttggtatccaaataaagcaggtaacctcattttacttcaagggcatactgtgtagtgctgaatttaatctgaaaatctgatgattttgaaaagaaaaacaagtttataaacattgtacagaagaaattaaatgtgtgtgatggaaatcctgatggtggagcacgttgaattttctgatatatagtgttattttcctgggatcccctatgccttctttgtatttcaactaataaaggaaaaaccctgtcattaaaactggtaagataataggatattctgattatacagtattactattcctatcccattttctgaccttttctcaatcactgtaaatttttattttctatttcctattgataattaaatatgtacataatatagacactgttgtatagaactaaatgaattgggttgctatgcttgagtgggtagtgaaatggaaatatttgatgaatactgagagttcctaaaatgctagagcaaatttccgagggaa

SEQ ID NO: 2987 - protein, 794 aa, Homo sapiens; identical to SEQ ID NO: 2979

SEQ ID NO: 2988 - DNA, 1573 bp, Homo sapiens
gagggggaggaagaggagaaaggcgcaggggtgggagctgttgccgaagctgccacagcaaaagttctcccccctccccccttcccctcctctcaaggcccctagaaaggttggagctgccgccgcctgcagtcggtgaccgcgcgactcggcgcccgcccgcggatagagggaggaatcagcagcttggaaattcaagcacgtgatctggcgggatgggcgtttgcctaacgtatttaatggaggaatcggatggcataagtgattaaggtggtattgaggatttctgaagcctatgaaaggtagaaactcaaccatgatttctttttcaactctacagcattcctttccttgaagtcttcgtttttaccttagtctcgggcagttatacttaagcatgaacattgacgacaaactggaaggattgtttcttaaatgtggcggcatagacgaaatgcagtcttccaggacaatggttgtaatgggtggagtgtctggccagtctactgtgtctggagagctacaggattcagtacttcaagatcgaagtatgcctcaccaggagatccttgctgcagatgaagtgttacaagaaagtgaaatgagacaacaggatatgatatcacatgatgaactcatggtccatgaggagacagtgaaaaatgatgaagagcagatggaaacacatgaaagacttcctcaaggactacagtatgcacttaatgtccctataagcgtaaagcaggaaattacttttactgatgtatctgagcaactgatgagagacaaaaaacaaatcagagagccagtagacttacagaaaaagaagaagcggaaacaacgttctcccgcaaaaatccttacaataaatgaggatggatcacttggtttgaaaacccctaaatctcacgtttgtgagcactgcaatgctgcctttagaacgaactatcacttacagagacatgtcttcattcatacaggtgaaaaaccatttcaatgtagtcaatgtgacatgcgtttcatacagaagtacctgcttcagagacatgagaagattcatactggtgaaaaaccatttcgctgtgatgaatgtggtatgagattcatacaaaaatatcatatggaaaggcataagagaactcatagtggagaaaaaccttaccagtgtgaatactgtttacagtatttttccagaacagatcgtgtattgaaacataaacgtatgtgccatgaaaatcatgacaaaaaactaaatagatgtgccatcaaaggtggccttctgacatctgaggaagattctggcttttctacatcaccaaaagacaactcactgccaaaaaagaaaaggcagaaaacggagaaaaaatcatctggaatggacaaagagagtgctttggacaaatctgacctgaaaaaagacaaaaatgattacttgcctctttattcttcaagtactaaagtaaaagatgagtatatggttgcagaatatgctgttgaaatgccacattcgtcagttgggggctcgcatttagaagatgcgtcaggagaaatacacccacctaagttagttctc

SEQ ID NO: 2989 - protein, 391 aa, Homo sapiens
MNIDDKLEGLFLKCGGIDEMQSSRTMVVMGGVSGQSTVSGELQDSVLQDRSMPHQEILAADEVLQESEMRQQDMISHDELMVHEETVKNDEEQMETHERLPQGLQYALNVPISVKQEITFTDVSEQLMRDKKQIREPVDLQKKKKRKQRSPAKILTINEDGSLGLKTPKSHVCEHCNAAFRTNYHLQRHVFIHTGEKPFQCSQCDMRFIQKYLLQRHEKIHTGEKPFRCDECGMRFIQKYHMERHKRTHSGEKPYQCEYCLQYFSRTDRVLKHKRMCHENHDKKLNRCAIKGGLLTSEEDSGFSTSPKDNSLPKKKRQKTEKKSSGMDKESALDKSDLKKDKNDYLPLYSSSTKVKDEYMVAEYAVEMPHSSVGGSHLEDASGEIHPPKLV

SEQ ID NO: 2990 - DNA, 519 bp, Homo sapiens
catcttccagtaattcgccaaaatgacaaacacaaagggaaagaggagagccacccgatatatgttctctaggccttttagaaaacatggagctgttcctttggcgacgtatatgcgaatctataagaaaggtgatattgtagacatcaagggaatgggtactgttcaaaaaggaatgccccacaagtgttaccatggcaaaactggaagagtctacaatgttacccagcatgctgttggcattgttgtaaacaaacaagttaagggcaagattcttgccaagagaattaatgtgcgtattgagcacatttagcactctaagagccgagatagcttcctgaaatgcatgaaggaaaatgatcagaaaaagaaagaagccaaagagaaaggtacctgggttcaactaaagttccagcctgctccacccagagaagcacactttgtgagaaccaatgggaaggagcctgagctgctggaacttattccctatgaattcatggcataataggtgttaaaaaa

SEQ ID NO: 2991 - protein, 96 aa, Homo sapiens
MTNTKGKRRATRYMFSRPFRKHGAVPLATYMRIYKKGDIVDIKGMGTVQKGMPHKCYHGKTGRVYNVTQHAVGIVVNKQVKGKILAKRINVRIEHI

SEQ ID NO: 2992 - DNA, 799 bp, Homo sapiens
tgaagagaggataatttctccttgtctgcacagaacgcagcacaccttcagcccttcaaagacgggcagctttggctgcacccctgggcagttccctgggtatgcacattgatgcaattataatgtcctcgctatgagatttcccaccacccacgctggtgttcacatctagcggcatcacagagaggtagaactaaagggaagaagttgatggatgccatctggtattgcagatgatgacaggaagtgtggagtgaaggatgccgtgacacgctttggtccctaacagtgtaagcggcatgaggcaagttatcttctgtgtcactgacttcaccacatgaaaaccaggtcactgtctcattgccctcccatggataacttaaggaagaagccctcaaaaggattctaaagttattgcaaatacaaggtgttttcttaattctccctgatagtcataccaggttttctcagctatgaagaggaaaactaacagattcctgagtcagcaacacaacctgcttgagaatgaggacaacacagaacagagcataactgagacatgggaaaaatagctttcagatctataaaaaagaagaggaaacatacatggtttaaggtaggagaaacaagctaaagaggaaaaacaaaaatgaccataggaagccaggccagagtaagaagagtctgttgtttttaacagagtttctctatattccagaaatgtgtatagtacccatatatcccttgcaagattgttttggagaaattgttccaactaaataaataaaaaatcagtcag

SEQ ID NO: 2993 - protein, 32 aa, Homo sapiens
MKRKTNRFLSQQHNLLENEDNTEQSITETWEK

SEQ ID NO: 2994 - DNA, 624 bp, Homo sapiens
caaagacgggcagctttggctgcacccctgggcagttccctgggtatgcacattgatgcaattataatgtcctcgctatgagatttcccaccacccacgctggtgttcacatctagcggcatcacagagaggtagaactaaagggaagaagttgatggatgccatctggtattgcagatgatgacaggttttctcagctatgaagaggaaaactaacagattcctgagtcagcaacacaacctgcttgagaatgaggacaacacagaacagagcataactgagacatgggaaaaatagctttcaggtaacagatttttgagcaccttgatacatctgagcctgaatacaattttgccacggagatgttgagttatatcaaccaataaattctcttttgggttttatggcagttttcagaatgttttctgattcttgcaaccaaaagagttcttattaactcactaataaaatgaacacgtaggattgtgtcaaaaaacaaaatctgtaactatggaaagagaacaccctaagttacaaagtgagtattactccagtgatttaccactgaaaaaggaaagcacttcctcagtgtggcactttcctgagagggaatgaggggtgga

SEQ ID NO: 2995 - protein, 34 aa, Homo sapiens
MEREHPKLQSEYYSSDLPLKKESTSSVWHFPERE

SEQ ID NO: 2996 - DNA, 569 bp, Homo sapiens
tagcagaggtgtgtgaaaagcagagcaacgcagcacccaaaatgatcttgaaactactcagatagagtaattcctcgactcaaaaatatacagcatatttccgtgtcatttagaacaaaagccacaattcttagaatagtctacaaggtttaacataagggtgatgtcttagacttttcaacaggtcacaaggctgggaacatgggaactggatttgagggcaggctaaagtgggagaaagctatagtaacacgcatagtctttgggttgagacacaaaaggtctacccctaggaataagcagtaaaaagtaagaaatcggctgatcctgggaagaactgaagaccacttaaaattaaatctacatgactctacatctgggatgctggatttcctcacagccttagagagaagttgagaaccaaacaagtgagcttcattctctacttctgggagttggataatacgtactgcaggaacatagaattaacaagcaaaaatccagaaggcagcaaaaaccaagcagtgtggccgaatcattagaccggcgagaggtgagaagaaacatac

SEQ ID NO: 2997 - protein, 34 aa, Homo sapiens
MGTGFEGRLKWEKAIVTRIVFGLRHKRSTPRNKQ

SEQ ID NO: 2998 - DNA, 439 bp, Homo sapiens
ggctacctcttaaattcaaaacacctattccccctcagggatcattttgattcaaatacaataaaatttcagatataaaaccaacttccagttaacacacaaatacctactatatgccagactatatgctaaaactgaaaaggtggaataagacccagtccttgccctcaaggagcccacggccttattgaggagaatgaaaggtcaatgggaaagctgtctgagacaatatgaaaatcaatgatgccactctagcattagctgaagatccccttgatttcatccagcagccaagacactaagtgacccaaaggaagaaaagggtgatcagcgtggctgtgtggtcagtaagtaaatgtgcaacagctggagtaaattagaactaatttagtgcataacttcagcaggaataaattttgttaatcttcaaaaagtcaaa

SEQ ID NO: 2999 - DNA, 552 bp, Homo sapiens
gatataaaaccaacttccagttaacacacaaatacctactatatgccagactatatgctaaaactgaaaaggtggaataagacccagtccttgccctcaaggagcccacggccttattgaggagaatgaaaggtcaatgggaaagctgtctgagacaatatgaaaatcaatgatgccactctagcattagctgaagatccccttgatttcatccagcagccaagacactaagtgacccaaaggaagaaaagggtgatcagcgtggctgtgtgcctactcagcgcgaagacaacaaggatgaaaacctttatgatgatccacttccacttaatgaatactgcccagaatacgaatgcaacgactgaaactcaagtagcaattttggacaaggaagtaagattaaaactgggagctatggaccaatggtggagcaacaaaagagctatccctcttgacagcataaagcctccctaacagccttgtgctccctacttcttaattactttcaatgtgacagaaggaaaaaacttaaataaaacatatttcttattt

SEQ ID NO: 3000 - protein, 58 aa, Homo sapiens
MKTFMMIHFHLMNTAQNTNATTETQVAILDKEVRLKLGAMDQWWSNKRAIPLDSIKPP

SEQ ID NO: 3001 - DNA, 274 bp, Homo sapiens
aagctgtctgagacaatatgaaaatcaatgatgccactctagcattagctgaagatccccttgatttcatccagcagccaagacactaagtgacccaaaggaagaaaagggtgatcagcgtggctgtgtgcctactcagcgcgaagacaacaaggatgaaaacctttatgatgatccacttccacttaatgaatagtaaatatattttatctttctttataattttttaaataacgttttctctagcttattgtaacaatacagtgtataatgc

SEQ ID NO: 3002 - protein, 43 aa, Homo sapiens
FHPAAKTLSDPKEEKGDQRGCVPTQREDNKDENLYDDPLPLNE

SEQ ID NO: 3003 - DNA, 708 bp, Homo sapiens
tctctattatgggtcaggcactgttccaggcaccaaggatatgttgatgaagaagacattatagtcactgtgagatggacttaaaaagataaggaagttggttctactcctgttctcttctttggcgacacttaatacccaaagaaaatttctactatccatcaactaggataaggagacattttagtaatgatttgtgaattatgttactgtacatcaggaatggttttcaaaatatgtaacacctggtatgatgtagatgccaactcatcggaacagactctggttataaaagcagatcggttcgttcctaccagtgcaagccagcttaatatctcttgtggtacagttcaaagacatctcccagacaggcaataacaaatgcttgagaggatgtggagaaaagggacccctccacattgggaccactgctgttgagaatgtaattaattacaaccactatggagtacagtttggaggttcctcaaaaaaactaaaaatggagctgccatatgatacagcaattccagtgcttgatatatacccagaagaaaaagaaatcagtgtgccgaagcaatatctgcactcctgtgtttgttgcagcactgttcacaataggtaagatttggagacagcctaaatgtccatccacagatgtatggatatatttttgttttattcttaatatattaaaatagatcaggaaac

SEQ ID NO: 3004 - protein, 62 aa, Homo sapiens [sequence omitted]

SEQ ID NO: 3005 - DNA, 3054 bp, Homo sapiens
aagtgctgactgggaccgacagtgagggaggggagcccagagggaagttgataacccaaatgtcatctggtatctccagttgttcattccttgatattgctgatgataatgttacaaactgtaccagggaaagcaaacatagtcactgcccctggtaagaaggcaggggaataactatcttagaaaatttgatgaaaatcaagtttgtaaaatattaatacctgaaaagtcatatacttacatctccaacattcatttaaaactgagttgtgggatatgtaagttgcatttgtgtgcatgtgtatgtatgtatgtatgtatgcagaaacattttgatttgtggatgttttatgccttaaaatatttactggcttgaaaatatattttaactggcttaaaattttagaggtgagctccctgtgaatatccgtgttaaattgaccattttgaaatttaagacaatatatatatcgtttcagatattgttccactattttgatcagaaaagtatgctagagaaccatattttacataaaagaatatatatattaacatttttcagtcagcagatatttattttatgtcatgcccatttcattttctttttcactgttagggacttttgccgtcaggatgaaaagtgtgattattactttagtgtggatgcagatgttgttttgacaaatccaaggactttaaaaattttgattgaacaaaacagaaagatcattgctcctcttgtaactcgtcatggaaagctgtggtccaatttctggggagcattgagtcctgatggatactatgcacgatctgaagattatgtggatattgttcaagggaatagagtaggagtatggaatgtcccatatatggctaatgtgtacttaattaaaggaaagacactccgatcagagatgaatgaaaggaactattttgttcgtgataaactggatcctgatatggctctttgccgaaatgctagagaaatgactttacaaagggaaaaagactcccctactccggaaacattccaaatgctcagccccccaaagggtgtatttatgtacatttctaatagacatgaatttggaaggctattatccactgctaattacaatacttcccattataacaatgacctctggcagatttttgaaaatcctgtggactggaaggaaaagtatataaaccgtgattattcaaagattttcactgaaaatatagttgaacagccctgtccagatgtcttttggttccccatattttctgaaaaagcctgtgatgaattggtagaagaaatggaacattacggcaaatggtctgggggaaaacatcatgatagccgtatatctggtggttatgaaaatgtcccaactgatgatatccacatgaagcaagttgatctggagaatgtatggcttcattttatccgggagttcattgcaccagttacactgaaggtctttgcaggctattatacgaagggatttgcactactgaattttgtagtaaaatactcccctgaacgacagcgttctcttcgtcctcatcatgatgcttctacatttaccataaacattgcacttaataacgtgggagaagactttcagggaggtggttgcaaatttctaaggtacaattgctctattgagtcaccacgaaaaggctggagcttcatgcatcctgggagactcacacatttgcatgaaggacttcctgttaaaaatggaacaagatacattgcagtgtcatttatagatccctaagttatttacttttcattgaattgaaatttattttggatgaatgactggcatgaacacgtctttgaagttgtggctgagaagatgagaggaatatttaaataacatcaacagaacaacttcactttgggccaaacatttgaaaaactttttataaaaaattgtttgatatttcttaatgtctgctctgagccttaaaacacagattgaagaagaaaagaaagaaaaaacttaaatatttatttctatgctttgttgcctctgagaataatgacaatttatgaatttgtgtttcaaattgataaaatatttaggtacaaataacaagactaataatattttcttatttaaaaaaagcatgggaagatttttatttatcaaaatatagaggaaatgtagacaaaatggatataaatgaaaattaccatgttgtaaaaccttgaaaatcagattctaactggatttgtatgcaactaagtatttttctgaacacctatgcaggtcttatttacagtagttactaagggaacacacaaagaattacacaacgttttcctcaagaaaatggtacaaaacacaaccgaggagcgtatacagttgaaaacatttttgttttgattggaaggcagattattttatattagtattaaaaatcaaaccctatgtttctttcagatgaatcttccaaagtggattatattaagcaggtattagatttaggaaaacctttccatttcttaaagtattatcaagtgtcaagatcagcaagtgtccttaagtcaaacaggttttttttgttgttgtttttgctttgtttccttttttagaaagttctagaaaataggaaaacgaaaaatttcattgagatgagtagtgcatttaattattttttaaaaaactttttaagtacttgaattttatatcaggaaaacaaagttgttgagccttgcttcttccgttttgccctttgtctcgctccttattctttttttggggggagggttatttgcttttttatcttcctggcataatttccattttattcttctgagtgtctatgttaacttccctctatcccgcttataaaaaaattctccaacaaaaatacttgttgacttgatgttttatcacttctctaagtaaggttgaaatatccttattgtagctactgtttttaatgtaaaggttaaacttgaaaagaaattcttaatcacggtgccaaaattcattttctaacaccatgtgttagaaaattataaaaaataaaataattttagaaagttttgttgtt

SEQ ID NO: 3006 - protein, 418 aa, Homo sapiens
MLENHILHKRIYILTFFSQQIFILCHAHFIFFFTVRDFCRQDEKCDYYFSVDADVVLTNPRTLKILIEQNRKIIAPLVTRHGKLWSNFWGALSPDGYYARSEDYVDIVQGNRVGVWNVPYMANVYLIKGKTLRSEMNERNYFVRDKLDPDMALCRNAREMTLQREKDSPTPETFQMLSPPKGVFMYISNRHEFGRLLSTANYNTSHYNNDLWQIFENPVDWKEKYINRDYSKIFTENIVEQPCPDVFWFPIFSEKACDELVEEMEHYGKWSGGKHHDSRISGGYENVPTDDIHMKQVDLENVWLHFIREFIAPVTLKVFAGYYTKGFALLNFVVKYSPERQRSLRPHHDASTFTINIALNNVGEDFQGGGCKFLRYNCSIESPRKGWSFMHPGRLTHLHEGLPVKNGTRYIAVSFIDP

SEQ ID NO: 3007 - DNA, 4200 bp, Homo sapiens
attgccgcagatttgcagtcacttcagactgggtggagtatccaagtccatagaagagcaaattctcacccttcgaggctgctgtggaagctaccggggctgggacagcagagaggaacccagacgggaacaccgccctcccgccagactcccggcggctcctcctccctctcccaaacccactcccaaagctaagtgcaggcttccccgttccagccagaagcgctgcgtgagcctccacacgtagccgcaggcagctccttaaatagcgtccgcgctgagcaaacagtccagacgtggggcccaggagggcgagctgaggcgaccgcaccgggcgcgcagcggcggcgggtcagccggcggccaatagccagggcgcggcccgccccgtcgcctcccctcggggagcctataaggcctccgcagcgccccgggcgcctgctgctccgtgcctccaccgacgacctcactcagctgcgttacgcgccgctccggctgccggccgcgcgccttgcccgccggctcccgcccgcaatcggcggctcagggcggacccgggtctctgcgttctcgcgagaagcgcggcgctgcggggccgtgggcgcctgagcccgcgcggccctcgagggccgaatatggggggatgcacggtgaagcctcagctgctgctcctggcgctcgtcctccacccctggaatccctgtctgggtgcggactcggagaagccctcgagcatccccacagataaattattagtcataactgtagcaacaaaagaaagtgatggattccatcgatttatgcagtcagccaaatatttcaattatactgtgaaggtccttggtcaaggagaagaatggagaggtggtgatggaattaatagtattggagggggccagaaagtgagattaatgaaagaagtcatggaacactatgctgatcaagatgatctggttgtcatgtttactgaatgctttgatgtcatatttgctggtggtccagaagaagttctaaaaaaattccaaaaggcaaaccacaaagtggtctttgcagcagatggaattttgtggccagataaaagactagcagacaagtatcctgttgtgcacattgggaaacgctatctgaattcaggaggatttattggctatgctccatatgtcaaccgtatagttcaacaatggaatctccaggataatgatgatgatcagctcttttacactaaagtttacattgatccactgaaaagggaagctattaacatcacattggatcacaaatgcaaaattttccagaccttaaatggagctgtagatgaagttgttttaaaatttgaaaatggcaaagccagagctaagaatacattttatgaaacattaccagtggcaattaatggaaatggacccaccaagattctcctgaattattttggaaactatgtacccaattcatggacacaggataatggctgcactctttgtgaattcgatacagtcgacttgtctgcagtagatgtccatccaaacgtatcaataggtgtttttattgagcaaccaaccccttttctacctcggtttctggacatattgttgacactggattacccaaaagaagcacttaaactttttattcataacaaagaagtttatcatgaaaaggacatcaaggtattttttgataaagctaagcatgaaatcaaaactataaaaatagtaggaccagaagaaaatctaagtcaagcggaagccagaaacatgggaatggacttttgccgtcaggatgaaaagtgtgattattactttagtgtggatgcagatgttgttttgacaaatccaaggactttaaaaattttgattgaacaaaacagaaagatcattgctcctcttgtaactcgtcatggaaagctgtggtccaatttctggggagcattgagtcctgatggatactatgcacgatctgaagattatgtggatattgttcaagggaatagagtaggagtatggaatgtcccatatatggctaatgtgtacttaattaaaggaaagacactccgatcagagatgaatgaaaggaactattttgttcgtgataaactggatcctgatatggctctttgccgaaatgctagagaaatgactttacaaagggaaaaagactcccctactccggaaacattccaaatgctcagccccccaaagggtgtatttatgtacatttctaatagacatgaatttggaaggctattatccactgctaattacaatacttcccattataacaatgacctctggcagatttttgaaaatcctgtggactggaaggaaaagtatataaaccgtgattattcaaagattttcactgaaaatatagttgaacagccctgtccagatgtcttttggttccccatattttctgaaaaagcctgtgatgaattggtagaagaaatggaacattacggcaaatggtctgggggaaaacatcatgatagccgtatatctggtggttatgaaaatgtcccaactgatgatatccacatgaagcaagttgatctggagaatgtatggcttcattttatccgggagttcattgcaccagttacactgaaggtctttgcaggctattatacgaagggatttgcactactgaattttgtagtaaaatactcccctgaacgacagcgttctcttcgtcctcatcatgatgcttctacatttaccataaacattgcacttaataacgtgggagaagactttcagggaggtggttgcaaatttctaaggtacaattgctctattgagtcaccacgaaaaggctggagcttcatgcatcctgggagactcacacatttgcatgaaggacttcctgttaaaaatggaacaagatacattgcagtgtcatttatagatccctaagttatttacttttcattgaattgaaatttattttggatgaatgactggcatgaacacgtctttgaagttgtggctgagaagatgagaggaatatttaaataacatcaacagaacaacttcactttgggccaaacatttgaaaaactttttataaaaaattgtttgatatttcttaatgtctgctctgagccttaaaacacagattgaagaagaaaagaaagaaaaaacttaaatatttatttctatgctttgttgcctctgagaataatgacaatttatgaatttgtgtttcaaattgataaaatatttaggtacaaataacaagactaataatattttcttatttaaaaaaagcatgggaagatttttatttatcaaaatatagaggaaatgtagacaaaatggatataaatgaaaattaccatgttgtaaaaccttgaaaatcagattctaactggatttgtatgcaactaagtatttttctgaacacctatgcaggtcttatttacagtagttactaagggaacacacaaagaattacacaacgttttcctcaagaaaatggtacaaaacacaaccgaggagcgtatacagttgaaaacatttttgttttgattggaaggcagattattttatattagtattaaaaatcaaaccctatgtttctttcagatgaatcttccaaagtggattatattaagcaggtattagatttaggaaaacctttccatttcttaaagtattatcaagtgtcaagatcagcaagtgtccttaagtcaaacaggttttttttgttgttgtttttgctttgtttccttttttagaaagttctagaaaataggaaaacgaaaaatttcattgagatgagtagtgcatttaattattttttaaaaaactttttaagtacttgaattttatatcaggaaaacaaagttgttgagccttgcttcttccgttttgccctttgtctcgctccttattctttttttggggggagggttatttgcttttttatcttcctggcataatttccattttattcttctgagtgtctatgttaacttccctctatcccgcttataaaaaaattctccaacaaaaatacttgttgacttgatgttttatcacttctctaagtaaggttgaaatatccttattgtagctactgtttttaatgtaaaggttaaacttgaaaagaaattcttaatcacggtgccaaaattcattttctaacaccatgtgttagaaaattataaaaaataaaataattttagaaagttttgttgtt

SEQ ID NO: 3008 - protein, 758 aa, Homo sapiens; identical to SEQ ID NO: 280

SEQ ID NO: 3009 - DNA, 4137 bp, Homo sapiens
attgccgcagatttgcagtcacttcagactgggtggagtatccaagtccatagaagagcaaattctcacccttcgaggctgctgtggaagctaccggggctgggacagcagagaggaacccagacgggaacaccgccctcccgccagactcccggcggctcctcctccctctcccaaacccactcccaaagctaagtgcaggcttccccgttccagccagaagcgctgcgtgagcctccacacgtagccgcaggcagctccttaaatagcgtccgcgctgagcaaacagtccagacgtggggcccaggagggcgagctgaggcgaccgcaccgggcgcgcagcggcggcgggtcagccggcggccaatagccagggcgcggcccgccccgtcgcctcccctcggggagcctataaggcctccgcagcgccccgggcgcctgctgctccgtgcctccaccgacgacctcactcagctgcgttacgcgccgctccggctgccggccgcgcgccttgcccgccggctcccgcccgcaatcggcggctcagggcggacccgggtctctgcgttctcgcgagaagcgcggcgctgcggggccgtgggcgcctgagcccgcgcggccctcgagggccgaatatggggggatgcacggtgaagcctcagctgctgctcctggcgctcgtcctccacccctggaatccctgtctgggtgcggactcggagaagccctcgagcatccccacagataaattattagtcataactgtagcaacaaaagaaagtgatggattccatcgatttatgcagtcagccaaatatttcaattatactgtgaaggtccttggtcaaggagaagaatggagaggtggtgatggaattaatagtattggagggggccagaaagtgagattaatgaaagaagtcatggaacactatgctgatcaagatgatctggttgtcatgtttactgaatgctttgatgtcatatttgctggtggtccagaagaagttctaaaaaaattccaaaaggcaaaccacaaagtggtctttgcagcagatggaattttgtggccagataaaagactagcagacaagtatcctgttgtgcacattgggaaacgctatctgaattcaggaggatttattggctatgctccatatgtcaaccgtatagttcaacaatggaatctccaggataatgatgatgatcagctcttttacactaaagtttacattgatccactgaaaagggaagctattaacatcacattggatcacaaatgcaaaattttccagaccttaaatggagctgtagatgaagttgttttaaaatttgaaaatggcaaagccagagctaagaatacattttatgaaacattaccagtggcaattaatggaaatggacccaccaagattctcctgaattattttggaaactatgtacccaattcatggacacaggataatggctgcactctttgtgaattcgatacagtcgacttgtctgcagtagatgtccatccaaacgtatcaataggtgtttttattgagcaaccaaccccttttctacctcggtttctggacatattgttgacactggattacccaaaagaagcacttaaactttttattcataacaaagaagtttatcatgaaaaggacatcaaggtattttttgataaagctaagcatgaaatcaaaactataaaaatagtaggaccagaagaaaatctaagtcaagcggaagccagaaacatgggaatggacttttgccgtcaggatgaaaagtgtgattattactttagtgtggatgcagatgttgttttgacaaatccaaggactttaaaaattttgattgaacaaaacagaaagatcattgctcctcttgtaactcgtcatggaaagctgtggtccaatttctggggagcattgagtcctgatggatactatgcacgatctgaagattatgtggatattgttcaagggaatagagtaggagtatggaatgtcccatatatggctaatgtgtacttaattaaaggaaagacactccgatcagagatgaatgaaaggaactattttgttcgtgataaactggatcctgatatggctctttgccgaaatgctagagaaatgggtgtatttatgtacatttctaatagacatgaatttggaaggctattatccactgctaattacaatacttcccattataacaatgacctctggcagatttttgaaaatcctgtggactggaaggaaaagtatataaaccgtgattattcaaagattttcactgaaaatatagttgaacagccctgtccagatgtcttttggttccccatattttctgaaaaagcctgtgatgaattggtagaagaaatggaacattacggcaaatggtctgggggaaaacatcatgatagccgtatatctggtggttatgaaaatgtcccaactgatgatatccacatgaagcaagttgatctggagaatgtatggcttcattttatccgggagttcattgcaccagttacactgaaggtctttgcaggctattatacgaagggatttgcactactgaattttgtagtaaaatactcccctgaacgacagcgttctcttcgtcctcatcatgatgcttctacatttaccataaacattgcacttaataacgtgggagaagactttcagggaggtggttgcaaatttctaaggtacaattgctctattgagtcaccacgaaaaggctggagcttcatgcatcctgggagactcacacatttgcatgaaggacttcctgttaaaaatggaacaagatacattgcagtgtcatttatagatccctaagttatttacttttcattgaattgaaatttattttggatgaatgactggcatgaacacgtctttgaagttgtggctgagaagatgagaggaatatttaaataacatcaacagaacaacttcactttgggccaaacatttgaaaaactttttataaaaaattgtttgatatttcttaatgtctgctctgagccttaaaacacagattgaagaagaaaagaaagaaaaaacttaaatatttatttctatgctttgttgcctctgagaataatgacaatttatgaatttgtgtttcaaattgataaaatatttaggtacaaataacaagactaataatattttcttatttaaaaaaagcatgggaagatttttatttatcaaaatatagaggaaatgtagacaaaatggatataaatgaaaattaccatgttgtaaaaccttgaaaatcagattctaactggatttgtatgcaactaagtatttttctgaacacctatgcaggtcttatttacagtagttactaagggaacacacaaagaattacacaacgttttcctcaagaaaatggtacaaaacacaaccgaggagcgtatacagttgaaaacatttttgttttgattggaaggcagattattttatattagtattaaaaatcaaaccctatgtttctttcagatgaatcttccaaagtggattatattaagcaggtattagatttaggaaaacctttccatttcttaaagtattatcaagtgtcaagatcagcaagtgtccttaagtcaaacaggttttttttgttgttgtttttgctttgtttccttttttagaaagttctagaaaataggaaaacgaaaaatttcattgagatgagtagtgcatttaattattttttaaaaaactttttaagtacttgaattttatatcaggaaaacaaagttgttgagccttgcttcttccgttttgccctttgtctcgctccttattctttttttggggggagggttatttgcttttttatcttcctggcataatttccattttattcttctgagtgtctatgttaacttccctctatcccgcttataaaaaaattctccaacaaaaatacttgttgacttgatgttttatcacttctctaagtaaggttgaaatatccttattgtagctactgtttttaatgtaaaggttaaacttgaaaagaaattcttaatcacggtgccaaaattcattttctaacaccatgtgttagaaaattataaaaaataaaataattttagaaagttttgttgtt

SEQ ID NO: 3010 - protein, 737 aa, Homo sapiens; identical to SEQ ID NO: 278

SEQ ID NO: 3011 - DNA, 3830 bp, Homo sapiens
taagaaaaaataaacttttaaattaaaattgttatgccaaatttgggtgtctcaaactatttgtttgcgtatgcagtagccaacttagactgtgtctatgtttgtacgtatttatacataaagggctgtagaagttacttatgtttttcttttaatggctacgagtccacatatttaatcaaatgatgaatcaaggtaagatcaattttttttaaatgcagataaatgaatagtatgactttcatagcagtgacttaaatttaaatgtacactctgaaggttgtgtgtggtaaaagtgtgtttatttagactgtgggggaaacaggtgctcttactctccagttagtcactgagctagataatactgtaatcccaagaaacgggcattgtaggccttttgtttagccctgttaatgcttcattctactaataaaactctagtaatagtaaaaaaaatcgtgtattcaatgaatattaattgaatatgccaggaactgtgttaagagtaggtgataaaaaggtgaagacatgatccattctcatcaggaaataatcttatctactacgaaccctcatgcctgtgctgcagaagctgaggtcccagagggatggattctgactagattaggggtctagggatagacagaaaagaggcctctgaaaaaccaaactgatgttattactaatgattccataatttattcattggagaatcctctgggtccacattcagaacatattttctttaatatttttcatgattgtacctagtgcttctgtctggtattttgtttgatagttgcttcgaacaaatatggtgtggagacacacactgacaacagcaaaaagtgctgactgggaccgacagtgagggaggggagcccagagggaagttgataacccaaatgtcatctggtatctccagttgttcattccttgatattgctgatgataatgttacaaactgtaccagggaaagcaaacatagtcactgcccctggtaagaaggcaggggaataactatcttagaaaatttgatgaaaatcaagtttgtaaaatattaatacctgaaaagtcatatacttacatctccaacattcatttaaaactgagttgtgggatatgtaagttgcatttgtgtgcatgtgtatgtatgtatgtatgtatgcagaaacattttgatttgtggatgttttatgccttaaaatatttactggcttgaaaatatattttaactggcttaaaattttagaggtgagctccctgtgaatatccgtgttaaattgaccattttgaaatttaagacaatatatatatcgtttcagatattgttccactattttgatcagaaaagtatgctagagaaccatattttacataaaagaatatatatattaacatttttcagtcagcagatatttattttatgtcatgcccatttcattttctttttcactgttagggacttttgccgtcaggatgaaaagtgtgattattactttagtgtggatgcagatgttgttttgacaaatccaaggactttaaaaattttgattgaacaaaacagaaagatcattgctcctcttgtaactcgtcatggaaagctgtggtccaatttctggggagcattgagtcctgatggatactatgcacgatctgaagattatgtggatattgttcaagggaatagagtaggagtatggaatgtcccatatatggctaatgtgtacttaattaaaggaaagacactccgatcagagatgaatgaaaggaactattttgttcgtgataaactggatcctgatatggctctttgccgaaatgctagagaaatgactttacaaagggaaaaagactcccctactccggaaacattccaaatgctcagccccccaaaggtgttatttttacttattttatttatttttgtttatttaatatttgatatagtatattgcctagtagtaaagtttctttaagggccttatttgcatttagcttggtaaaatgttgattttcatcagtcatctgtgtgtttgcgtgttttgtgtgacttgggcatgggtcttgtgtgatagtcaactcttggttctttgagctgatttatattttatggctgacaggtgacaaagttaaacctaagtccctttcattctttttttaggtttttatttctttttaaagggagagaagagggtagaagtaggtataaaatagaatttgattacagtaaggtttaggtgcaccttattgagttattaatcactaactcttttactattaaaacaggtccaaaaagaaacacattacctagtggtgtttgccacatttgtctggtttggggcaagaatatgagactggttttctttatctgcctttataatgtatgactcatttgcgtgttagcctttaaacattagaaaaagaaaggaatgaaacagactggtgaaatataactggcagtgaattcttgattaaaaatgtgatgctttctttgaaagagaaagaagccaaaagaggtataattcattgcactgtgtctcaaaaatatttctgctttcaaacaggaattttttccccgatgtctacatctaggatcaatgagaaagggacaaaaacagtccattcttctttttttcagttgagtgtcagtgctatctactagttttgtgtggtgtctgaattcataatcaaaatttgagttttttattttaaactatgcacattttatatgaatactaaaaatgcatgttcataaatgaaatataaagatagaaattaatatcttctatatatttttcctatgattaaatttacttttgtacctacctctaagattaatactgttattttctggcatatagggtgtatttatgtacatttctaatagacatgaatttggaaggctattatccactgctaattacaatacttcccattataacaatgacctctggcagatttttgaaaatcctgtggtatgtatttcatactcaactttattatttttctataactgtaagtggttataaatcagttggttaataatatgaaatgtggttagaggctttttaaaatgacataaggtgaaatgcacatcaaaaccacaatgagatactgtctcacaccagtcagaatggctattattaaaaagtcaaaaacaacagatatgggtgaggctacggagaaaagggaatgcttgtacgttgttggtcggaatgaatttggaaagcagtttgaagatttctcaaagatcttaaaacagagctaccatttgacccagcaattccattactgggtatatagccaaaagaaagtaagtcatttgaccaaaaacacacatgaacctgtatctgttcgttgcagcactattcacagtagcaaagacatggacttaaactaggtgttcattaatggtggattggataaagaaaatgtgttacatacacaccatagaatactatacagccataaaaaagaacaatattatgtcattttcagcaacatggagagaactggaggccattaccctaagtgaattaatggcacagaaaaccaaatactgcatgttctcacttatgagtgggagctaaacattgggtacttgtgaacataaatataggaacagtagaccctggggatcactagaggagtgagggagtagggagggggacaagggttgaaaaaccaactaatgggtactgtgctcactaccttggtgatgggatcagtcataccctaaaccttagcatcatgcattatacacttgtaacaaacctgcacatatactccctgaatccaaaagctgaaattgtttttaaaaagtaaat

SEQ ID NO: 3012 - protein, 207 aa, Homo sapiens
MLENHILHKRIYILTFFSQQIFILCHAHFIFFFTVRDFCRQDEKCDYYFSVDADVVLTNPRTLKILIEQNRKIIAPLVTRHGKLWSNFWGALSPDGYYARSEDYVDIVQGNRVGVWNVPYMANVYLIKGKTLRSEMNERNYFVRDKLDPDMALCRNAREMTLQREKDSPTPETFQMLSPPKVLFLLILFIFVYLIFDIVYCLVVKFL

SEQ ID NO: 3013 - DNA, 351 bp, Homo sapiens
cttgatgttactgttagattcagagactcttatatcagtagcattatgagtctaattgttttaaaattgtgatttgtggagtccagaagatccaaagagacatttcagggctcatctaagggaatcaaaaaggaattttcagagcagcttgcgaaagtctccaataaagaagtcaggtagaggtttaatgagtaagcctgaagacaaacatacaaaatatcaaaatatgtttggatatgaccaaaacacagaaaacagttgaggaggccatttagaaaaatgccctttgattgttcaaacttttccaattaaggggatatgataattgtatataggccgtggcatcaagca

SEQ ID NO: 3014 - protein, 35 aa, Homo sapiens
FVESRRSKETFQGSSKGIKKEFSEQLAKVSNKEVR

SEQ ID NO: 3015 - DNA, 4294 bp, Homo sapiens
ttttcccttcagtagtgagcagtttgtatgtacagagaaaatggacttacaaaaacttgcagcagtagtttgttcttgctttaaaatttcgtttttggtttagattatggatgcatgaagtaagggagtgaatcagtttcttgtttatatttttttcaccttttaaacaaaaaattctttaaaatattttaatgcattcttttgaagaggtagatgtttggtacattttatggctcccagagcatatattcagttggtgcatgttgtggaagggggaattggaaattaaatgaaaacctatgactttggtcatgtcaatctgtaagacacatcagtaaaagggtattatgctctgttggttttgtttttttgttttgctttttttttttttttttcttttttgttttttggtgatgtggcttaaatgcaatagtttcttttttgggacatatttctgccaattaaagactagaagggcacaactttttttttaattaccatagagaagatacattaaaaaaaatcttctgatgttttgtagccataactaaattatggtaaaaatgtgcactattgtgaaaaggagcaacgtagttttgggttttttgttgtttgtttgttttgctttgttttttaagagattaaaatgtttctggataaggattagcttctcgaagtgtccatcattctgtgtagaagcttaaatatgtaatgtaaccaaactccagtattaaaaatctctcatgttgttttctttatacaaagcaagataacggcatataacactgccattacatggcaaaatgtttgctaccttagtttaaaaaacaatctcaaacaaaagacttgcttcaaggtgtttttaaatagcagtgattcagaattttttttaatgaaagtataattgcactaaccttcttcctgctgctctgattctgcatttgtggtacttgtgactacgttttttcaaatatagatagatttaagctgctaatttttttttttttagtaatcactactatatcatgtcttttactctgtttataatatcaagtattttcttaaagatatagatattaaaccttgtgctcatgcaacttagaaacatattaccctgtgacttacgtaggaaacctaatatgctgagtatctggcacttgaattcctgcttttattgctggaggtccacatctgtggttgacctctgttattgtttaaaaaaaataaataaaaattaaaaaaatctgtgcaataattttaaaatgtgctcccaggaatagacacaaatgttttgagtatcttttaagctgcattttcctttagtgatgcatttgtcaattgcactgaatttaaatctgaaagtcagaggtgattattgatagtacttttgtattttgatatggacagtttattcatttgcatacagttattgactttttcccagctgattaaaagatagtcaagaaattctgcaatatagctgccaaaatagacagctacatttttatgatattgtcatcttttctgttttttttttcttttttttctttagctattttacttaagcataatagccacaataggacatataaaagattataaatacagagctttattatcctgacgtcttgggtcttttaagtatatacttttctgaaaggtatccattttgtaggcttgggttcttcatgagcatacgattgtttatttttgctgctgttctcaacatcatcattgcctgctgatgtgccacgatgctgctccaatagacagcaataagattgtctctaatttgagcagtaacatgattgcaagagaccaagtttcacagcttgtaaagttctgtatttgggattcttgcttatttttccgcctgtgtttttctgagaacttattcctgatgatcaattgaatccagtagtttttctatgctatttgttgttgtataagctactgtaagaaacttatcataaggaaaaatagaaaggaaaacttgaatcaatactcattgattaaaatggaataaagaaagagcagctgccacttttaaacaacataaaggaatatctttttttgtctccgtgtaggaaatcccataagttcttatatttgttccagttcccatttcctgccattgaccagataacatcattgactttcaaatgacttttagaagtgataactcttaatttcctaatagatactagattgtattgaattctgttttaattattctctaggtaagtatgttttaggattaaataccttttacagatactgaaagtgcctccttttgtggtgtaaaaaacaaattatggtgcaaaaagtaatcactagattgaaatacatgaaggttttttgctttttgacatacgaaaatgtcaagagaaaggccaaagatttgtactttttcacttacaaagcactcctttttcccttaaacttctttctgtcaaattagatttaatgagagagtactatttttaaggagctatctgtttatgtagaatgattttgttaagagtaatgtaaactattattgagtagaggcctaaagaggactgtgcatttttgctatttaaaggaatcacaaatgatcatacttaagtgagcaaaaatgacaagttttactagctaagtagagaaataaatctcaaatgcagcgctacaattttcattatcttaagtacattgtacatttctacagaacctgtgattattctcgcatgataaggatggtacttgcatatggtgaattactactgttgacagtttccgcagaaatcctatttcagtggaccaacattgtggcatggcagcaaatgccaacattttgtggaatagcagcaaatctacaagagaccctggttggtttttcgttttgttttctttgttttttcccccttctcctgaatcagcagggatggaaggagggtagggaagttatgaattactccttccagtagtagctctgaagtgtcacatttaatatcagttttttttaaacatgattctagttaaatgtagaagagagaagaaagaggaagtgttcacttttttaatacactgatttagaaatttgatgtcttatatcagtagttctgaggtattgatagcttgctttatttctgcctttacgttgacagtgttgaagcagggtgaataactagggcatatattttttttttttttgtaagctgtttcatgatgttttctttggaatttccggataagttcaggaaaacattctgcatgttgtatctagtctgatgtacttatccatctcattacaaacaaaaacacacagactgcatttgtagctctgtaatccttgaatacggaagtaaattttcttctttcctgactttgacattgtagctatactgtttccatttttgtttttacaaatcctttgggtctaattctgtgagcctacctatagcactggattaaaatgtctgcatcatttctttagttatccagttaactttaaaactgttgtaaaagtgtaaaccagcccatgacaggtttttgtacatgttaaagaacttcattgttcagttttcatgattattgtgtaaggaagactgatgtagatgttctgtgctgtcctggaccatgttaattacacttacgacgtattttagttccacatcacaatgatttgtccccagtgacccttttatcctttctaggcacatttcttgttgttgttgttgttgcagttcccctttgcattgtattgctttgacaactgtaatttgaatcagatctgaaagaggtccagaataaaatatattttgatattatgttggctgtgtacatatataaaacctttgatgtctatgtagtttatatagactatttactagtcaggtaaagagagagggatggtatttcttgtttacagtttgtttacattttaattgcttttacttctccagtgttctattgtagaataaacctttttttccaagttagccttcataacctataacacattcattctctcccatactggtgttactgattaataactgccatcagaacccaaaccactgtttttcataaacgtattgtttcccaagatatatactttaagcccataataaaattacaaattttactatttttattacttcttgcaggagataagatttttttaaatgaaggggttatttactatttttattaaagtataatagagcatctaatcagctaagggattgtaatttttaattcttttgaaaaataaatattgtatttaaaagacgttatttcacagaagctgaaa

SEQ ID NO: 3016 - protein, 48 aa, Homo sapiens [sequence omitted]

SEQ ID NO: 3017 - DNA, 7035 bp, Homo sapiens
ggggttataattgcctctcaccccccggaggggttattttgggggtggttggaggcggtggcggcggcggcgaggaggggaatttccttgtgcctccattcccgggaggggggagcggcgttggaggccaccgtttccagcatcaacaacagcaacttgtgattggcggtgaccggatattcagttgcacatccccacatcaatgcactgccaatgggttatatcctgtgttgtgacctcatggtttaagtgggaataaagatgagtataagcagtgatgaggtcaacttcttggtatatagatacttgcaagagtcaggattttctcattcagcatttacctttggtatagaaagccatatcagtcagtccaatataaatggtgccctcgtcccacccgctgcattgatttctatcatccagaaaggtctacagtatgtagaagcagaagttagtattaatgaggatggtaccttgtttgatggtcgaccaatagagtctctgtccctgatagatgccgtaatgcctgatgtagtacaaacaagacaacaagcttatagagataagcttgcacagcaacaggcagcagctgctgcagctgccgcagctgcagccagccaacaaggatctgcaaaaaatggagaaaacacagcaaatggggaggagaatggagcacatactatagcaaataatcatactgatatgatggaagtggatggggatgttgaaatccctcctaataaagctgttgtgttgcggggccatgaatctgaagtttttatctgtgcctggaaccctgttagtgatctcctagcatcagggtctggagactcaacagcaagaatatggaatcttagtgagaacagcaccagtggctctacacagttagtacttagacattgtatacgagaaggagggcaagatgttccaagcaacaaggatgtcacatctctagattggaatagtgaaggtacacttctagcaactggttcctatgatgggtttgccagaatatggactaaagatggtaaccttgctagcaccttagggcagcataaaggccctatatttgcattaaaatggaataagaaaggaaatttcatcctaagtgctggagtagacaagactacaattatttgggacgcacatactggtgaagccaagcaacagtttccttttcattcagcaccagcattggatgttgattggcagagcaacaacacctttgcttcttgtagtacagatatgtgcattcatgtctgtaaattaggacaagacagacctattaaaacattccaaggacatacgaatgaagtaaatgctatcaaatgggacccaactggcaatctcttggcctcctgttctgacgacatgactttaaagatatggagtatgaaacaagacaattgtgtccatgatttgcaagcacataataaagaaatttatactatcaaatggagtccaacaggaccagggactaataatccaaatgccaaccttatgttagcaagtgcatcctttgattctactgttaggttatgggatgtagaccgagggatatgcatccataccttgacaaaacaccaagagcctgtgtacagtgtagctttcagtcctgatggcaggtatctggcaagtggttcttttgacaaatgtgtacacatctggaacacgcagacaggtgctctagttcacagctataggggaacaggtggaatatttgaagtttgctggaatgcagcaggagacaaagttggagccagtgcatcagatggttcagtttgtgtattagaccttcggaaatagcgctactagttggaagccatggaccgactatgaatgtgtacatagccaaaatgactgtccctgacccatgtactgctatagtcccacttgaaccatggccagtccactacagccaaatctaaaagaaatatatacatacagtgtatataaacaaaattgcaccctgaagatgacagagttttgtcacagcttgtgaattctgttcaccaagtgctggaatctaatctgctgtgcccctaaaatagcatttagaagttttggatatgaaaaacagaagagagaaaaatatacattataaaagcagaacatacatgtaccagtttttggatactaaatgacagccttgtttctcccctttgaatcagcagacaccatggattatattctttttttcccttcagtagtgagcagtttgtatgtacagagaaaatggacttacaaaaacttgcagcagtagtttgttcttgctttaaaatttcgtttttggtttagattatggatgcatgaagtaagggagtgaatcagtttcttgtttatatttttttcaccttttaaacaaaaaattctttaaaatattttaatgcattcttttgaagaggtagatgtttggtacattttatggctcccagagcatatattcagttggtgcatgttgtggaagggggaattggaaattaaatgaaaacctatgactttggtcatgtcaatctgtaagacacatcagtaaaagggtattatgctctgttggttttgtttttttgttttgctttttttttttttttttcttttttgttttttggtgatgtggcttaaatgcaatagtttcttttttgggacatatttctgccaattaaagactagaagggcacaactttttttttaattaccatagagaagatacattaaaaaaaatcttctgatgttttgtagccataactaaattatggtaaaaatgtgcactattgtgaaaaggagcaacgtagttttgggttttttgttgtttgtttgttttgctttgttttttaagagattaaaatgtttctggataaggattagcttctcgaagtgtccatcattctgtgtagaagcttaaatatgtaatgtaaccaaactccagtattaaaaatctctcatgttgttttctttatacaaagcaagataacggcatataacactgccattacatggcaaaatgtttgctaccttagtttaaaaaacaatctcaaacaaaagacttgcttcaaggtgtttttaaatagcagtgattcagaattttttttaatgaaagtataattgcactaaccttcttcctgctgctctgattctgcatttgtggtacttgtgactacgttttttcaaatatagatagatttaagctgctaatttttttttttttagtaatcactactatatcatgtcttttactctgtttataatatcaagtattttcttaaagatatagatattaaaccttgtgctcatgcaacttagagtaacatatacagacaaatgattgcatgaggccatgtttatatgtgtgactaataaggcttgtcatgattaacataatccaggtatgtcatttctgaagagaatagtcatcaaatttatatctcgaagattttaattaaggaattgcttattgttgagcttagcaaattaataacactatttctgtcactaattattttgaggccttttagtactaaaattttaacctgtgttctaagtagaaactgatttaacccaagtaatgcagctttgattgatttcagcattcgttgctttgctatttttacaaaacagcattgattgaagcaagtcttggttttactaaggtagggtagcatttgctattggtaaagagaataaatacacttaatttcacaatacattgttatatgtaccccagttgttgttagtggggactatgatactgtaataatatttttaaaaatttacatcaagagaggcagtcattcacgatggttttgtgccagctctttttagggttttggatcacattagagatatttagaacatattaccctgtgacttacgtaggaaacctaatatgctgagtatctggcacttgaattcctgcttttattgctggaggtccacatctgtggttgacctctgttattgtttaaaaaaaataaataaaaattaaaaaaatctgtgcaataattttaaaatgtgctcccaggaatagacacaaatgttttgagtatcttttaagctgcattttcctttagtgatgcatttgtcaattgcactgaatttaaatctgaaagtcagaggtgattattgatagtacttttgtattttgatatggacagtttattcatttgcatacagttattgactttttcccagctgattaaaagatagtcaagaaattctgcaatatagctgccaaaatagacagctacatttttatgatattgtcatcttttctgttttttttttcttttttttctttagctattttacttaagcataatagccacaataggacatataaaagattataaatacagagctttattatcctgacgtcttgggtcttttaagtatatacttttctgaaaggtatccattttgtaggcttgggttcttcatgagcatacgattgtttatttttgctgctgttctcaacatcatcattgcctgctgatgtgccacgatgctgctccaatagacagcaataagattgtctctaatttgagcagtaacatgattgcaagagaccaagtttcacagcttgtaaagttctgtatttgggattcttgcttatttttccgcctgtgtttttctgagaacttattcctgatgatcaattgaatccagtagtttttctatgctatttgttgttgtataagctactgtaagaaacttatcataaggaaaaatagaaaggaaaacttgaatcaatactcattgattaaaatggaataaagaaagagcagctgccacttttaaacaacataaaggaatatctttttttgtctccgtgtaggaaatcccataagttcttatatttgttccagttcccatttcctgccattgaccagataacatcattgactttcaaatgacttttagaagtgataactcttaatttcctaatagatactagattgtattgaattctgttttaattattctctaggtaagtatgttttaggattaaataccttttacagatactgaaagtgcctccttttgtggtgtaaaaaacaaattatggtgcaaaaagtaatcactagattgaaatacatgaaggttttttgctttttgacatacgaaaatgtcaagagaaaggccaaagatttgtactttttcacttacaaagcactcctttttcccttaaacttctttctgtcaaattagatttaatgagagagtactatttttaaggagctatctgtttatgtagaatgattttgttaagagtaatgtaaactattattgagtagaggcctaaagaggactgtgcatttttgctatttaaaggaatcacaaatgatcatacttaagtgagcaaaaatgacaagttttactagctaagtagagaaataaatctcaaatgcagcgctacaattttcattatcttaagtacattgtacatttctacagaacctgtgattattctcgcatgataaggatggtacttgcatatggtgaattactactgttgacagtttccgcagaaatcctatttcagtggaccaacattgtggcatggcagcaaatgccaacattttgtggaatagcagcaaatctacaagagaccctggttggtttttcgttttgttttctttgttttttcccccttctcctgaatcagcagggatggaaggagggtagggaagttatgaattactccttccagtagtagctctgaagtgtcacatttaatatcagttttttttaaacatgattctagttaaatgtagaagagagaagaaagaggaagtgttcacttttttaatacactgatttagaaatttgatgtcttatatcagtagttctgaggtattgatagcttgctttatttctgcctttacgttgacagtgttgaagcagggtgaataactagggcatatattttttttttttttgtaagctgtttcatgatgttttctttggaatttccggataagttcaggaaaacattctgcatgttgtatctagtctgatgtacttatccatctcattacaaacaaaaacacacagactgcatttgtagctctgtaatccttgaatacggaagtaaattttcttctttcctgactttgacattgtagctatactgtttccatttttgtttttacaaatcctttgggtctaattctgtgagcctacctatagcactggattaaaatgtctgcatcatttctttagttatccagttaactttaaaactgttgtaaaagtgtaaaccagcccatgacaggtttttgtacatgttaaagaacttcattgttcagttttcatgattattgtgtaaggaagactgatgtagatgttctgtgctgtcctggaccatgttaattacacttacgacgtattttagttccacatcacaatgatttgtccccagtgacccttttatcctttctaggcacatttcttgttgttgttgttgttgcagttcccctttgcattgtattgctttgacaactgtaatttgaatcagatctgaaagaggtccagaataaaatatattttgatattatgttggctgtgtacatatataaaacctttgatgtctatgtagtttatatagactatttactagtcaggtaaagagagagggatggtatttcttgtttacagtttgtttacattttaattgcttttacttctccagtgttctattgtagaataaacctttttttccaagttagccttcataacctataacacattcattctctcccatactggtgttactgattaataactgccatcagaacccaaaccactgtttttcataaacgtattgtttcccaagatatatactttaagcccataataaaattacaaattttactatttttattacttcttgcaggagataagatttttttaaatgaaggggttatttactatttttattaaagtataatagagcatctaatcagctaagggattgtaatttttaattcttttgaaaaataaatattgtatttaaaagacgttatttcacagaagctgaaa

SEQ ID NO: 3018 - protein, 514 aa, Homo sapiens; identical to SEQ ID NO: 282

SEQ ID NO: 3019 - DNA, 3811 bp, Homo sapiens
ttttcccttcagtagtgagcagtttgtatgtacagagaaaatggacttacaaaaacttgcagcagtagtttgttcttgctttaaaatttcgtttttggtttagattatggatgcatgaagtaagggagtgaatcagtttcttgtttatatttttttcaccttttaaacaaaaaattctttaaaatattttaatgcattcttttgaagaggtagatgtttggtacattttatggctcccagagcatatattcagttggtgcatgttgtggaagggggaattggaaattaaatgaaaacctatgactttggtcatgtcaatctgtaagacacatcagtaaaagggtattatgctctgttggttttgtttttttgttttgctttttttttttttttttcttttttgttttttggtgatgtggcttaaatgcaatagtttcttttttgggacatatttctgccaattaaagactagaagggcacaactttttttttaattaccatagagaagatacattaaaaaaaatcttctgatgttttgtagccataactaaattatggtaaaaatgtgcactattgtgaaaaggagcaacgtagttttgggttttttgttgtttgtttgttttgctttgttttttaagagattaaaatgtttctggataaggattagcttctcgaagtgtccatcattctgtgtagaagcttaaatatgtaatgtaaccaaactccagtattaaaaatctctcatgttgttttctttatacaaagcaagataacggcatataacactgccattacatggcaaaatgtttgctaccttagtttaaaaaacaatctcaaacaaaagacttgcttcaaggtgtttttaaatagcagtgattcagaattttttttaatgaaagtataattgcactaaccttcttcctgctgctctgattctgcatttgtggtacttgtgactacgttttttcaaatatagatagatttaagctgctaatttttttttttttagtaatcactactatatcatgtcttttactctgtttataatatcaagtattttcttaaagatatagatattaaaccttgtgctcatgcaacttagaaacatattaccctgtgacttacgtaggaaacctaatatgctgagtatctggcacttgaattcctgcttttattgctggaggtccacatctgtggttgacctctgttattgtttaaaaaaaataaataaaaattaaaaaaatctgtgcaataattttaaaatgtgctcccaggaatagacacaaatgttttgagtatcttttaagctgcattttcctttagtgatgcatttgtcaattgcactgaatttaaatctgaaagtcagaggtgattattgatagtacttttgtattttgatatggacagtttattcatttgcatacagttattgactttttcccagctgattaaaagatagtcaagaaattctgcaatatagctgccaaaatagacagctacatttttatgatattgtcatcttttctgttttttttttcttttttttctttagctattttacttaagcataatagccacaataggacatataaaagattataaatacagagctttattatcctgacgtcttgggtcttttaagtatatacttttctgaaaggtatccattttgtaggcttgggttcttcatgagcatacgattgtttatttttgctgctgttctcaacatcatcattgcctgctgatgtgccacgatgctgctccaatagacagcaataagattgtctctaatttgagcagtaacatgattgcaagagaccaagtttcacagcttgtaaagttctgtatttgggattcttgcttatttttccgcctgtgtttttctgagaacttattcctgatgatcaattgaatccagtagtttttctatgctatttgttgttgtataagctactgtaagaaacttatcataaggaaaaatagaaaggaaaacttgaatcaatactcattgattaaaatggaataaagaaagagcagctgccacttttaaacaacataaaggaatatctttttttgtctccgtgtaggaaatcccataagttcttatatttgttccagttcccatttcctgccattgaccagataacatcattgactttcaaatgacttttagaagtgataactcttaatttcctaatagatactagattgtattgaattctgttttaattattctctaggtaagtatgttttaggattaaataccttttacagatactgaaagtgcctccttttgtggtgtaaaaaacaaattatggtgcaaaaagtaatcactagattgaaatacatgaaggttttttgctttttgacatacgaaaatgtcaagagaaaggccaaagatttgtactttttcacttacaaagcactcctttttcccttaaacttctttctgtcaaattagatttaatgagagagtactatttttaaggagctatctgtttatgtagaatgattttgttaagagtaatgtaaactattattgagtagaggcctaaagaggactgtgcatttttgctatttaaaggaatcacaaatgatcatacttaagtgagcaaaaatgacaagttttactagctaagtagagaaataaatctcaaatgcagcgctacaattttcattatcttaagtacattgtacatttctacagaacctgtgattattctcgcatgataaggatggtacttgcatatggtgaattactactgttgacagtttccgcagaaatcctatttcagtggaccaacattgtggcatggcagcaaatgccaacattttgtggaatagcagcaaatctacaagagaccctggttggtttttcgttttgttttctttgttttttcccccttctcctgaatcagcagggatggaaggagggtagggaagttatgaattactccttccagtagtagctctgaagtgtcacatttaatatcagttttttttaaacatgattctagttaaatgtagaagagagaagaaagaggaagtgttcacttttttaatacactgatttagaaatttgatgtcttatatcagtagttctgaggtattgatagcttgctttatttctgcctttacgttgacagtgttgaagcagggtgaataactagggcatatattttttttttttttgtaagctgtttcatgatgttttctttggaatttccggataagttcaggaaaacattctgcatgttgtatctagtctgatgtacttatccatctcattacaaacaaaaacacacagactgcatttgtagctctgtaatccttgaatacggaagtaaattttcttctttcctgactttgacattgtagctatactgtttccatttttgtttttacaaatcctttgggtctaattctgtgagcctacctatagcactggattaaaatgtctgcatcatttctttagttatccagttaactttaaaactgttgtaaaagtgtaaaccagcccatgacaggtttttgtacatgttaaagaacttcattgttcagttttcatgattattgtgtaaggaagactgatgtagatgttctgtgctgtcctggaccatgttaattacacttacgacgtattttagttccacatcacaatgatttgtccccagtgacccttttatcctttctaggcacatttcttgttgttgttgttgttgcagttcccctttgcattgtattgctttgacaactgtaatttgaatcagatctgaaagaggtccagaataaaatatattttgatattatg

SEQ ID NO: 3020 - protein, 48 aa, Homo sapiens [sequence omitted]

SEQ ID NO: 3021 - DNA, 6674 bp, Homo sapiens
tgaattttcagtgcaggagaaaatcattatcctattgttgtatatacatccaggttttttgttttcccctttcttgtatgatgagttgcctaagcatttgatgagtaaattgtagaagtcttgtgccagcatacatacaaatttgaggtagatgccgatgatctgagccattggcctttttaaatgtcttagctctgccttgttgcccataatgttttggttcgttatagcccagttcaagcttagagattggtaagtgctttttaaaagaaagttgttttgtttttttaacccccaagttggctgtagattgaatgtctgtaggttgactgtagattttattttttatatctcagcaaactagattttgttggttctacttttttctctcctcattaactatagatactcaaagcctactatacttgaacttaatctcataaattatgagaaattttaagtaaacaaaacagttgagccttcccagcctgataatcagtagcaatgtgtcagtaccaatgcatctgtgatttgtgccacattactgggctaaatttgaagaggaaagctcggtcaaacattcttccagcttgtcatcttggataggctgaatgggaggtattttcaaggtgcatggtttgttgccatgtgcttttaagtagatctgccacctctagcttgactttaggttaccataaagctgcagaggtcacttttctgatttgtcagggccgaacacctgaagcatatatttcagttttcataacaggacctctgatctttgtcctgttatattgactggtttcataggagaatatatttttggattgagttttaattcttcagtagcagctgaataataaaataacgttgttacatttatgattcagcttaatgaatgattacattattagtattcctgcctgtgttttttgtttaaacatataacgtctttcaagaatagtgtacatatctgtctgggcactgtggtgcatgcttataatcccaacattttgggaggccagggtgggtggattgcttgaggccaggagttcaagaccagcctgggcaacacggtgagaccttgtctctacaaataattttttaaaaatcagctgggcatggtggcatgcacttgtaatcctagctacttaggaggtggaggcgggaggatcactctagcccaggagttagaaggtgcagtgagctatgattgcacagctgcatccatcctgggtaacaacaagaccctgtctaaagaaaaaaaaggaacatacatacattattttagcttcttttataatcccctagcttaggaactggtcagtaaatatagagtgaataacagatttatactggaattatctttactagtttgttatacttcctctttaagatgttttgtcaaagaaattctgaatttattttgtttctctacatgttagctagactcatgtatcatttagcaacaacaaaaacttatttcatgtgatagactgactgtttacttctagctattgttggctatgtcagagagaccagataccttagccaagaatggttatcaagactggagaaactgaatatgtgtgtgagtaatcttttgagaacaggctggtattatctttttgtaaagggatcatattacatttctagaatttcagaacttatttttatagttgaagctaagtccctcctctgattgctagaaataaagctatgtaatatttttatttcagcatttggatttattataatatgtattacgatttttaagattttgtttttcattcttttagacaggtgctctagttcacagctataggggaacaggtggaatatttgaagtttgctggaatgcagcaggagacaaagttggagccagtgcatcagatggttcagtttgtgtattagaccttcggaaatagcgctactagttggaagccatggaccgactatgaatgtgtacatagccaaaatgactgtccctgacccatgtactgctatagtcccacttgaaccatggccagtccactacagccaaatctaaaagaaatatatacatacagtgtatataaacaaaattgcaccctgaagatgacagagttttgtcacagcttgtgaattctgttcaccaagtgctggaatctaatctgctgtgcccctaaaatagcatttagaagttttggatatgaaaaacagaagagagaaaaatatacattataaaagcagaacatacatgtaccagtttttggatactaaatgacagccttgtttctcccctttgaatcagcagacaccatggattatattctttttttcccttcagtagtgagcagtttgtatgtacagagaaaatggacttacaaaaacttgcagcagtagtttgttcttgctttaaaatttcgtttttggtttagattatggatgcatgaagtaagggagtgaatcagtttcttgtttatatttttttcaccttttaaacaaaaaattctttaaaatattttaatgcattcttttgaagaggtagatgtttggtacattttatggctcccagagcatatattcagttggtgcatgttgtggaagggggaattggaaattaaatgaaaacctatgactttggtcatgtcaatctgtaagacacatcagtaaaagggtattatgctctgttggttttgtttttttgttttgctttttttttttttttttcttttttgttttttggtgatgtggcttaaatgcaatagtttcttttttgggacatatttctgccaattaaagactagaagggcacaactttttttttaattaccatagagaagatacattaaaaaaaatcttctgatgttttgtagccataactaaattatggtaaaaatgtgcactattgtgaaaaggagcaacgtagttttgggttttttgttgtttgtttgttttgctttgttttttaagagattaaaatgtttctggataaggattagcttctcgaagtgtccatcattctgtgtagaagcttaaatatgtaatgtaaccaaactccagtattaaaaatctctcatgttgttttctttatacaaagcaagataacggcatataacactgccattacatggcaaaatgtttgctaccttagtttaaaaaacaatctcaaacaaaagacttgcttcaaggtgtttttaaatagcagtgattcagaattttttttaatgaaagtataattgcactaaccttcttcctgctgctctgattctgcatttgtggtacttgtgactacgttttttcaaatatagatagatttaagctgctaatttttttttttttagtaatcactactatatcatgtcttttactctgtttataatatcaagtattttcttaaagatatagatattaaaccttgtgctcatgcaacttagagtaacatatacagacaaatgattgcatgaggccatgtttatatgtgtgactaataaggcttgtcatgattaacataatccaggtatgtcatttctgaagagaatagtcatcaaatttatatctcgaagattttaattaaggaattgcttattgttgagcttagcaaattaataacactatttctgtcactaattattttgaggccttttagtactaaaattttaacctgtgttctaagtagaaactgatttaacccaagtaatgcagctttgattgatttcagcattcgttgctttgctatttttacaaaacagcattgattgaagcaagtcttggttttactaaggtagggtagcatttgctattggtaaagagaataaatacacttaatttcacaatacattgttatatgtaccccagttgttgttagtggggactatgatactgtaataatatttttaaaaatttacatcaagagaggcagtcattcacgatggttttgtgccagctctttttagggttttggatcacattagagatatttagaacatattaccctgtgacttacgtaggaaacctaatatgctgagtatctggcacttgaattcctgcttttattgctggaggtccacatctgtggttgacctctgttattgtttaaaaaaaataaataaaaattaaaaaaatctgtgcaataattttaaaatgtgctcccaggaatagacacaaatgttttgagtatcttttaagctgcattttcctttagtgatgcatttgtcaattgcactgaatttaaatctgaaagtcagaggtgattattgatagtacttttgtattttgatatggacagtttattcatttgcatacagttattgactttttcccagctgattaaaagatagtcaagaaattctgcaatatagctgccaaaatagacagctacatttttatgatattgtcatcttttctgttttttttttcttttttttctttagctattttacttaagcataatagccacaataggacatataaaagattataaatacagagctttattatcctgacgtcttgggtcttttaagtatatacttttctgaaaggtatccattttgtaggcttgggttcttcatgagcatacgattgtttatttttgctgctgttctcaacatcatcattgcctgctgatgtgccacgatgctgctccaatagacagcaataagattgtctctaatttgagcagtaacatgattgcaagagaccaagtttcacagcttgtaaagttctgtatttgggattcttgcttatttttccgcctgtgtttttctgagaacttattcctgatgatcaattgaatccagtagtttttctatgctatttgttgttgtataagctactgtaagaaacttatcataaggaaaaatagaaaggaaaacttgaatcaatactcattgattaaaatggaataaagaaagagcagctgccacttttaaacaacataaaggaatatctttttttgtctccgtgtaggaaatcccataagttcttatatttgttccagttcccatttcctgccattgaccagataacatcattgactttcaaatgacttttagaagtgataactcttaatttcctaatagatactagattgtattgaattctgttttaattattctctaggtaagtatgttttaggattaaataccttttacagatactgaaagtgcctccttttgtggtgtaaaaaacaaattatggtgcaaaaagtaatcactagattgaaatacatgaaggttttttgctttttgacatacgaaaatgtcaagagaaaggccaaagatttgtactttttcacttacaaagcactcctttttcccttaaacttctttctgtcaaattagatttaatgagagagtactatttttaaggagctatctgtttatgtagaatgattttgttaagagtaatgtaaactattattgagtagaggcctaaagaggactgtgcatttttgctatttaaaggaatcacaaatgatcatacttaagtgagcaaaaatgacaagttttactagctaagtagagaaataaatctcaaatgcagcgctacaattttcattatcttaagtacattgtacatttctacagaacctgtgattattctcgcatgataaggatggtacttgcatatggtgaattactactgttgacagtttccgcagaaatcctatttcagtggaccaacattgtggcatggcagcaaatgccaacattttgtggaatagcagcaaatctacaagagaccctggttggtttttcgttttgttttctttgttttttcccccttctcctgaatcagcagggatggaaggagggtagggaagttatgaattactccttccagtagtagctctgaagtgtcacatttaatatcagttttttttaaacatgattctagttaaatgtagaagagagaagaaagaggaagtgttcacttttttaatacactgatttagaaatttgatgtcttatatcagtagttctgaggtattgatagcttgctttatttctgcctttacgttgacagtgttgaagcagggtgaataactagggcatatattttttttttttttgtaagctgtttcatgatgttttctttggaatttccggataagttcaggaaaacattctgcatgttgtatctagtctgatgtacttatccatctcattacaaacaaaaacacacagactgcatttgtagctctgtaatccttgaatacggaagtaaattttcttctttcctgactttgacattgtagctatactgtttccatttttgtttttacaaatcctttgggtctaattctgtgagcctacctatagcactggattaaaatgtctgcatcatttctttagttatccagttaactttaaaactgttgtaaaagtgtaaaccagcccatgacaggtttttgtacatgttaaagaacttcattgttcagttttcatgattattgtgtaaggaagactgatgtagatgttctgtgctgtcctggaccatgttaattacacttacgacgtattttagttccacatcacaatgatttgtccccagtgacccttttatcctttctaggcacatttcttgttgttgttgttgttgcagttcccctttgcattgtattgctttgacaactgtaatttgaatcagatctgaaagaggtccagaataaaatatattttgatattatg

SEQ ID NO: 3022 - protein, 102 aa, Homo sapiens
MQRYNFHYLKYIVHFYRTCDYSRMIRMVLAYGELLLLTVSAEILFQWTNIVAWQQMPTFCGIAANLQETLVGFSFCFLCFFPLLLNQQGWKEGREVMNYSFQ

SEQ ID NO: 3023 - DNA, 6551 bp, Homo sapiens
gcgcggcagccgggccttgctccgggacgtgtttatttgtaacttagtgctttttatcgtcttaaggaggtatttggtggaggctctttgaagttgggttcaggagtgtagaattggcaaagttattgccagcttcctgcatcaacaacagcaacttgtgattggcggtgaccggatattcagttgcacatccccacatcaatgcactgccaatgggttatatcctgtgttgtgacctcatggtttaagtgggaataaagatgagtataagcagtgatgaggtcaacttcttggtatatagatacttgcaagagtcaggattttctcattcagcatttacctttggtatagaaagccatatcagtcagtccaatataaatggtgccctcgtcccacccgctgcattgatttctatcatccagaaaggtctacagtatgtagaagcagaagttagtattaatgaggatggtaccttgtttgatggtcgaccaatagagtctctgtccctgatagatgccgtaatgcctgatgtagtacaaacaagacaacaagcttatagagataagcttgcacagcaacaggcagcagctgctgcagctgccgcagctgcagccagccaacaaggatctgcaaaaaatggagaaaacacagcaaatggggaggagaatggagcacatactatagcaaataatcatactgatatgatggaagtggatggggatgttgaaatccctcctaataaagctgttgtgttgcggggccatgaatctgaagtttttatctgtgcctggaaccctgttagtgatctcctagcatcagggtctggagactcaacagcaagaatatggaatcttagtgagaacagcaccagtggctctacacagttagtacttagacattgtatacgagaaggagggcaagatgttccaagcaacaaggatgtcacatctctagattggaatagtgaaggtacacttctagcaactggttcctatgatgggtttgccagaatatggactaaagatggtaaccttgctagcaccttagggcagcataaaggccctatatttgcattaaaatggaataagaaaggaaatttcatcctaagtgctggagtagacaagactacaattatttgggacgcacatactggtgaagccaagcaacagtttccttttcattcagcaccagcattggatgttgattggcagagcaacaacacctttgcttcttgtagtacagatatgtgcattcatgtctgtaaattaggacaagacagacctattaaaacattccaaggacatacgaatgaagtaaatgctatcaaatgggacccaactggcaatctcttggcctcctgttctgacgacatgactttaaagatatggagtatgaaacaagacaattgtgtccatgatttgcaagcacataataaagaaatttatactatcaaatggagtccaacaggaccagggactaataatccaaatgccaaccttatgttagcaagtgcatcctttgattctactgttaggttatgggatgtagaccgagggatatgcatccataccttgacaaaacaccaagagcctgtgtacagtgtagctttcagtcctgatggcaggtatctggcaagtggttcttttgacaaatgtgtacacatctggaacacgcagacaggtgctctagttcacagctataggggaacaggtggaatatttgaagtttgctggaatgcagcaggagacaaagttggagccagtgcatcagatggttcagtttgtgtattagaccttcggaaatagcgctactagttggaagccatggaccgactatgaatgtgtacatagccaaaatgactgtccctgacccatgtactgctatagtcccacttgaaccatggccagtccactacagccaaatctaaaagaaatatatacatacagtgtatataaacaaaattgcaccctgaagatgacagagttttgtcacagcttgtgaattctgttcaccaagtgctggaatctaatctgctgtgcccctaaaatagcatttagaagttttggatatgaaaaacagaagagagaaaaatatacattataaaagcagaacatacatgtaccagtttttggatactaaatgacagccttgtttctcccctttgaatcagcagacaccatggattatattctttttttcccttcagtagtgagcagtttgtatgtacagagaaaatggacttacaaaaacttgcagcagtagtttgttcttgctttaaaatttcgtttttggtttagattatggatgcatgaagtaagggagtgaatcagtttcttgtttatatttttttcaccttttaaacaaaaaattctttaaaatattttaatgcattcttttgaagaggtagatgtttggtacattttatggctcccagagcatatattcagttggtgcatgttgtggaagggggaattggaaattaaatgaaaacctatgactttggtcatgtcaatctgtaagacacatcagtaaaagggtattatgctctgttggttttgtttttttgttttgctttttttttttttttttcttttttgttttttggtgatgtggcttaaatgcaatagtttcttttttgggacatatttctgccaattaaagactagaagggcacaactttttttttaattaccatagagaagatacattaaaaaaaatcttctgatgttttgtagccataactaaattatggtaaaaatgtgcactattgtgaaaaggagcaacgtagttttgggttttttgttgtttgtttgttttgctttgttttttaagagattaaaatgtttctggataaggattagcttctcgaagtgtccatcattctgtgtagaagcttaaatatgtaatgtaaccaaactccagtattaaaaatctctcatgttgttttctttatacaaagcaagataacggcatataacactgccattacatggcaaaatgtttgctaccttagtttaaaaaacaatctcaaacaaaagacttgcttcaaggtgtttttaaatagcagtgattcagaattttttttaatgaaagtataattgcactaaccttcttcctgctgctctgattctgcatttgtggtacttgtgactacgttttttcaaatatagatagatttaagctgctaatttttttttttttagtaatcactactatatcatgtcttttactctgtttataatatcaagtattttcttaaagatatagatattaaaccttgtgctcatgcaacttagagtaacatatacagacaaatgattgcatgaggccatgtttatatgtgtgactaataaggcttgtcatgattaacataatccaggtatgtcatttctgaagagaatagtcatcaaatttatatctcgaagattttaattaaggaattgcttattgttgagcttagcaaattaataacactatttctgtcactaattattttgaggccttttagtactaaaattttaacctgtgttctaagtagaaactgatttaacccaagtaatgcagctttgattgatttcagcattcgttgctttgctatttttacaaaacagcattgattgaagcaagtcttggttttactaaggtagggtagcatttgctattggtaaagagaataaatacacttaatttcacaatacattgttatatgtaccccagttgttgttagtggggactatgatactgtaataatatttttaaaaatttacatcaagagaggcagtcattcacgatggttttgtgccagctctttttagggttttggatcacattagagatatttagaacatattaccctgtgacttacgtaggaaacctaatatgctgagtatctggcacttgaattcctgcttttattgctggaggtccacatctgtggttgacctctgttattgtttaaaaaaaataaataaaaattaaaaaaatctgtgcaataattttaaaatgtgctcccaggaatagacacaaatgttttgagtatcttttaagctgcattttcctttagtgatgcatttgtcaattgcactgaatttaaatctgaaagtcagaggtgattattgatagtacttttgtattttgatatggacagtttattcatttgcatacagttattgactttttcccagctgattaaaagatagtcaagaaattctgcaatatagctgccaaaatagacagctacatttttatgatattgtcatcttttctgttttttttttcttttttttctttagctattttacttaagcataatagccacaataggacatataaaagattataaatacagagctttattatcctgacgtcttgggtcttttaagtatatacttttctgaaaggtatccattttgtaggcttgggttcttcatgagcatacgattgtttatttttgctgctgttctcaacatcatcattgcctgctgatgtgccacgatgctgctccaatagacagcaataagattgtctctaatttgagcagtaacatgattgcaagagaccaagtttcacagcttgtaaagttctgtatttgggattcttgcttatttttccgcctgtgtttttctgagaacttattcctgatgatcaattgaatccagtagtttttctatgctatttgttgttgtataagctactgtaagaaacttatcataaggaaaaatagaaaggaaaacttgaatcaatactcattgattaaaatggaataaagaaagagcagctgccacttttaaacaacataaaggaatatctttttttgtctccgtgtaggaaatcccataagttcttatatttgttccagttcccatttcctgccattgaccagataacatcattgactttcaaatgacttttagaagtgataactcttaatttcctaatagatactagattgtattgaattctgttttaattattctctaggtaagtatgttttaggattaaataccttttacagatactgaaagtgcctccttttgtggtgtaaaaaacaaattatggtgcaaaaagtaatcactagattgaaatacatgaaggttttttgctttttgacatacgaaaatgtcaagagaaaggccaaagatttgtactttttcacttacaaagcactcctttttcccttaaacttctttctgtcaaattagatttaatgagagagtactatttttaaggagctatctgtttatgtagaatgattttgttaagagtaatgtaaactattattgagtagaggcctaaagaggactgtgcatttttgctatttaaaggaatcacaaatgatcatacttaagtgagcaaaaatgacaagttttactagctaagtagagaaataaatctcaaatgcagcgctacaattttcattatcttaagtacattgtacatttctacagaacctgtgattattctcgcatgataaggatggtacttgcatatggtgaattactactgttgacagtttccgcagaaatcctatttcagtggaccaacattgtggcatggcagcaaatgccaacattttgtggaatagcagcaaatctacaagagaccctggttggtttttcgttttgttttctttgttttttcccccttctcctgaatcagcagggatggaaggagggtagggaagttatgaattactccttccagtagtagctctgaagtgtcacatttaatatcagttttttttaaacatgattctagttaaatgtagaagagagaagaaagaggaagtgttcacttttttaatacactgatttagaaatttgatgtcttatatcagtagttctgaggtattgatagcttgctttatttctgcctttacgttgacagtgttgaagcagggtgaataactagggcatatattttttttttttttgtaagctgtttcatgatgttttctttggaatttccggataagttcaggaaaacattctgcatgttgtatctagtctgatgtacttatccatctcattacaaacaaaaacacacagactgcatttgtagctctgtaatccttgaatacggaagtaaattttcttctttcctgactttgacattgtagctatactgtttccatttttgtttttacaaatcctttgggtctaattctgtgagcctacctatagcactggattaaaatgtctgcatcatttctttagttatccagttaactttaaaactgttgtaaaagtgtaaaccagcccatgacaggtttttgtacatgttaaagaacttcattgttcagttttcatgattattgtgtaaggaagactgatgtagatgttctgtgctgtcctggaccatgttaattacacttacgacgtattttagttccacatcacaatgatttgtccccagtgacccttttatcctttctaggcacatttcttgttgttgttgttgttgcagttcccctttgcattgtattgctttgacaactgtaatttgaatcagatctgaaagaggtccagaataaaatatattttgatattatg

SEQ ID NO: 3024 - protein, 514 aa, Homo sapiens; identical to SEQ ID NO: 282

SEQ ID NO: 3025 - DNA, 6552 bp, Homo sapiens
ggggttataattgcctctcaccccccggaggggttattttgggggtggttggaggcggtggcggcggcggcgaggaggggaatttccttgtgcctccattcccgggaggggggagcggcgttggaggccaccgtttccagcatcaacaacagcaacttgtgattggcggtgaccggatattcagttgcacatccccacatcaatgcactgccaatgggttatatcctgtgttgtgacctcatggtttaagtgggaataaagatgagtataagcagtgatgaggtcaacttcttggtatatagatacttgcaagagtcaggattttctcattcagcatttacctttggtatagaaagccatatcagtcagtccaatataaatggtgccctcgtcccacccgctgcattgatttctatcatccagaaaggtctacagtatgtagaagcagaagttagtattaatgaggatggtaccttgtttgatggtcgaccaatagagtctctgtccctgatagatgccgtaatgcctgatgtagtacaaacaagacaacaagcttatagagataagcttgcacagcaacaggcagcagctgctgcagctgccgcagctgcagccagccaacaaggatctgcaaaaaatggagaaaacacagcaaatggggaggagaatggagcacatactatagcaaataatcatactgatatgatggaagtggatggggatgttgaaatccctcctaataaagctgttgtgttgcggggccatgaatctgaagtttttatctgtgcctggaaccctgttagtgatctcctagcatcagggtctggagactcaacagcaagaatatggaatcttagtgagaacagcaccagtggctctacacagttagtacttagacattgtatacgagaaggagggcaagatgttccaagcaacaaggatgtcacatctctagattggaatagtgaaggtacacttctagcaactggttcctatgatgggtttgccagaatatggactaaagatggtaaccttgctagcaccttagggcagcataaaggccctatatttgcattaaaatggaataagaaaggaaatttcatcctaagtgctggagtagacaagactacaattatttgggacgcacatactggtgaagccaagcaacagtttccttttcattcagcaccagcattggatgttgattggcagagcaacaacacctttgcttcttgtagtacagatatgtgcattcatgtctgtaaattaggacaagacagacctattaaaacattccaaggacatacgaatgaagtaaatgctatcaaatgggacccaactggcaatctcttggcctcctgttctgacgacatgactttaaagatatggagtatgaaacaagacaattgtgtccatgatttgcaagcacataataaagaaatttatactatcaaatggagtccaacaggaccagggactaataatccaaatgccaaccttatgttagcaagtgcatcctttgattctactgttaggttatgggatgtagaccgagggatatgcatccataccttgacaaaacaccaagagcctgtgtacagtgtagctttcagtcctgatggcaggtatctggcaagtggttcttttgacaaatgtgtacacatctggaacacgcagacaggtgctctagttcacagctataggggaacaggtggaatatttgaagtttgctggaatgcagcaggagacaaagttggagccagtgcatcagatggttcagtttgtgtattagaccttcggaaatagcgctactagttggaagccatggaccgactatgaatgtgtacatagccaaaatgactgtccctgacccatgtactgctatagtcccacttgaaccatggccagtccactacagccaaatctaaaagaaatatatacatacagtgtatataaacaaaattgcaccctgaagatgacagagttttgtcacagcttgtgaattctgttcaccaagtgctggaatctaatctgctgtgcccctaaaatagcatttagaagttttggatatgaaaaacagaagagagaaaaatatacattataaaagcagaacatacatgtaccagtttttggatactaaatgacagccttgtttctcccctttgaatcagcagacaccatggattatattctttttttcccttcagtagtgagcagtttgtatgtacagagaaaatggacttacaaaaacttgcagcagtagtttgttcttgctttaaaatttcgtttttggtttagattatggatgcatgaagtaagggagtgaatcagtttcttgtttatatttttttcaccttttaaacaaaaaattctttaaaatattttaatgcattcttttgaagaggtagatgtttggtacattttatggctcccagagcatatattcagttggtgcatgttgtggaagggggaattggaaattaaatgaaaacctatgactttggtcatgtcaatctgtaagacacatcagtaaaagggtattatgctctgttggttttgtttttttgttttgctttttttttttttttttcttttttgttttttggtgatgtggcttaaatgcaatagtttcttttttgggacatatttctgccaattaaagactagaagggcacaactttttttttaattaccatagagaagatacattaaaaaaaatcttctgatgttttgtagccataactaaattatggtaaaaatgtgcactattgtgaaaaggagcaacgtagttttgggttttttgttgtttgtttgttttgctttgttttttaagagattaaaatgtttctggataaggattagcttctcgaagtgtccatcattctgtgtagaagcttaaatatgtaatgtaaccaaactccagtattaaaaatctctcatgttgttttctttatacaaagcaagataacggcatataacactgccattacatggcaaaatgtttgctaccttagtttaaaaaacaatctcaaacaaaagacttgcttcaaggtgtttttaaatagcagtgattcagaattttttttaatgaaagtataattgcactaaccttcttcctgctgctctgattctgcatttgtggtacttgtgactacgttttttcaaatatagatagatttaagctgctaatttttttttttttagtaatcactactatatcatgtcttttactctgtttataatatcaagtattttcttaaagatatagatattaaaccttgtgctcatgcaacttagagtaacatatacagacaaatgattgcatgaggccatgtttatatgtgtgactaataaggcttgtcatgattaacataatccaggtatgtcatttctgaagagaatagtcatcaaatttatatctcgaagattttaattaaggaattgcttattgttgagcttagcaaattaataacactatttctgtcactaattattttgaggccttttagtactaaaattttaacctgtgttctaagtagaaactgatttaacccaagtaatgcagctttgattgatttcagcattcgttgctttgctatttttacaaaacagcattgattgaagcaagtcttggttttactaaggtagggtagcatttgctattggtaaagagaataaatacacttaatttcacaatacattgttatatgtaccccagttgttgttagtggggactatgatactgtaataatatttttaaaaatttacatcaagagaggcagtcattcacgatggttttgtgccagctctttttagggttttggatcacattagagatatttagaacatattaccctgtgacttacgtaggaaacctaatatgctgagtatctggcacttgaattcctgcttttattgctggaggtccacatctgtggttgacctctgttattgtttaaaaaaaataaataaaaattaaaaaaatctgtgcaataattttaaaatgtgctcccaggaatagacacaaatgttttgagtatcttttaagctgcattttcctttagtgatgcatttgtcaattgcactgaatttaaatctgaaagtcagaggtgattattgatagtacttttgtattttgatatggacagtttattcatttgcatacagttattgactttttcccagctgattaaaagatagtcaagaaattctgcaatatagctgccaaaatagacagctacatttttatgatattgtcatcttttctgttttttttttcttttttttctttagctattttacttaagcataatagccacaataggacatataaaagattataaatacagagctttattatcctgacgtcttgggtcttttaagtatatacttttctgaaaggtatccattttgtaggcttgggttcttcatgagcatacgattgtttatttttgctgctgttctcaacatcatcattgcctgctgatgtgccacgatgctgctccaatagacagcaataagattgtctctaatttgagcagtaacatgattgcaagagaccaagtttcacagcttgtaaagttctgtatttgggattcttgcttatttttccgcctgtgtttttctgagaacttattcctgatgatcaattgaatccagtagtttttctatgctatttgttgttgtataagctactgtaagaaacttatcataaggaaaaatagaaaggaaaacttgaatcaatactcattgattaaaatggaataaagaaagagcagctgccacttttaaacaacataaaggaatatctttttttgtctccgtgtaggaaatcccataagttcttatatttgttccagttcccatttcctgccattgaccagataacatcattgactttcaaatgacttttagaagtgataactcttaatttcctaatagatactagattgtattgaattctgttttaattattctctaggtaagtatgttttaggattaaataccttttacagatactgaaagtgcctccttttgtggtgtaaaaaacaaattatggtgcaaaaagtaatcactagattgaaatacatgaaggttttttgctttttgacatacgaaaatgtcaagagaaaggccaaagatttgtactttttcacttacaaagcactcctttttcccttaaacttctttctgtcaaattagatttaatgagagagtactatttttaaggagctatctgtttatgtagaatgattttgttaagagtaatgtaaactattattgagtagaggcctaaagaggactgtgcatttttgctatttaaaggaatcacaaatgatcatacttaagtgagcaaaaatgacaagttttactagctaagtagagaaataaatctcaaatgcagcgctacaattttcattatcttaagtacattgtacatttctacagaacctgtgattattctcgcatgataaggatggtacttgcatatggtgaattactactgttgacagtttccgcagaaatcctatttcagtggaccaacattgtggcatggcagcaaatgccaacattttgtggaatagcagcaaatctacaagagaccctggttggtttttcgttttgttttctttgttttttcccccttctcctgaatcagcagggatggaaggagggtagggaagttatgaattactccttccagtagtagctctgaagtgtcacatttaatatcagttttttttaaacatgattctagttaaatgtagaagagagaagaaagaggaagtgttcacttttttaatacactgatttagaaatttgatgtcttatatcagtagttctgaggtattgatagcttgctttatttctgcctttacgttgacagtgttgaagcagggtgaataactagggcatatattttttttttttttgtaagctgtttcatgatgttttctttggaatttccggataagttcaggaaaacattctgcatgttgtatctagtctgatgtacttatccatctcattacaaacaaaaacacacagactgcatttgtagctctgtaatccttgaatacggaagtaaattttcttctttcctgactttgacattgtagctatactgtttccatttttgtttttacaaatcctttgggtctaattctgtgagcctacctatagcactggattaaaatgtctgcatcatttctttagttatccagttaactttaaaactgttgtaaaagtgtaaaccagcccatgacaggtttttgtacatgttaaagaacttcattgttcagttttcatgattattgtgtaaggaagactgatgtagatgttctgtgctgtcctggaccatgttaattacacttacgacgtattttagttccacatcacaatgatttgtccccagtgacccttttatcctttctaggcacatttcttgttgttgttgttgttgcagttcccctttgcattgtattgctttgacaactgtaatttgaatcagatctgaaagaggtccagaataaaatatattttgatattatg

SEQ ID NO: 3026 - protein, 514 aa, Homo sapiens; identical to SEQ ID NO: 282

SEQ ID NO: 3027 - DNA, 414 bp, Homo sapiens
ataaacatacttacttcaactttacattactcctaggatgtacgagaaattagtatgattaacagccaagaagcctgagagaattctgaaaactagaagcaaagatgaaaaggaagcacaacaggtacagaagagaatgaagacattctctgcttcaaaacttgtcagttttgcctacttgtgagtgccactaaaggcctatgaaacccttccactgtgtgacactaatgttgtatgggggccttatatccaaagttcaacaactgacagtgattgctctggaccaggatctacatcaccccacctcatgcatgccaaaagtattctcacagactcacacaactaagaatgaaggtagagtggtggactgggaagaacatcaaattcatagtcttacaatgatttattagaagt

SEQ ID NO: 3028 - protein, 69 aa, Homo sapiens [sequence omitted]

SEQ ID NO: 3029 - DNA, 548 bp, Homo sapiens
aattgcctctcaccccccggaggggttattttgggggtggttggaggcggtggcggcggcggcgaggaggggaatttccttgtgcctccattcccgggaggggggagcggcgttggaggccaccgtttccagggttatatcctgtgttgtgacctcatggtttaagtgggaataaagatgagtataagcagtgatgaggtcaacttcttggtatatagatacttgcaagagtcaggattttctcattcagcatttacctttggtatagaaagccatatcagtcagtccaatataaatggtgccctcgtcccacccgctgcattgatttctatcatccagaaaggtctacagtatgtagaagcagaagttagtattaatgaggatggtaccttgtttgatggtcgaccaatagagtctctgtccctgatagatgccgtaatgcctgatgtagtacaaacaagacaacaagcttatagagataagcttgcacagcaacaggcagcagctgctgcagctgccgcagctgcagccagccaacaaggatctgc

SEQ ID NO: 3030 - protein, 122 aa, Homo sapiens
MSISSDEVNFLVYRYLQESGFSHSAFTFGIESHISQSNINGALVPPAALISIIQKGLQYVEAEVSINEDGTLFDGRPIESLSLIDAVMPDVVQTRQQAYRDKLAQQQAAAAAAAAAAASQQG

SEQ ID NO: 3031 - DNA, 514 bp, Homo sapiens
aaggaaaaacttggccaagcatggtggctcacgcctgtaatcccagcactctgggaagctgaggcgggtggatcacgaggtcaggagtctcgaattcctgatctcacaagtgatccgcctgcctcggcctccccaaagtgctgggattataggcatgaggcactgcaccctgccgtaaagtgcaattagatttaaaattacttgtgtctaggtaaaagaagagtgaaggcaaaaaaggatgttatgaatccctcatattattttaacaagaacaatgttcagtaaggggaagaaaaatgtttgaggagatggatatcccacttatcctaacttgatcattttatatttatacaagtatcaaaatatcacatgtaccctaaaataagtacaactactatataccaaccttttaaattttaagagaaaaaaacactgttgagggtaggtagggaggtagtagaggtaactgtatataatcccactaagcactctggcattttcagagaaaataaat

SEQ ID NO: 3032 - protein, 62 aa, Homo sapiens
KEKLGQAWWLTPVIPALWEAEAGGSRGQESRIPDLTSDPPASASPKCWDYRHEALHPAVKCN

SEQ ID NO: 3033 - DNA, 394 bp, Homo sapiens
gaaatgggagcaggaattggggagataggggaggggagggacaagctgacccaactatatatcaaattggaggtgggcaggggggcagattacacatgaggacttactttaaaacgtaatacttagctgtaatcccactgagacgtggacaaaaagagaaaataaatatgacatactacacagcacaggttcaacccagattattattgcatttctgagggtcatgggaaaaccataccattttgaaccaatacctacaaatttactagcacatctgtgcaaatatatagaaatggcttcagtgtccttagctagactgtaagcaagtttgctgtaatcttggtctccttcatctctaacacacactaacatacatacatacacacacacacac

SEQ ID NO: 3034 - protein, 32 aa, Homo sapiens
MGKPYHFEPIPTNLLAHLCKYIEMASVSLARL

SEQ ID NO: 3035 - DNA, 442 bp, Homo sapiens
atgggaagcgcaggaaattcagagagcccacgagccaaagtgtcctgcctgcattccagctgtttccatccatgtccatgtcaactggcatctggaactactcgtagcagcatccactcaatataccagcctggaagacaacggagctgtcattctgttaaaaaattaagagaagtacgcagaacctgcctttttctaaatgagaagctttggaagcgactggacacttttggccattgcagtccacaggtagcctctctgggggcaatagacagactttttcacttcttgtatttactccccaaatgcttgattacatagcttgtcacctgtcaggggggccagctagctagttgctgggttgagtggttaatccaatgatttgtatagctggctcactaaggaaatcataggtactcaatatatagctactgaacaattc

SEQ ID NO: 3036 - protein, 106 aa, Homo sapiens
MGSAGNSESPRAKVSCLHSSCFHPCPCQLASGTTRSSIHSIYQPGRQRSCHSVKKLREVRRTCLFLNEKLWKRLDTFGHCSPQVASLGAIDRLFHFLYLLPKCLIT

SEQ ID NO: 3037 - DNA, 434 bp, Homo sapiens
agcctgccagagacgtggtagctgccctgccaagagctatcctgggagggctattgaacgagctttgaggctgcagccagcttccagcagtcccagtgcccagaaacagcacattccaggccggctgtgcatgcatgtttgctggggcgcgtgccaggtgggggtgctgggaaggggggggcaactagaggtcacctttgtaatgaccaccttgctgcccccgttctctggcatgtgctgactggtagcttgagaaccctctactagaatcagtatcatagtctttctagatagcagtctgtatgtgctgatcgcagaattcataaccaggatttttttttttttacctataaagcccctgaaatggaatttcaacgtgtgtctgtatgtgcatatttaacaggagcttaataaatattttccaaatgcataaa

SEQ ID NO: 3038 - protein, 36 aa, Homo sapiens
MHVCWGACQVGVLGRGGQLEVTFVMTTLLPPFSGMC

SEQ ID NO: 3039 - DNA, 1180 bp, Homo sapiens
cccagagggagagtagcaaagggttaaaatccttttgattgacgttgtagcctccggtgccctgggctcaggcgcgcgccattggccgccagaccttgtgcctggcggccaatgggggggcgcggtccacgagcggtgccgcgtgtctcctcctcccattggctgaaagttactgtgggaaagaaagtttgggaagtttcacacgagccgttcgcgtgcagtcccagatatatatagaggccgccagggcctagggatcacacaggatccggagctggtgctgataacagcggaatcccccgtctacctctctccttggtcctggaacagcgctactgatcaccaagtagccacaaaatataataaaccctcagcacttgctcagtagttttgtgaaagtctcaagtaaaagagacacaaacaaaaaattctttttcgtgaagaactccaaaaataaaattctctagagataaaaaaaaaaaaaaaaggaaaatgccagctgatataatggagaaaaattcctcgtccccggtggctgctaccccagccagtgtcaacacgacaccggataaaccaaagacagcatctgagcacagaaagtcatcaaagcctattatggagaaaagacgaagagcaagaataaatgaaagtctgagccagctgaaaacactgattttggatgctctgaagaaagatgtaagtggggaaatgctgctcgctcttttaattaaaaaacaaacactttctcagctactaagagtgaaaccccccgccctgcggggtctggcactcgctggtactgcgttctcccaggcgggagggcccggccttattcgctggggtccagagataatgcttgcgctccgtggccgggaggagggacccccagcactctgaagcagctgacacggggctcactttcctttcttgcctactctatgcagagctcgcggcattccaagctggagaaggcggacattctggaaatgacagtgaagcacctccggaacctgcagcgggcgcagatgacgggtgagggcggctcgccgcgtccccctgtgcgggcgtcccgctcgcctcgcggtgatttcttccagacttccgcccgtggttgtgagaggcattcagctacattttactgccttggctcactcttgcgttcccacggtctggggcttat

SEQ ID NO: 3040 - protein, 134 aa, Homo sapiens
MPADIMEKNSSSPVAATPASVNTTPDKPKTASEHRKSSKPIMEKRRRARINESLSQLKTLILDALKKDVSGEMLLALLIKKQTLSQLLRVKPPALRGLALAGTAFSQAGGPGLIRWGPEIMLALRGREEGPPAL

SEQ ID NO: 3041 - DNA, 1616 bp, Homo sapiens
cccagagggagagtagcaaagggttaaaatccttttgattgacgttgtagcctccggtgccctgggctcaggcgcgcgccattggccgccagaccttgtgcctggcggccaatgggggggcgcggtccacgagcggtgccgcgtgtctcctcctcccattggctgaaagttactgtgggaaagaaagtttgggaagtttcacacgagccgttcgcgtgcagtcccagatatatatagaggccgccagggcctagggatcacacaggatccggagctggtgctgataacagcggaatcccccgtctacctctctccttggtcctggaacagcgctactgatcaccaagtagccacaaaatataataaaccctcagcacttgctcagtagttttgtgaaagtctcaagtaaaagagacacaaacaaaaaattctttttcgtgaagaactccaaaaataaaattctctagagataaaaaaaaaaaaaaaaggaaaatgccagctgatataatggagaaaaattcctcgtccccggtggctgctaccccagccagtgtcaacacgacaccggataaaccaaagacagcatctgagcacagaaagtcatcaaagcctattatggagaaaagacgaagagcaagaataaatgaaagtctgagccagctgaaaacactgattttggatgctctgaagaaagatagctcgcggcattccaagctggagaaggcggacattctggaaatgacagtgaagcacctccggaacctgcagcgggcgcagatgacggctgcgctgagcacagacccaagtgtgctggggaagtaccgagccggcttcagcgagtgcatgaacgaggtgacccgcttcctgtccacgtgcgagggcgttaataccgaggtgcgcactcggctgctcggccacctggccaactgcatgacccagatcaatgccatgacctaccccgggcagccgcacccccctcccggcggcgccccctgcaagctgggcagccaggctggagaggcggctaaggtgtttggaggcttccaggtggtaccggctcccgatggccagtttgctttcctcattcccaacggggccttcgcgcacagcggccctgtcatccccgtctacaccagcaacagcggcacctccgtgggccccaacgcagtgtcaccttccagcggcccctcgcttacggcggactccatgtggaggccgtggcggaactgagggggctcaggccacccctcctcctaaactccccaacccacctctcttccctccggactctaaacaggaacttgaatactgggagagaagaggacttttttgattaagtggttactttgtgtttttttaatttctaagaagttactttttgtagagagagctgtattaagtgactgaccatgcactatatttgtatatattttatatgttcatattggattgcgcctttgtattataaaagctcagatgacatttcgttttttacacgagatttcttttttatgtgatgccaaagatgtttgaaaatgctcttaaaatatcttcctttggggaagtttatttgagaaaatataataaaagaaaaaagtaaaggcttttatgtcttc

SEQ ID NO: 3042 - protein, 245 aa, Homo sapiens
MPADIMEKNSSSPVAATPASVNTTPDKPKTASEHRKSSKPIMEKRRRARINESLSQLKTLILDALKKDSSRHSKLEKADILEMTVKHLRNLQRAQMTAALSTDPSVLGKYRAGFSECMNEVTRFLSTCEGVNTEVRTRLLGHLANCMTQINAMTYPGQPHPPPGGAPCKLGSQAGEAAKVFGGFQVVPAPDGQFAFLIPNGAFAHSGPVIPVYTSNSGTSVGPNAVSPSSGPSLTADSMWRPWRN

SEQ ID NO: 3043 - DNA, 1721 bp, Homo sapiens
cccagagggagagtagcaaagggttaaaatccttttgattgacgttgtagcctccggtgccctgggctcaggcgcgcgccattggccgccagaccttgtgcctggcggccaatgggggggcgcggtccacgagcggtgccgcgtgtctcctcctcccattggctgaaagttactgtgggaaagaaagtttgggaagtttcacacgagccgttcgcgtgcagtcccagatatatatagaggccgccagggcctagggatcacacaggatccggagctggtgctgataacagcggaatcccccgtctacctctctccttggtcctggaacagcgctactgatcaccaagtagccacaaaatataataaaccctcagcacttgctcagtagttttgtgaaagtctcaagtaaaagagacacaaacaaaaaattctttttcgtgaagaactccaaaaataaaattctctagagataaaaaaaaaaaaaaaaggaaaatgccagctgatataatggagaaaaattcctcgtccccggtggctgctaccccagccagtgtcaacacgacaccggataaaccaaagacagcatctgagcacagaaagtcatcaaagcctattatggagaaaagacgaagagcaagaataaatgaaagtctgagccagctgaaaacactgattttggatgctctgaagaaagatagctcgcggcattccaagctggagaaggcggacattctggaaatgacagtgaagcacctccggaacctgcagcgggcgcagatgacggctgcgctgagcacagacccaagtgtgctggggaagtaccgagccggcttcagcgagtgcatgaacgaggtgacccgcttcctgtccacgtgcgagggcgttaataccgaggtgcgcactcggctgctcggccacctggccaactgcatgacccagatcaatgccatgacctaccccgggcagccgcaccccgccttgcaggcgccgccaccgcccccaccgggacccggcggcccccagcacgcgccgttcgcgccgccgccgccactcgtgcccatccccgggggcgcggcgccccctcccggcggcgccccctgcaagctgggcagccaggctggagaggcggctaaggtgtttggaggcttccaggtggtaccggctcccgatggccagtttgctttcctcattcccaacggggccttcgcgcacagcggccctgtcatccccgtctacaccagcaacagcggcacctccgtgggccccaacgcagtgtcaccttccagcggcccctcgcttacggcggactccatgtggaggccgtggcggaactgagggggctcaggccacccctcctcctaaactccccaacccacctctcttccctccggactctaaacaggaacttgaatactgggagagaagaggacttttttgattaagtggttactttgtgtttttttaatttctaagaagttactttttgtagagagagctgtattaagtgactgaccatgcactatatttgtatatattttatatgttcatattggattgcgcctttgtattataaaagctcagatgacatttcgttttttacacgagatttcttttttatgtgatgccaaagatgtttgaaaatgctcttaaaatatcttcctttggggaagtttatttgagaaaatataataaaagaaaaaagtaaaggcttttatgtcttc

SEQ ID NO: 3044 - protein, 280 aa, Homo sapiens; identical to SEQ ID NO: 284

SEQ ID NO: 3045 - DNA, 1728 bp, Homo sapiens
cccagagggagagtagcaaagggttaaaatccttttgattgacgttgtagcctccggtgccctgggctcaggcgcgcgccattggccgccagaccttgtgcctggcggccaatgggggggcgcggtccacgagcggtgccgcgtgtctcctcctcccattggctgaaagttactgtgggaaagaaagtttgggaagtttcacacgagccgttcgcgtgcagtcccagatatatatagaggccgccagggcctagggatcacacaggatccggagctggtgctgataacagcggaatcccccgtctacctctctccttggtcctggaacagcgctactgatcaccaagtagccacaaaatataataaaccctcagcacttgctcagtagttttgtgaaagtctcaagtaaaagagacacaaacaaaaaattctttttcgtgaagaactccaaaaataaaattctctagagataaaaaaaaaaaaaaaaggaaaatgccagctgatataatggagaaaaattcctcgtccccggtggctgctaccccagccagtgtcaacacgacaccggataaaccaaagacagcatctgagcacagaaagtcatcaaagcctattatggagaaaagacgaagagcaagaataaatgaaagtctgagccagctgaaaacactgattttggatgctctgaagaaagatagctcgcggcattccaagctggagaaggcggacattctggaaatgacagtgaagcacctccggaacctgcagcgggcgcagatgacggctgcgctgagcacagacccaagtgtgctggggaagtaccgagccggcttcagcgagtgcatgaacgaggtgacccgcttcctgtccacgtgcgagggcgttaataccgaggtgcgcactcggctgctcggccacctggccaactgcatgacccagatcaatgccatgacctaccccgggcagccgcacccccctcccggcggcgccccctgcaagctgggcagccaggctggagaggcggctaaggtgtttggaggcttccaggtggtaccggctcccgatggccagtttgctttcctcattcccaacggggccttcgcgcacagcggccctgtcatccccgtctacaccagcaacagcggcacctccgtgggccccaacgcagtgtcaccttccagcggcccctcgcttacggcggactccatgtggaggccgtggcggaactgagggggctcaggccacccctcctcctaaactccccaacccacctctcttccctccggactctaaacaggaacttgaatactgggagagaagaggacttttttgattaagtggttactttgtgtttttttaatttctaagaagttactttttgtagagagagctgtattaagtgactgaccatgcactatatttgtatatattttatatgttcatattggattgcgcctttgtattataaaagctcagatgacatttcgttttttacacgagatttcttttttatgtgatgccaaagatgtttgaaaatgctcttaaaatatcttcctttggggaagtttatttgagaaaatataataaaagaaaaaagtaaaggcttttatgtcttcgaactgattcttccagaatatgtaaaaaggcttttggtggaatttgaattacatgtaattggtaattcaggaattgactcttttgttattaaaagaacatttgtaaaaatcc

SEQ ID NO: 3046 - protein, 245 aa, Homo sapiens; identical to SEQ ID NO: 3042

SEQ ID NO: 3047 - DNA, 1833 bp, Homo sapiens
cccagagggagagtagcaaagggttaaaatccttttgattgacgttgtagcctccggtgccctgggctcaggcgcgcgccattggccgccagaccttgtgcctggcggccaatgggggggcgcggtccacgagcggtgccgcgtgtctcctcctcccattggctgaaagttactgtgggaaagaaagtttgggaagtttcacacgagccgttcgcgtgcagtcccagatatatatagaggccgccagggcctagggatcacacaggatccggagctggtgctgataacagcggaatcccccgtctacctctctccttggtcctggaacagcgctactgatcaccaagtagccacaaaatataataaaccctcagcacttgctcagtagttttgtgaaagtctcaagtaaaagagacacaaacaaaaaattctttttcgtgaagaactccaaaaataaaattctctagagataaaaaaaaaaaaaaaaggaaaatgccagctgatataatggagaaaaattcctcgtccccggtggctgctaccccagccagtgtcaacacgacaccggataaaccaaagacagcatctgagcacagaaagtcatcaaagcctattatggagaaaagacgaagagcaagaataaatgaaagtctgagccagctgaaaacactgattttggatgctctgaagaaagatagctcgcggcattccaagctggagaaggcggacattctggaaatgacagtgaagcacctccggaacctgcagcgggcgcagatgacggctgcgctgagcacagacccaagtgtgctggggaagtaccgagccggcttcagcgagtgcatgaacgaggtgacccgcttcctgtccacgtgcgagggcgttaataccgaggtgcgcactcggctgctcggccacctggccaactgcatgacccagatcaatgccatgacctaccccgggcagccgcaccccgccttgcaggcgccgccaccgcccccaccgggacccggcggcccccagcacgcgccgttcgcgccgccgccgccactcgtgcccatccccgggggcgcggcgccccctcccggcggcgccccctgcaagctgggcagccaggctggagaggcggctaaggtgtttggaggcttccaggtggtaccggctcccgatggccagtttgctttcctcattcccaacggggccttcgcgcacagcggccctgtcatccccgtctacaccagcaacagcggcacctccgtgggccccaacgcagtgtcaccttccagcggcccctcgcttacggcggactccatgtggaggccgtggcggaactgagggggctcaggccacccctcctcctaaactccccaacccacctctcttccctccggactctaaacaggaacttgaatactgggagagaagaggacttttttgattaagtggttactttgtgtttttttaatttctaagaagttactttttgtagagagagctgtattaagtgactgaccatgcactatatttgtatatattttatatgttcatattggattgcgcctttgtattataaaagctcagatgacatttcgttttttacacgagatttcttttttatgtgatgccaaagatgtttgaaaatgctcttaaaatatcttcctttggggaagtttatttgagaaaatataataaaagaaaaaagtaaaggcttttatgtcttcgaactgattcttccagaatatgtaaaaaggcttttggtggaatttgaattacatgtaattggtaattcaggaattgactcttttgttattaaaagaacatttgtaaaaatcc

SEQ ID NO: 3048 - protein, 280 aa, Homo sapiens; identical to SEQ ID NO: 284

SEQ ID NO: 3049 - DNA, 809 bp, Homo sapiens
ctggcccgcagctgcgctgagcacagacccaagtgtgctggggaagtaccgagccggcttcagcgagtgcatgaacgaggtgacccgcttcctgtccacgtgcgagggcgttaataccgaggtgcgcactcggctgctcggccacctggccaactgcatgacccagatcaatgccatgacctaccccgggcagccgcaccccgccttgcaggcgccgccaccgcccccaccgggacccggcggcccccagcacgcgccgttcgcgccgccgccgccactcgtgcccatccccgggggcgcggcgccccctcccggcggcgccccctgcaagctgggcagccaggctggagaggcggctaaggtgtttggaggcttccaggtggtaccggctcccgatggccagtttgctttcctcattcccaacggggccttcgcgcacagcggccccctcctcctaaactccccaacccacctctcttccctccggactctaaacaggaacttgaatactgggagagaagaggacttttttgattaagtggttactttgtgtttttttaatttctaagaagttactttttgtagagagagctgtattaagtgactgaccatgcactatatttgtatatattttatatgttcatattggattgcgcctttgtattataaaagctcagatgacatttcgttttttacacgagatttcttttttatgtgatgccaaagatgtttgaaaatgctcttaaaatatcttcctttggggaagtttatttgagaaaatataataaaagaaaaaagtaaaggctttt

SEQ ID NO: 3050 - protein, 155 aa, Homo sapiens
MNEVTRFLSTCEGVNTEVRTRLLGHLANCMTQINAMTYPGQPHPALQAPPPPPPGPGGPQHAPFAPPPPLVPIPGGAAPPPGGAPCKLGSQAGEAAKVFGGFQVVPAPDGQFAFLIPNGAFAHSGPLLLNSPTHLSSLRTLNRNLNTGREEDFFD

SEQ ID NO: 3051 - DNA, 929 bp, Homo sapiens
ctggcccgcagctgcgctgagcacagacccaagtgtgctggggaagtaccgagccggcttcagcgagtgcatgaacgaggtgacccgcttcctgtccacgtgcgagggcgttaataccgaggtgcgcactcggctgctcggccacctggccaactgcatgacccagatcaatgccatgacctaccccgggcagccgcaccccgccttgcaggcgccgccaccgcccccaccgggacccggcggcccccagcacgcgccgttcgcgccgccgccgccactcgtgcccatccccgggggcgcggcgccccctcccggcggcgccccctgcaagctgggcagccaggctggagaggcggctaaggtgtttggaggcttccaggtggtaccggctcccgatggccagtttgctttcctcattcccaacggggccttcgcgcacagcggccccctcctcctaaactccccaacccacctctcttccctccggactctaaacaggaacttgaatactgggagagaagaggacttttttgattaagtggttactttgtgtttttttaatttctaagaagttactttttgtagagagagctgtattaagtgactgaccatgcactatatttgtatatattttatatgttcatattggattgcgcctttgtattataaaagctcagatgacatttcgttttttacacgagatttcttttttatgtgatgccaaagatgtttgaaaatgctcttaaaatatcttcctttggggaagtttatttgagaaaatataataaaagaaaaaagtaaaggcttttatgtcttcgaactgattcttccagaatatgtaaaaaggcttttggtggaatttgaattacatgtaattggtaattcaggaattgactcttttgttattaaaagaacatttgtaaaaatcc

SEQ ID NO: 3052 - protein, 155 aa, Homo sapiens; identical to SEQ ID NO: 3050

SEQ ID NO: 3053 - DNA, 413 bp, Homo sapiens
acctactttgcagtgtttgaggatgaaaggagctgagacagggtctctctctgctgtgcaggctgaagtgcagtgatgtggtcacggctcactgcagcatcaacctcttggactcaagcgatcctctcgtgttggctgcctgagtaactaggactacaggaaccgtgcgaatagttgaggcaagaacaacatttgacgttatcctttttgaactgctcctggccttaaactgtcccaaaatgtctcttctttggatggaatctccttgttctgcactcaaaatgaaacctgaaagagactacgaaacacactcaagcaactccagagctcttgagacaattacgtgattgtgctctgccttcaacctgggcctccccggctgcaaaacaaggaaacaaaaccaaaaatcacac

SEQ ID NO: 3054 - protein, 35 aa, Homo sapiens
MSLLWMESPCSALKMKPERDYETHSSNSRALETIT

SEQ ID NO: 3055 - DNA, 871 bp, Homo sapiens
cttgaacacttttgctgatgaacttgacttctgccttcaaagcgattttaacgagaggaggtgcggaagacctacttaaaacctgagagtctcgaataggagaggcgctttcagatcagcccgagtcttctgcagcgcacaggagctagtcgtactgaaaagaatgaagttggacttgtccaggcgagtttcggacagtgctgggctgccctgctctgatctcctgggtgtcttcacctcctctggttcctaagtcggctgctgcaccagcacccatcaaactctcctggaagaggaagtgacagctcaccggtagcctagaaggcccctgtgggcagaagcatggacttactcctcctcatggagatgcggctgagccatatttccttggcacctctctggaaccttcgacaaccaccacctcagacactaaccagactttaggtccattcctttcatggctaaaatgagacagtccacaatgttgattttatttgtaggggatgtcaggattccagaaaagcagacttggaaagcaacaaaacgttaacttgcagctcactgaggcccttacacttgttctgggcacctctgtatgttaaaagaagtccaatatctttagctgctggttataggtggccatatgtttctgcacagaaatggggctccccttgctagactaattttctaatttttcctcaagcttcattgattcatattcttctacttgaccctgactgtcaggaccaacaacaccaaataacaccaaagtctcttgctcctgtcctcagaacctctcagaggcatcctctgccctgttggagccattttatttcaggttgatccttaattaaattcagcgagatgcagg

SEQ ID NO: 3056 - protein, 33 aa, Homo sapiens
MDLLLLMEMRLSHISLAPLWNLRQPPPQTLTRL

SEQ ID NO: 3057 - DNA, 909 bp, Homo sapiens
ctgaaaagccgacctacatgcagagaaaggcgggaggggctgctgggagaagtctgctggagcttgttcatgctgagaggttgggggtgtgatttgaggtgcggaagacctacttaaaacctgagagtctcgaataggagaggcgctttcagatcagcccgagtcttctgcagcgcacaggagctagtcgtactgaaaagaatgaagttggacttgtccaggcgagtttcggacagtgctgggctgccctgctctgatctcctgggtgtcttcacctcctctggttcctaagtcggctgctgcaccagcacccatcaaactctcctggaagaggaagtgacagctcaccggtagcctagaaggcccctgtgggcagaagcatggacttactcctcctcatggagatgcggctgagccatatttccttggcacctctctggaaccttcgacaaccaccacctcagacactaaccagactttaggtccattcctttcatggctaaaatgagacagtccacaatgttgattttatttgtaggggatgtcaggattccagaaaagcagacttggaaagcaacaaaacgttaacttgcagctcactgaggcccttacacttgttctgggcacctctgtatgttaaaagaagtccaatatctttagctgctggttataggtggccatatgtttctgcacagaaatggggctccccttgctagactaattttctaatttttcctcaagcttcattgattcatattcttctacttgaccctgactgtcaggaccaacaacaccaaataacaccaaagtctcttgctcctgtcctcagaacctctcagaggcatcctctgccctgttggagccattttatttcaggttgatccttaattaaattcagcgagatgcagg

SEQ ID NO: 3058 - protein, 33 aa, Homo sapiens; identical to SEQ ID NO: 3056

SEQ ID NO: 3059 - DNA, 4143 bp, Homo sapiens
agaggaactgcggggagagcgtggtggtgccggtgcccgtccaacccaaactttttagtctgagtggtggcccgcgacgccccgcttgggtcttctttccatccactggggatgggggcgggggtgggggtagccggcggccgtggttccggagcgggagtcggagggatggtgccttgagtgaatgacccccttggagaacattcttccgcatccctcgcctcaagccagcctcagacagaaaactgaagattcagcagatccagtgcttcctgctcctcttctgcccaggaacacgcttgccttccccaaggcttccagaagctctgaggcaggaggcaccaagttctacctcatgtttggaggatcttgctagctatggccctcgtactcggctccctgttgctgctggggctgtgcgggaactccttttcaggagggcagccttcatccacagatgctcctaaggcttggaattatgaattgcctgcaacaaattatgagacccaagactcccataaagctggacccattggcattctctttgaactagtgcatatctttctctatgtggtacagccgcgtgatttcccagaagatactttgagaaaattcttacagaaggcatatgaatccaaaattgattatgacaagccagaaactgtaatcttaggtctaaagattgtctactatgaagcagggattattctatgctgtgtcctggggctgctgtttattattctgatgcctctggtggggtatttcttttgtatgtgtcgttgctgtaacaaatgtggtggagaaatgcaccagcgacagaaggaaaatgggcccttcctgaggaaatgctttgcaatctccctgttggtgatttgtataataataagcattggcatcttctatggttttgtggcaaatcaccaggtaagaacccggatcaaaaggagtcggaaactggcagatagcaatttcaaggacttgcgaactctcttgaatgaaactccagagcaaatcaaatatatattggcccagtacaacactaccaaggacaaggcgttcacagatctgaacagtatcaattcagtgctaggaggcggaattcttgaccgactgagacccaacatcatccctgttcttgatgagattaagtccatggcaacagcgatcaaggagaccaaagaggcgttggagaacatgaacagcaccttgaagagcttgcaccaacaaagtacacagcttagcagcagtctgaccagcgtgaaaactagcctgcggtcatctctcaatgaccctctgtgcttggtgcatccatcaagtgaaacctgcaacagcatcagattgtctctaagccagctgaatagcaaccctgaactgaggcagcttccacccgtggatgcagaacttgacaacgttaataacgttcttaggacagatttggatggcctggtccaacagggctatcaatcccttaatgatatacctgacagagtacaacgccaaaccacgactgtcgtagcaggtatcaaaagggtcttgaattccattggttcagatatcgacaatgtaactcagcgtcttcctattcaggatatactctcagcattctctgtttatgttaataacactgaaagttacatccacagaaatttacctacattggaagagtatgattcatactggtggctgggtggcctggtcatctgctctctgctgaccctcatcgtgattttttactacctgggcttactgtgtggcgtgtgcggctatgacaggcatgccaccccgaccacccgaggctgtgtctccaacaccggaggcgtcttcctcatggttggagttggattaagtttcctcttttgctggatattgatgatcattgtggttcttacctttgtctttggtgcaaatgtggaaaaactgatctgtgaaccttacacgagcaaggaattattccgggttttggatacaccctacttactaaatgaagactgggaatactatctctctgggaagctatttaataaatcaaaaatgaagctcacttttgaacaagtttacagtgactgcaaaaaaaatagaggcacttacggcactcttcacctgcagaacagcttcaatatcagtgaacatctcaacattaatgagcatactggaagcataagcagtgaattggaaagtctgaaggtaaatcttaatatctttctgttgggtgcagcaggaagaaaaaaccttcaggattttgctgcttgtggaatagacagaatgaattatgacagctacttggctcagactggtaaatcccccgcaggagtgaatcttttatcatttgcatatgatctagaagcaaaagcaaacagtttgcccccaggaaatttgaggaactccctgaaaagagatgcacaaactattaaaacaattcaccagcaacgagtccttcctatagaacaatcactgagcactctataccaaagcgtcaagatacttcaacgcacagggaatggattgttggagagagtaactaggattctagcttctctggattttgctcagaacttcatcacaaacaatacttcctctgttattattgaggaaactaagaagtatgggagaacaataataggatattttgaacattatctgcagtggatcgagttctctatcagtgagaaagtggcatcgtgcaaacctgtggccaccgctctagatactgctgttgatgtctttctgtgtagctacattatcgaccccttgaatttgttttggtttggcataggaaaagctactgtatttttacttccggctctaatttttgcggtaaaactggctaagtactatcgtcgaatggattcggaggacgtgtacgatgatgttgaaactatacccatgaaaaatatggaaaatggtaataatggttatcataaagatcatgtatatggtattcacaatcctgttatgacaagcccatcacaacattgatagctgatgttgaaactgcttgagcatcaggatactcaaagtggaaaggatcacagatttttggtagtttctgggtctacaaggactttccaaatccaggagcaacgccagtggcaacgtagtgactcaggcgggcaccaaggcaacggcaccattggtctctgggtagtgctttaagaatgaacacaatcacgttatagtccatggtccatcactattcaaggatgactccctcccttcctgtctatttttgttttttacttttttacactgagtttctatttagacactacaacatatggggtgtttgttcccattggatgcatttctatcaaaactctatcaaatgtgatggctagattctaacatattgccatgtgtggagtgtgctgaacacacaccagtttacaggaaagatgcattttgtgtacagtaaacggtgtatataccttttgttaccacagagttttttaaacaaatgagtattataggactttcttctaaatgagctaaataagtcaccattgacttcttggtgctgttgaaaataatccattttcactaaaagtgtgtgaaacctacagcatattcttcacgcagagattttcatctattatactttatcaaagattggccatgttccacttggaaatggcatgcaaaagcaatcatagagaaacctgcgtaactccatctgacaaattcaaaagagagagagagatcttgagagagaaatgctgttcgttcaaaagtggagttgttttaacagatgccaattacggtgtacagtttaacagagttttctgttgcattacgataaacattaattggagtgcagctaacatgagtatcatcagactagtatcaagtgttctaaaatgaaatatgagaagatcctgtcacaattcttagatctggtgtccagcatggatgaaacctttgagtttggtccctaaatttgcatgaaagcacaaggtaaatattcatttgcttcaggagtttcatgttggatctgtcattatcaaaagtgatcagcaatgaagaactggtcggacaaaatttaacgttgatgtaatgaaattccagatgtaggcattccccccaggtcttttcatgtgcagattgcagttctgattcatttgaataaaaaggaacttggaaaacatg

SEQ ID NO: 3060 - protein, 865 aa, Homo sapiens; identical to SEQ ID NO: 286

SEQ ID NO: 3061 - DNA, 4018 bp, Homo sapiens
ggcgagctaagggaagggcggcggcagcggtgactagggcgggagcaggagcgggagccgggtgcacgggatggtgccttgagtgaatgacccccttggagaacattcttccgcatccctcgcctcaagccagcctcagacagaaaactgaagattcagcagatccagtgcttcctgctcctcttctgcccaggaacacgcttgccttccccaaggcttccagaagctctgaggcaggaggcaccaagttctacctcatgtttggaggatcttgctagctatggccctcgtactcggctccctgttgctgctggggctgtgcgggaactccttttcaggagggcagccttcatccacagatgctcctaaggcttggaattatgaattgcctgcaacaaattatgagacccaagactcccataaagctggacccattggcattctctttgaactagtgcatatctttctctatgtggtacagccgcgtgatttcccagaagatactttgagaaaattcttacagaaggcatatgaatccaaaattgattatgacaagattgtctactatgaagcagggattattctatgctgtgtcctggggctgctgtttattattctgatgcctctggtggggtatttcttttgtatgtgtcgttgctgtaacaaatgtggtggagaaatgcaccagcgacagaaggaaaatgggcccttcctgaggaaatgctttgcaatctccctgttggtgatttgtataataataagcattggcatcttctatggttttgtggcaaatcaccaggtaagaacccggatcaaaaggagtcggaaactggcagatagcaatttcaaggacttgcgaactctcttgaatgaaactccagagcaaatcaaatatatattggcccagtacaacactaccaaggacaaggcgttcacagatctgaacagtatcaattcagtgctaggaggcggaattcttgaccgactgagacccaacatcatccctgttcttgatgagattaagtccatggcaacagcgatcaaggagaccaaagaggcgttggagaacatgaacagcaccttgaagagcttgcaccaacaaagtacacagcttagcagcagtctgaccagcgtgaaaactagcctgcggtcatctctcaatgaccctctgtgcttggtgcatccatcaagtgaaacctgcaacagcatcagattgtctctaagccagctgaatagcaaccctgaactgaggcagcttccacccgtggatgcagaacttgacaacgttaataacgttcttaggacagatttggatggcctggtccaacagggctatcaatcccttaatgatatacctgacagagtacaacgccaaaccacgactgtcgtagcaggtatcaaaagggtcttgaattccattggttcagatatcgacaatgtaactcagcgtcttcctattcaggatatactctcagcattctctgtttatgttaataacactgaaagttacatccacagaaatttacctacattggaagagtatgattcatactggtggctgggtggcctggtcatctgctctctgctgaccctcatcgtgattttttactacctgggcttactgtgtggcgtgtgcggctatgacaggcatgccaccccgaccacccgaggctgtgtctccaacaccggaggcgtcttcctcatggttggagttggattaagtttcctcttttgctggatattgatgatcattgtggttcttacctttgtctttggtgcaaatgtggaaaaactgatctgtgaaccttacacgagcaaggaattattccgggttttggatacaccctacttactaaatgaagactgggaatactatctctctgggaagctatttaataaatcaaaaatgaagctcacttttgaacaagtttacagtgactgcaaaaaaaatagaggcacttacggcactcttcacctgcagaacagcttcaatatcagtgaacatctcaacattaatgagcatactggaagcataagcagtgaattggaaagtctgaaggtaaatcttaatatctttctgttgggtgcagcaggaagaaaaaaccttcaggattttgctgcttgtggaatagacagaatgaattatgacagctacttggctcagactggtaaatcccccgcaggagtgaatcttttatcatttgcatatgatctagaagcaaaagcaaacagtttgcccccaggaaatttgaggaactccctgaaaagagatgcacaaactattaaaacaattcaccagcaacgagtccttcctatagaacaatcactgagcactctataccaaagcgtcaagatacttcaacgcacagggaatggattgttggagagagtaactaggattctagcttctctggattttgctcagaacttcatcacaaacaatacttcctctgttattattgaggaaactaagaagtatgggagaacaataataggatattttgaacattatctgcagtggatcgagttctctatcagtgagaaagtggcatcgtgcaaacctgtggccaccgctctagatactgctgttgatgtctttctgtgtagctacattatcgaccccttgaatttgttttggtttggcataggaaaagctactgtatttttacttccggctctaatttttgcggtaaaactggctaagtactatcgtcgaatggattcggaggacgtgtacgatgatgttgaaactatacccatgaaaaatatggaaaatggtaataatggttatcataaagatcatgtatatggtattcacaatcctgttatgacaagcccatcacaacattgatagctgatgttgaaactgcttgagcatcaggatactcaaagtggaaaggatcacagatttttggtagtttctgggtctacaaggactttccaaatccaggagcaacgccagtggcaacgtagtgactcaggcgggcaccaaggcaacggcaccattggtctctgggtagtgctttaagaatgaacacaatcacgttatagtccatggtccatcactattcaaggatgactccctcccttcctgtctatttttgttttttacttttttacactgagtttctatttagacactacaacatatggggtgtttgttcccattggatgcatttctatcaaaactctatcaaatgtgatggctagattctaacatattgccatgtgtggagtgtgctgaacacacaccagtttacaggaaagatgcattttgtgtacagtaaacggtgtatataccttttgttaccacagagttttttaaacaaatgagtattataggactttcttctaaatgagctaaataagtcaccattgacttcttggtgctgttgaaaataatccattttcactaaaagtgtgtgaaacctacagcatattcttcacgcagagattttcatctattatactttatcaaagattggccatgttccacttggaaatggcatgcaaaagcaatcatagagaaacctgcgtaactccatctgacaaattcaaaagagagagagagatcttgagagagaaatgctgttcgttcaaaagtggagttgttttaacagatgccaattacggtgtacagtttaacagagttttctgttgcattacgataaacattaattggagtgcagctaacatgagtatcatcagactagtatcaagtgttctaaaatgaaatatgagaagatcctgtcacaattcttagatctggtgtccagcatggatgaaacctttgagtttggtccctaaatttgcatgaaagcacaaggtaaatattcatttgcttcaggagtttcatgttggatctgtcattatcaaaagtgatcagcaatgaagaactggtcggacaaaatttaacgttgatgtaatgaaattccagatgtaggcattccccccaggtcttttcatgtgcagattgcagttctgattcatttgaataaaaaggaacttggaaaacatg

SEQ ID NO: 3062 - protein, 856 aa, Homo sapiens
MALVLGSLLLLGLCGNSFSGGQPSSTDAPKAWNYELPATNYETQDSHKAGPIGILFELVHIFLYVVQPRDFPEDTLRKFLQKAYESKIDYDKIVYYEAGIILCCVLGLLFIILMPLVGYFFCMCRCCNKCGGEMHQRQKENGPFLRKCFAISLLVICIIISIGIFYGFVANHQVRTRIKRSRKLADSNFKDLRTLLNETPEQIKYILAQYNTTKDKAFTDLNSINSVLGGGILDRLRPNIIPVLDEIKSMATAIKETKEALENMNSTLKSLHQQSTQLSSSLTSVKTSLRSSLNDPLCLVHPSSETCNSIRLSLSQLNSNPELRQLPPVDAELDNVNNVLRTDLDGLVQQGYQSLNDIPDRVQRQTTTVVAGIKRVLNSIGSDIDNVTQRLPIQDILSAFSVYVNNTESYIHRNLPTLEEYDSYWWLGGLVICSLLTLIVIFYYLGLLCGVCGYDRHATPTTRGCVSNTGGVFLMVGVGLSFLFCWILMIIVVLTFVFGANVEKLICEPYTSKELFRVLDTPYLLNEDWEYYLSGKLFNKSKMKLTFEQVYSDCKKNRGTYGTLHLQNSFNISEHLNINEHTGSISSELESLKVNLNIFLLGAAGRKNLQDFAACGIDRMNYDSYLAQTGKSPAGVNLLSFAYDLEAKANSLPPGNLRNSLKRDAQTIKTIHQQRVLPIEQSLSTLYQSVKILQRTGNGLLERVTRILASLDFAQNFITNNTSSVIIEETKKYGRTIIGYFEHYLQWIEFSISEKVASCKPVATALDTAVDVFLCSYIIDPLNLFWFGIGKATVFLLPALIFAVKLAKYYRRMDSEDVYDDVETIPMKNMENGNNGYHKDHVYGIHNPVMTSPSQH

SEQ ID NO: 3063 - DNA, 4311 bp, Homo sapiens
tttgttttgttttgttttgttttgttttgttttaaattgcattgggattaggcaacagaagggtctaatgcggccgggatgagacaggagagtttttaggagggtagctgcattctaagtaagggactctgcggggggaaaagaggcgcaagcgttgcaagaagggagtgcagggggttgagcaggcacctctacaggaaatggatgctgtccaggtgctggtgggcgccccagggctacgtggcgaagcagctcagccggtccaatcagagtgcgtccagggctcgggtttcgcgatctttaagtgactgaggcagatccccacgcggcacctggccatgctctcagctctcccgccgcgggatggtgccttgagtgaatgacccccttggagaacattcttccgcatccctcgcctcaagccagcctcagacagaaaactgaagattcagcagatccagtgcttcctgctcctcttctgcccaggaacacgcttgccttccccaaggcttccagaagctctgaggcaggaggcaccaagttctacctcatgtttggaggatcttgctagctatggccctcgtactcggctccctgttgctgctggggctgtgcgggaactccttttcaggagggcagccttcatccacagatgctcctaaggcttggaattatgaattgcctgcaacaaattatgagacccaagactcccataaagctggacccattggcattctctttgaactagtgcatatctttctctatgtggtacagccgcgtgatttcccagaagatactttgagaaaattcttacagaaggcatatgaatccaaaattgattatgacaagattgtctactatgaagcagggattattctatgctgtgtcctggggctgctgtttattattctgatgcctctggtggggtatttcttttgtatgtgtcgttgctgtaacaaatgtggtggagaaatgcaccagcgacagaaggaaaatgggcccttcctgaggaaatgctttgcaatctccctgttggtgatttgtataataataagcattggcatcttctatggttttgtggcaaatcaccaggtaagaacccggatcaaaaggagtcggaaactggcagatagcaatttcaaggacttgcgaactctcttgaatgaaactccagagcaaatcaaatatatattggcccagtacaacactaccaaggacaaggcgttcacagatctgaacagtatcaattcagtgctaggaggcggaattcttgaccgactgagacccaacatcatccctgttcttgatgagattaagtccatggcaacagcgatcaaggagaccaaagaggcgttggagaacatgaacagcaccttgaagagcttgcaccaacaaagtacacagcttagcagcagtctgaccagcgtgaaaactagcctgcggtcatctctcaatgaccctctgtgcttggtgcatccatcaagtgaaacctgcaacagcatcagattgtctctaagccagctgaatagcaaccctgaactgaggcagcttccacccgtggatgcagaacttgacaacgttaataacgttcttaggacagatttggatggcctggtccaacagggctatcaatcccttaatgatatacctgacagagtacaacgccaaaccacgactgtcgtagcaggtatcaaaagggtcttgaattccattggttcagatatcgacaatgtaactcagcgtcttcctattcaggatatactctcagcattctctgtttatgttaataacactgaaagttacatccacagaaatttacctacattggaagagtatgattcatactggtggctgggtggcctggtcatctgctctctgctgaccctcatcgtgattttttactacctgggcttactgtgtggcgtgtgcggctatgacaggcatgccaccccgaccacccgaggctgtgtctccaacaccggaggcgtcttcctcatggttggagttggattaagtttcctcttttgctggatattgatgatcattgtggttcttacctttgtctttggtgcaaatgtggaaaaactgatctgtgaaccttacacgagcaaggaattattccgggttttggatacaccctacttactaaatgaagactgggaatactatctctctgggaagctatttaataaatcaaaaatgaagctcacttttgaacaagtttacagtgactgcaaaaaaaatagaggcacttacggcactcttcacctgcagaacagcttcaatatcagtgaacatctcaacattaatgagcatactggaagcataagcagtgaattggaaagtctgaaggtaaatcttaatatctttctgttgggtgcagcaggaagaaaaaaccttcaggattttgctgcttgtggaatagacagaatgaattatgacagctacttggctcagactggtaaatcccccgcaggagtgaatcttttatcatttgcatatgatctagaagcaaaagcaaacagtttgcccccaggaaatttgaggaactccctgaaaagagatgcacaaactattaaaacaattcaccagcaacgagtccttcctatagaacaatcactgagcactctataccaaagcgtcaagatacttcaacgcacagggaatggattgttggagagagtaactaggattctagcttctctggattttgctcagaacttcatcacaaacaatacttcctctgttattattgaggaaactaagaagtatgggagaacaataataggatattttgaacattatctgcagtggatcgagttctctatcagtgagaaagtggcatcgtgcaaacctgtggccaccgctctagatactgctgttgatgtctttctgtgtagctacattatcgaccccttgaatttgttttggtttggcataggaaaagctactgtatttttacttccggctctaatttttgcggtaaaactggctaagtactatcgtcgaatggattcggaggacgtgtacgatgatgttgaaactatacccatgaaaaatatggaaaatggtaataatggttatcataaagatcatgtatatggtattcacaatcctgttatgacaagcccatcacaacattgatagctgatgttgaaactgcttgagcatcaggatactcaaagtggaaaggatcacagatttttggtagtttctgggtctacaaggactttccaaatccaggagcaacgccagtggcaacgtagtgactcaggcgggcaccaaggcaacggcaccattggtctctgggtagtgctttaagaatgaacacaatcacgttatagtccatggtccatcactattcaaggatgactccctcccttcctgtctatttttgttttttacttttttacactgagtttctatttagacactacaacatatggggtgtttgttcccattggatgcatttctatcaaaactctatcaaatgtgatggctagattctaacatattgccatgtgtggagtgtgctgaacacacaccagtttacaggaaagatgcattttgtgtacagtaaacggtgtatataccttttgttaccacagagttttttaaacaaatgagtattataggactttcttctaaatgagctaaataagtcaccattgacttcttggtgctgttgaaaataatccattttcactaaaagtgtgtgaaacctacagcatattcttcacgcagagattttcatctattatactttatcaaagattggccatgttccacttggaaatggcatgcaaaagcaatcatagagaaacctgcgtaactccatctgacaaattcaaaagagagagagagatcttgagagagaaatgctgttcgttcaaaagtggagttgttttaacagatgccaattacggtgtacagtttaacagagttttctgttgcattacgataaacattaattggagtgcagctaacatgagtatcatcagactagtatcaagtgttctaaaatgaaatatgagaagatcctgtcacaattcttagatctggtgtccagcatggatgaaacctttgagtttggtccctaaatttgcatgaaagcacaaggtaaatattcatttgcttcaggagtttcatgttggatctgtcattatcaaaagtgatcagcaatgaagaactggtcggacaaaatttaacgttgatgtaatgaaattccagatgtaggcattccccccaggtcttttcatgtgcagattgcagttctgattcatttgaataaaaaggaacttggaaaacatg

SEQ ID NO: 3064 - protein, 856 aa, Homo sapiens; identical to SEQ ID NO: 3062

SEQ ID NO: 3065 - DNA, 4338 bp, Homo sapiens
tttgttttgttttgttttgttttgttttgttttaaattgcattgggattaggcaacagaagggtctaatgcggccgggatgagacaggagagtttttaggagggtagctgcattctaagtaagggactctgcggggggaaaagaggcgcaagcgttgcaagaagggagtgcagggggttgagcaggcacctctacaggaaatggatgctgtccaggtgctggtgggcgccccagggctacgtggcgaagcagctcagccggtccaatcagagtgcgtccagggctcgggtttcgcgatctttaagtgactgaggcagatccccacgcggcacctggccatgctctcagctctcccgccgcgggatggtgccttgagtgaatgacccccttggagaacattcttccgcatccctcgcctcaagccagcctcagacagaaaactgaagattcagcagatccagtgcttcctgctcctcttctgcccaggaacacgcttgccttccccaaggcttccagaagctctgaggcaggaggcaccaagttctacctcatgtttggaggatcttgctagctatggccctcgtactcggctccctgttgctgctggggctgtgcgggaactccttttcaggagggcagccttcatccacagatgctcctaaggcttggaattatgaattgcctgcaacaaattatgagacccaagactcccataaagctggacccattggcattctctttgaactagtgcatatctttctctatgtggtacagccgcgtgatttcccagaagatactttgagaaaattcttacagaaggcatatgaatccaaaattgattatgacaagccagaaactgtaatcttaggtctaaagattgtctactatgaagcagggattattctatgctgtgtcctggggctgctgtttattattctgatgcctctggtggggtatttcttttgtatgtgtcgttgctgtaacaaatgtggtggagaaatgcaccagcgacagaaggaaaatgggcccttcctgaggaaatgctttgcaatctccctgttggtgatttgtataataataagcattggcatcttctatggttttgtggcaaatcaccaggtaagaacccggatcaaaaggagtcggaaactggcagatagcaatttcaaggacttgcgaactctcttgaatgaaactccagagcaaatcaaatatatattggcccagtacaacactaccaaggacaaggcgttcacagatctgaacagtatcaattcagtgctaggaggcggaattcttgaccgactgagacccaacatcatccctgttcttgatgagattaagtccatggcaacagcgatcaaggagaccaaagaggcgttggagaacatgaacagcaccttgaagagcttgcaccaacaaagtacacagcttagcagcagtctgaccagcgtgaaaactagcctgcggtcatctctcaatgaccctctgtgcttggtgcatccatcaagtgaaacctgcaacagcatcagattgtctctaagccagctgaatagcaaccctgaactgaggcagcttccacccgtggatgcagaacttgacaacgttaataacgttcttaggacagatttggatggcctggtccaacagggctatcaatcccttaatgatatacctgacagagtacaacgccaaaccacgactgtcgtagcaggtatcaaaagggtcttgaattccattggttcagatatcgacaatgtaactcagcgtcttcctattcaggatatactctcagcattctctgtttatgttaataacactgaaagttacatccacagaaatttacctacattggaagagtatgattcatactggtggctgggtggcctggtcatctgctctctgctgaccctcatcgtgattttttactacctgggcttactgtgtggcgtgtgcggctatgacaggcatgccaccccgaccacccgaggctgtgtctccaacaccggaggcgtcttcctcatggttggagttggattaagtttcctcttttgctggatattgatgatcattgtggttcttacctttgtctttggtgcaaatgtggaaaaactgatctgtgaaccttacacgagcaaggaattattccgggttttggatacaccctacttactaaatgaagactgggaatactatctctctgggaagctatttaataaatcaaaaatgaagctcacttttgaacaagtttacagtgactgcaaaaaaaatagaggcacttacggcactcttcacctgcagaacagcttcaatatcagtgaacatctcaacattaatgagcatactggaagcataagcagtgaattggaaagtctgaaggtaaatcttaatatctttctgttgggtgcagcaggaagaaaaaaccttcaggattttgctgcttgtggaatagacagaatgaattatgacagctacttggctcagactggtaaatcccccgcaggagtgaatcttttatcatttgcatatgatctagaagcaaaagcaaacagtttgcccccaggaaatttgaggaactccctgaaaagagatgcacaaactattaaaacaattcaccagcaacgagtccttcctatagaacaatcactgagcactctataccaaagcgtcaagatacttcaacgcacagggaatggattgttggagagagtaactaggattctagcttctctggattttgctcagaacttcatcacaaacaatacttcctctgttattattgaggaaactaagaagtatgggagaacaataataggatattttgaacattatctgcagtggatcgagttctctatcagtgagaaagtggcatcgtgcaaacctgtggccaccgctctagatactgctgttgatgtctttctgtgtagctacattatcgaccccttgaatttgttttggtttggcataggaaaagctactgtatttttacttccggctctaatttttgcggtaaaactggctaagtactatcgtcgaatggattcggaggacgtgtacgatgatgttgaaactatacccatgaaaaatatggaaaatggtaataatggttatcataaagatcatgtatatggtattcacaatcctgttatgacaagcccatcacaacattgatagctgatgttgaaactgcttgagcatcaggatactcaaagtggaaaggatcacagatttttggtagtttctgggtctacaaggactttccaaatccaggagcaacgccagtggcaacgtagtgactcaggcgggcaccaaggcaacggcaccattggtctctgggtagtgctttaagaatgaacacaatcacgttatagtccatggtccatcactattcaaggatgactccctcccttcctgtctatttttgttttttacttttttacactgagtttctatttagacactacaacatatggggtgtttgttcccattggatgcatttctatcaaaactctatcaaatgtgatggctagattctaacatattgccatgtgtggagtgtgctgaacacacaccagtttacaggaaagatgcattttgtgtacagtaaacggtgtatataccttttgttaccacagagttttttaaacaaatgagtattataggactttcttctaaatgagctaaataagtcaccattgacttcttggtgctgttgaaaataatccattttcactaaaagtgtgtgaaacctacagcatattcttcacgcagagattttcatctattatactttatcaaagattggccatgttccacttggaaatggcatgcaaaagcaatcatagagaaacctgcgtaactccatctgacaaattcaaaagagagagagagatcttgagagagaaatgctgttcgttcaaaagtggagttgttttaacagatgccaattacggtgtacagtttaacagagttttctgttgcattacgataaacattaattggagtgcagctaacatgagtatcatcagactagtatcaagtgttctaaaatgaaatatgagaagatcctgtcacaattcttagatctggtgtccagcatggatgaaacctttgagtttggtccctaaatttgcatgaaagcacaaggtaaatattcatttgcttcaggagtttcatgttggatctgtcattatcaaaagtgatcagcaatgaagaactggtcggacaaaatttaacgttgatgtaatgaaattccagatgtaggcattccccccaggtcttttcatgtgcagattgcagttctgattcatttgaataaaaaggaacttggaaaacatg

SEQ ID NO: 3066 - protein, 865 aa, Homo sapiens; identical to SEQ ID NO: 286

SEQ ID NO: 3067 - DNA, 851 bp, Homo sapiens
ctttctcgtggatctggaccccaggagttcccaggcatagagaggaggggtgccagtggagtgtaagcaccatgacaacaggaactgtgtcttgaccactgttgacttccaagcacctcaaataggacctgtcacatagaagtttcaatcaatatttgttgagtgaatgaagacaacaggtgtcaacttagcttctactacagttctaagacttttgcgtcaagaagtggggacactccagatgcaatgtgccaacgacctcacagacacaggttgtggatagcagcagacatggaggtggaggctgggcggccagtgatgctgtgagtcagttctgcaggctgtacgggaagcacggcaccagtatctgcttctggtgaggactcaggagcttaaaatcatggtggaagcagggagagcaagcatgtcacaagcacttaagccaagtgcacaatcccaaaaacctgatggcaccacgaccgtccggaatatctggacccttgacaaggaatactttgtgaggtgaacagaatacttgccaacatcacacagctactaagcgggcagatcaaggatcaaactcctgcttccaacttcttcctggcccctggaccttaactcaaggctcagtttagcctcagctggtgacagctgggctccaggatctgcaaaggctcccccagtccatctgaccacaagaattacccaggcctggggacacttgtaagaatactcacctgaacctgcagaatcacagctccagaagatgaacctgggattctcattctgtttatttgtttgtttattcaagggtcccaggtgaatcttatcaccaaataagttttggaaat

SEQ ID NO: 3068 - protein, 41 aa, Homo sapiens
MVEAGRASMSQALKPSAQSQKPDGTTTVRNIWTLDKEYFVR

SEQ ID NO: 3069 - DNA, 749 bp, Homo sapiens
cttggcctgggatcgcctgagggccctgtgaagcttcagagcagtgcctgaaacactctgaggacagaaactcagggaccaacacacctgtttccacagagctggcccctgcctctgcttcctggaagcactgcaagagtgcctgcagttatagccgggagatgaccacagtgagaagccagagaagaggtaaacagcaaccttgggcaagcaggaaggcagaagcagatgcttggaaccacccagaggttttctaccacagaatgtgtaactttgattttcacacacaaaatggtctcaacagtggttgaaatatacaaaaacagaaaccccaatccagcccttagcctgatgctctgcatgctgttaagaagggggtgttgaatgattccatttatttgaaatacccaggagagggagaaggttcatttgagaacttcccctgctgaagctttccctgaccctctgggaggggccggaccctccgtctgtggtcccacaacccctgaggaggaggaggcactcatcaggtcccttggcgccttgcagcccttttcttgggcctgccttttacctccatcctccactccactgatggctcagagcccagaatcctgtcttcatcctggcaacagtcccttcagggcccagcaggatgggggaatgaataaatgtgcctgtttctgaacataatcattaaattctttacctgtaatgtggacattaaaggtgaatcatttcccccctta

SEQ ID NO: 3070 - protein, 51 aa, Homo sapiens
MLGTTQRFSTTECVTLIFTHKMVSTVVEIYKNRNPNPALSLMLCMLLRRGC

SEQ ID NO: 3071 - DNA, 3444 bp, Homo sapiens
aggcggggagggggccggccggaggcagaggctggagggaggcggcggggacagtttgttgtgctcggaacatggcgggcgtcggcgacgcggccgctccgggagaaggcggcggtggcggcgtggacggcccgcagcgggacggccgcggcgaggcggagcagccgggcggcagcggcggacaggggcccccgccggcgcctcagctcacagagacgctgggcttctacgagagcgaccggcggcgggagaggcgccggggccgcacagagctttcattgttgaggttcctcagtgctgaactaacaagagggtacttccttgaacataatgaggccaagtatacagaaagaagagaaagagtatacacttgtttgcgaataccaagagaattggaaaagctgatggtttttggaatctttctgtgcctggatgcgtttttgtatgtgttcaccctgcttcctttaagagttttcctggcactattcaggctcctcactttgccttgctatggcttaagggacagacgtttgcttcagcctgcccaggtgtgtgacattttgaagggtgtcattttggtaatctgctattttatgatgcactatgttgactactccatgatgtaccacctgataagggggcagtccgtcatcaagctctacatcatctacaacatgctggaggtagctgatcgtctgttttcatcttttggacaagacatattagatgctctctattggacagcaacagagcctaaagaaagaaaaagagcccacattggggtgattcctcactttttcatggctgttctctatgtctttttgcatgcaattcttataatggttcaagcaacaactctcaatgtagcttttaactcacacaacaagtctttgcttactatcatgatgtctaataattttgttgaaattaaaggaagtgttttcaagaagtttgaaaagaacaatctctttcaaatgtcaaatagcgatattaaggaacgattcacaaattatgtgcttttactgatagtgtgtctaagaaacatggaacagttttcttggaatccagatcatctctgggtgttgtttccagatgtctgtatggtaattgcatcagaaattgccgtggatattgtaaaacatgcctttattactaaattcaatgacattactgcagatgtctacagtgaatatagagccagtcttgcttttgaccttgttagcagccgacagaaaaatgcatacactgattacagtgactctgtagcacggaggatgggctttattcctctcccactagctgttttactcatcagagttgtaacaagctcaattaaagtgcaaggaatcctgtcttatgcctgtgtcatactcttctattttgggttgatatccctgaaagtacttaatagcatcgtgctgttggggaaatcgtgccagtatgtgaaggaagccaaaatggaagagaagctgtcgaatcctcccgcaacctgcactccaggcaagccgtccagtaaatcacagaacaaatgtaaaccctctcaaggcctttccacagaagaaaacctgtctgcctccatcaccaaacaacctattcatcaaaaggaaaatatcataccattacttgtgacaagcaattctgatcagtttttgacaactccagatggtgacgagaaggacataacgcaggacaattctgaattaaaacacagatcatcaaaatctgttttgctttgtcagtctgggcttccagaatgttgaatttgcctcaaggcctcttcagtataaggaaatacctggaaaactgtgaaacttttaccacgacgtaatctttccagtctcatactattttcacaaacagttttcaaacgttacttcatctgccaaagcattaaaaaaattaaacataagtcaagataaatgttcttaccaccagaataacccttaaagatgtatcttaattaatcagaataaaaggctaccttaaataagacatgatgaatagtagcattttgtagggttaaaaaaaaatgctaaactagtttatttattaaaaaaataattaatgaaggctatgcattactgggaaaaatccttcataatttttcagtttactctttaaagcaaaatgtgagctgtatgtcatttaattggtggataaaacaaatttccttacaaaagggcactttttacaccaaggaagcagagcagtgttaactttaaggtatacttaactgattttgctttaaaactaattacttcataaattattacagctaaaaggattcgatgttgaacaggctgaaaaattgtcaatgtacaaaattcaaaactgtcaactttaactgtaaagtaaatgctccaagtgtgttagacagcatcatcttgcttgggcttaccaaatgcattagtctttgtgtttgggtcgacagcgagtgtgcctgtgctggggcagggtgtgtgttctgtgggagggtgtctgtggggatgtgactatcagggtgggcctgtgctggggatggggcaggcctgggtctggagaggattttgtgtgaaagtaaatggggtgtttgaggcgtatgggtggctgttggtgtggggaggcatctgtgtatggctgttgggaacagcaaccaaaaggtgctttttggttttatttgagatgaagattgtgtttccgcttaattactagtttgtggtctatatcatagaagttatttcccaccccattttatcttgacaaccgtgtttgcatttctgtaaaacttctacaacttctggtgtcagaactgtccagaagatggtactgttaactgttatttcctttgatgttttgattttgaagtttagctctcatgcaaatgtttcaggcgtacatacataggcagaaagcaatttttaggtgatttgtctgtttcttggatgaaatataaagcaagctttaatgttctgacttgttcatttgaaatacaaaaaagtaagtgaattttaatgttttgcattaactaaagaaatctgaagattaatgttgaggaaattgtatggacatgcctttgtgaaaccaggaagtattttaagttaaaaatgaaaaaggttttaattgctttgtgtgtgttttaatggagccccattttagaattattttttccatctccctttaccaacaaaaggaacaatgccaccgtgaatggaatagtttggggaaagctttgccaaacacaaccctgatttcagagcaggaacatggtttggatagatcttcagttccgcttgaattattctgttactgcgctgtcattttcagaagatttccattcctttgcagatgctgttgggagttcgggattatgttcatttcttctgttttaatggcattcagtactaattttataagtgcatcttgtgtgaatctcaataaattcagttttgtaatcttttttaaaaa

SEQ ID NO: 3072 - protein, 562 aa, Homo sapiens
MAGVGDAAAPGEGGGGGVDGPQRDGRGEAEQPGGSGGQGPPPAPQLTETLGFYESDRRRERRRGRTELSLLRFLSAELTRGYFLEHNEAKYTERRERVYTCLRIPRELEKLMVFGIFLCLDAFLYVFTLLPLRVFLALFRLLTLPCYGLRDRRLLQPAQVCDILKGVILVICYFMMHYVDYSMMYHLIRGQSVIKLYIIYNMLEVADRLFSSFGQDILDALYWTATEPKERKRAHIGVIPHFFMAVLYVFLHAILIMVQATTLNVAFNSHNKSLLTIMMSNNFVEIKGSVFKKFEKNNLFQMSNSDIKERFTNYVLLLIVCLRNMEQFSWNPDHLWVLFPDVCMVIASEIAVDIVKHAFITKFNDITADVYSEYRASLAFDLVSSRQKNAYTDYSDSVARRMGFIPLPLAVLLIRVVTSSIKVQGILSYACVILFYFGLISLKVLNSIVLLGKSCQYVKEAKMEEKLSNPPATCTPGKPSSKSQNKCKPSQGLSTEENLSASITKQPIHQKENIIPLLVTSNSDQFLTTPDGDEKDITQDNSELKHRSSKSVLLCQSGLPEC

SEQ ID NO: 3073 - DNA, 1080 bp, Homo sapiens
caggctgaaaaattgtcaatgtacaaaattcaaaactgtcaactttaactgtaaagtaaatgctccaagtgtgttagacagcatcatcttgcttgggcttaccaaatgcattagtctttgtgtttgggtcgacagcgagtgtgcctgtgctggggcagggtgtgtgttctgtgggagggtgtctgtggggatgtgactatcagggtgggcctgtgctggggatggggcaggcctgggtctggagaggattttgtgtgaaagtaaatggggtgtttgaggcgtatgggtggctgttggtgtggggaggcatctgtgtatggctgttgggaacagcaaccaaaaggtgctttttggttttatttgagatgaagattgtgtttccgcttaattactagtttgtggtctatatcatagaagttatttcccaccccattttatcttgacaaccgtgtttgcatttctgtaaaacttctacaacttctggtgtcagaactgtccagaagatggtactgttaactgttatttcctttgatgttttgattttgaagtttagctctcatgcaaatgtttcaggcgtacatacataggcagaaagcaatttttaggtgatttgtctgtttcttggatgaaatataaagcaagctttaatgttctgacttgttcatttgaaatacaaaaaagtaagtgaattttaatgttttgcattaactaaagaaatctgaagattaatgttgaggaaattgtatggacatgcctttgtgaaaccaggaagtattttaagttaaaaatgaaaaaggttttaattgctttgtgtgtgttttaatggagccccattttagaattattttttccatctcccctgatttcagagcaggaacatggtttggatagatcttcagttccgcttgaattattctgttactgcgctgtcattttcagaagatttccattcctttgcagatgctgttgggagttcgggattatgttcatttcttctgttttaatggcattcagtactaattttataagtgcatcttgtgtgaatctcaataaattcagttttgtaatcttttttaaaaa

SEQ ID NO: 3074 - protein, 57 aa, Homo sapiens
MGQAWVWRGFCVKVNGVFEAYGWLLVWGGICVWLLGTATKRCFLVLFEMKIVFPLNY

SEQ ID NO: 3075 - DNA, 2339 bp, Homo sapiens
aggcggggagggggccggccggaggcagaggctggagggaggcggcggggacagtttgttgtgctcggaacatggcgggcgtcggcgacgcggccgctccgggagaaggcggcggtggcggcgtggacggcccgcagcgggacggccgcggcgaggcggagcagccgggcggcagcggcggacaggggcccccgccggcgcctcagctcacagagacgctgggcttctacgagagcgaccggcggcgggagaggcgccggggccgcacagagctttcattgttgaggttcctcagtgctgaactaacaagagggtacttccttgaacataatgaggccaagtatacagaaagaagagaaagagtatacacttgtttgcgaataccaagagaattggaaaagctgatggtttttggaatctttctgtgcctggatgcgtttttgtatgtgttcaccctgcttcctttaagagttttcctggcactattcaggctcctcactttgccttgctatggcttaagggacagacgtttgcttcagcctgcccaggtgtgtgacattttgaagggtgtcattttggtaatctgctattttatgatgcactatgttgactactccatgatgtaccacctgataagggggcagtccgtcatcaagctctacatcatctacaacatgctggaggtagctgatcgtctgttttcatcttttggacaagacatattagatgctctctattggacagcaacagagcctaaagaaagaaaaagagcccacattggggtgattcctcactttttcatggctgttctctatgtctttttgcatgcaattcttataatggttcaagcaacaactctcaatgtagcttttaactcacacaacaagtctttgcttactatcatgatgtctaataattttgttgaaattaaaggaagtgttttcaagaagtttgaaaagaacaatctctttcaaatgtcaaatagcgatattaaggaacgattcacaaattatgtgcttttactgatagtgtgtctaagaaacatggaacagttttcttggaatccagatcatctctgggtgttgtttccagatgtctgtatggtaattgcatcagaaattgccgtggatattgtaaaacatgcctttattactaaattcaatgacattactgcagatgtctacagtgaatatagagccagtcttgcttttgaccttgttagcagccgacagaaaaatgcatacactgattacagtgactctgtagcacggaggatgggctttattcctctcccactagctgttttactcatcagagttgtaacaagctcaattaaagtgcaaggaatcctgtcttatgcctgtgtcatactcttctattttgggttgatatccctgaaagtacttaatagcatcgtgctgttggggaaatcgtgccagtatgtgaaggaagccaaaatggaagagaagctgtcgaatcctcccgcaacctgcactccaggcaagccgtccagtaaatcacagaacaaatgtaaaccctctcaaggcctttccacagaagaaaacctgtctgcctccatcaccaaacaacctattcatcaaaaggaaaatatcataccattacttgtgacaagcaattctgatcagtttttgacaactccagatggtgacgagaaggacataacgcaggacaattctgaattaaaacacagatcctcaaagaaagatttgttagagatagacaggttcacaatttgtggaaaccgaattgactgaatctgtggcttcatgcgctgaagaagctgggtcctggggcaacaagtgctgtgttgccaggacaaatagatgctaaacatggcacttaaatatttatttaaaaacttaaattattattggcaagcaaatcttagtatctttcttccagtaatatggcctggctgagggtcagaccacaggacaggagcgacctccggccttgactgtctgggaagcttgatggattataaaacttcctcctgcctggccaagcagcagcatcatttccaggacccaacaaaggcaacatcaaaatctgttttgctttgtcagtctgggcttccagaatgttgaatttgcctcaaggcctcttcagtataaggaaatacctggaaaactgtgaaacttttaccacgacgtaatctttccagtctcatactattttcacaaacagttttcaaacgttacttcatctgccaaagcattaaaaaaattaaacataagtcaagataaatgttcttaccaccagaataacccttaaagatgtatcttaattaatcagaataaaaggctaccttaaataag

SEQ ID NO: 3076 - protein, 567 aa, Homo sapiens
MAGVGDAAAPGEGGGGGVDGPQRDGRGEAEQPGGSGGQGPPPAPQLTETLGFYESDRRRERRRGRTELSLLRFLSAELTRGYFLEHNEAKYTERRERVYTCLRIPRELEKLMVFGIFLCLDAFLYVFTLLPLRVFLALFRLLTLPCYGLRDRRLLQPAQVCDILKGVILVICYFMMHYVDYSMMYHLIRGQSVIKLYIIYNMLEVADRLFSSFGQDILDALYWTATEPKERKRAHIGVIPHFFMAVLYVFLHAILIMVQATTLNVAFNSHNKSLLTIMMSNNFVEIKGSVFKKFEKNNLFQMSNSDIKERFTNYVLLLIVCLRNMEQFSWNPDHLWVLFPDVCMVIASEIAVDIVKHAFITKFNDITADVYSEYRASLAFDLVSSRQKNAYTDYSDSVARRMGFIPLPLAVLLIRVVTSSIKVQGILSYACVILFYFGLISLKVLNSIVLLGKSCQYVKEAKMEEKLSNPPATCTPGKPSSKSQNKCKPSQGLSTEENLSASITKQPIHQKENIIPLLVTSNSDQFLTTPDGDEKDITQDNSELKHRSSKKDLLEIDRFTICGNRID

SEQ ID NO: 3077 - DNA, 1362 bp, Homo sapiens
cgtcggcgacgcggccgctccgggagaaggcggcggtggcggcgtggacggcccgcagcgggacggccgcggcgaggcggagcagccgggcggcagcggcggacaggggcccccgccggcgcctcagctcacagagacgctgggcttctacgagagcgaccggcggcgggagaggcgccggggccgcacagggacagacgtttgcttcagcctgcccaggtgtgtgacattttgaagggtgtcattttggtaatctgctattttatgatgcactatgttgactactccatgatgtaccacctgataagggggcagtccgtcatcaagctctacatcatctacaacatgctggaggtaagggccttgcttaccccgcacaggcctggccagggcactcagcttcaagtcttcagttctgaaggtacctgagagtcaagaatgctctaccgactctagttatggtgcttctggcctttactgtgctgtcatcacttgggggctcttcttaaacatggattctgatttaggagatctaggctgggtctggagaatctgcatttccagggcggtggggctcatgctgctggtctgggacacacctctggtggcaagcctgcaggcatggcatgtcctcatgtaggctgggaagattcttgctgcccagacattttagaaccagtacccccttgagtatccaaattgtcaagtgctagggaaattagtttcacaacttcattagaaacccatgctagaactttaaattatgaagtaaatgttatgattatgtatatgtttgctgtaagaaatacacattttaagttgcacatttaaattcagatctttacatagggtaaataaatataagttcccaatttttgtaagtaatgtttttagtacaatatgtctcacttcaaagcattcagcgtatgaaaatctgcatttatataaaaaataagttgagctgatatacattcactttacaaaaaaatgcttcgctttataagccagatattcacaagttttttaaatagtaagctaccctaagttatataataaactttgaaattcaaattgcaggccggcacggtggctcacacctgtaatcccagcacttggggaggctgaggcggggcggatgacctgaggtcaggagtccaagaccagactggccaacatggtgaaaccccgtctctactaaaaatacaaaaattagccgtgcctggtggcgcgtgcctgtaatcccagctacttgggaggctgaggtaggagaatcacatgaaccctagaggtggaggttgtagtgagctgaaatcgtcccactgcaccccagcctgggtaacacagcgagactccatctcgggg

SEQ ID NO: 3078 - protein, 54 aa, Homo sapiens [sequence omitted]

SEQ ID NO: 3079 - DNA, 655 bp, Homo sapiens
aagcacaataaaaagtcaaaaggaggtacgggctgaagaatgacttcctgcaatgtgtaatttcaagaattagagtttgtcaaaggtgttaaaaataaaatgagtgtgaatgtcctacaaggtttatgagaaagttcagaaggaaagtaaagaaagactaagcagcaagacttttagtattcctgtatcctggagaaggcagcactcgagccaccatcttggaagtgaagatcaggccctcagcagacacaaaacctgccagtgccatgatcttggatttttcaacctgcaggactattcaatgaaattccaatgaaaatctcaagttattatgtgaatattgaaaaacgaaccctaaagtttatatggagagccaaaaaatgcaaaagagccagcacatattgaaagagaagaacaaagtcagaagattgacactacctgacttcaagacttatgataaagcttcagtaataaagacagtgtggtatggacaaactaatagaaatacagatcaatggaacagaacagagaacccagaaatagattcacataaatatattgtcaactgacctttgacaaataagaaaaagcaatacagtagagcaaaaatagccttttcactaaacaaatgaacatccacattcaaaaaaaaaaa

SEQ ID NO: 3080 - protein, 68 aa, Homo sapiens
MSYKVYEKVQKESKERLSSKTFSIPVSWRRQHSSHHLGSEDQALSRHKTCQCHDLGFFNLQDYSMKFQ

SEQ ID NO: 3081 - DNA, 1979 bp, Homo sapiens
ataggcactgctatttggttcagagaagcaccaattaattcgactgctctctgatccacttgaagaactcagctggaaatcaaacaaagccaacctaaaaaaaaacgtctaacactagagtattcctgtatcctggagaaggcagcactcgagccaccatcttggaagtgaagatcaggccctcagcagacacaaaacctgccagtgccatgatcttggatttttcaacctgcaggactattcaatgaaattccaatgaaaatctcaagttattatgtgaatattgaaaaacgaaccctaaagtttatatggagagccaaaaaatgcaaaagagccagcacatattgaaagagaagaacaaagtcagaagattgacactacctgacttcaagacttatgataaagcttcagtaataaagacagtgtggtatggacaaactaatagaaatacagatcaatggaacagaacagagaacccagaaatagattcacataaatatattgtcaactgacctttgacaaataagaaaaagcaatacagtagagcaaaaatagccttttcactaaacaaatgaacatccacattcaaaaaaaaaaaatgaatctagatggagacttacatgcttcacaaaaattaactcaaaatgaataataaacctaaatgtaaaacacaaaacaataaaaatcctagaaataacatggaagaaaatctagataaccgtggggatgaagatgagtttttagatacagcatcatcggtataatccacgaaagaaaaaatagataaactggacttcaatgaaattaaaatttctgttctgcataagacaatgtctagataacaagaaaacaaggcacagactgggaaggcatatttggaaaagacacatatgatagaggacagttatctaaaatatatcatgcacccttaaagttcaacaataatcaaacaatctgactgacaaatgggctgaagaccttaagagacactttacttaaagaagattatacagatgggaaataagcaatgacaagatggtccacatcatatgtcatcagaaaaatgtaaattaaaaccatgagatactacagtgcatctgttaaaatggcccaaatctggaaaactgacaacatcaaatgctcatgaagctgtggaggaaaaagggctcttattcattgttgctgaaagcaaaatgttacagctactttgaaagacagttgggtagtttcttacaaaactaaacatactcattatatgacataacaattgcactctttggtatttaaccaaaggagttgaaaattttatcttcataaaaacctctatgtagagttttgtagcagctttatttataattgtcaaaacttggaagcaaccaaaatgtccttcagtgggcgaatgaaaaaaaaaagaactgtgggatattgaggcaatggaatattattcagtgctaaaaagaaataagccattaagtcatgaaaagacacaggttaactttaaatgcatatgactaagcaaaagaagacaataccaaaagactatatgctgaacgattcctgtatgatactacaattaacacaagccattatttatctgtccaaacccatagaatgtacaacataagagtgaactgtaatgttgggaccaggtgtgacagctcatgcctcagaagtcgagggttcagtgtgctgtgattgcaccaatgcactccagcttaggtgacacagtgagactctgtctcagaaaaaaaaaaaaaaaaagtgtaccgtaatgtaaactatgggctttgggttattatcatgtgtcaatgtaggttcatcaattgtaacaaatgtaccactccggtggaggatgttgataatgagggaggttatgcatgtgtggaagcaagggagatacggaaaatctctgtcaactcctcttaatatttctgtgaacctataacttctttaaaaaaaataaagttcttgaaaaagtc

SEQ ID NO: 3082 - protein, 67 aa, Homo sapiens [sequence omitted]

SEQ ID NO: 3083 - DNA, 2400 bp, Homo sapiens
gtaagaagagccatacgcctcccgccatgattctgagacctccacagcgatgtggaactgtcctgtttctgctgggaggacaatttgagctaactggaaaggggattgtgagaaccattactgggagtacagaaagaaaagcaagaggcagttttgcaatttggagtgagaaccagccccctacacccaaggctaagctcctaccatttcagaaattgagagatgggggtgctatcttccttgatgattgcacttcagagagatggttccaggtcattgaaaaagatattccttgaccttaaagctgtgccgaataatatttcattttctggatatacctcactttatctacttgctacagaagggcatcctgcttactttaaagttttggcaattaggaataaagctgctataagcatccagtcctgcaggttgaaaaatccaagatcatggcactggcaggttttgtgtctgctgagggcctgatcttcacttccaagatggtggctcgagtgctgccttctccaggatacaggaatactgttcctcacatggaagaagtgaaagatcaatgaatccactcttgcaagccaatttttgctctgtttgtttgtttttgagacaaggtctcactctgtcaccctagaggttggagtgcagtggcacaatctcttctccctgcgacctccacttccctgctcaagtgatcctcccacctcagcctcccaaataactggaactacaagcgatgactaccaaaaaatgtctaatttgtttgtttgtttgtttttgctagagactggcttttgctatgtcagccaggctggtctcgaactcccaggctcagcctatccacctgcctgggtctcccaaagagcttggattatagacatgacccactgcatccagccacaagcccattttataatggcattattccattcatgaggtcagagcccttgtgacctgaactcttatccttaggccacaaattctaatgctgttgcattaggaattaactttctgacacatgaattttaaggaagacaaaaacattcaaactacagcagattttattctatatgtaattgttcaagaaagtgaattactgtacatgaatataaggagttttttcactaagaactctcaaaatagtaaaaacagaggaataaaaacagaacaagggtaactgagactaaactagcaagacaccttcaaagaagccacaatagttcagagaactaaaacatggattcaagatttatggaaacttaaaaaaaagagcttgacaattttataaagactgaataggaatataattaatccaagaatttcctttatggcctgaaaggtgacataataataatacaaacaaacacttatgcagcatttattatgaacagtgcttttcaagatcatttaattctgtcaacaattctgtgtagcaaataatatgattttttttatagaagagaataggggtgacaagggaagcatggtggctgattattaacattacactggaatcttccacagagtaaaatattgtgtgtaaacaagcaaagatatttgagttacagatttaattcaatactttagtgttgcatgatatcttaatgaaggaaacccaaaattctgtaatcaagaaagataaattttaatgcttcatagatagatttattattcaaaagattaatacaacaatatgttggccaaatacagcccccattgcaaagtagtattaacaaatacgtgcagaaaactaacactttacccacatacattgatttagattttttccagaaagtttaatttcatataaatattttaccactttatattaggttgctccaaaagtaattctggtttttgctaataggtatgaattttcagtcgaatatttgcaaggaatactagattctgcaactaatgctttatagggaaaatagtcactaacatagaagaacaaaaactctattttaaagttagcccatatgtctgactcttcaaaaaaatttttactactgcactgacaggtgaaatttctttcgtgctggggggatgtaggggaaagaatcacaaagtttttacagatttatttcctttccagattctatttgcaaagcaaggcttacaaaagttttttaatatagatttaagttttccatgatagtgggaaagttttcaagatagctctataaacataatctcctaaatctgatgagtctctgctagacatgaaaaaaaatacattgtctttcacatctttctgtgctaagaatttaggctgcaaagaaaatttaaaggcgaaattcttatgtgaacttatttattctatataattattagacttcattttgtctaatcattattgatcatttaataaaatcagttggggat

SEQ ID NO: 3084 - protein, 89 aa, Homo sapiens
MILRPPQRCGTVLFLLGGQFELTGKGIVRTITGSTERKARGSFAIWSENQPPTPKAKLLPFQKLRDGGAIFLDDCTSERWFQVIEKDIP

SEQ ID NO: 3085 - DNA, 546 bp, Homo sapiens
tgacagactgttcagtctttaataatgtgagaataaacagaataaattaaaagcacaccatattcttctcagcttcctcaggggctttgtccaaacagcttgaacaactgcaaaataatattcaggaaccatgatagtgtttggtacatagaggacactggaaatggttttcttaactgaacaagtgactagaataaaggaattaatgaacgacatcagagctgaaatcccaaaccataaatcataaaaggatcagacagcaaagagtactcaaaagctgatttattgagatcctgatgagtttgaagtaactagaaacttgatcaagaccctgactaatataagatgattttttaaaactggaatctcagtggattcgtctcaacacggccagatggatgattcttccagggactaatgaacttgttagaatttcggataacatttggttgtcaaaaaaaaaaaaagagcataaaaagtaatagaccataactgagatgggtggggcttattctagataagatagtcaaggactgacatatggga

SEQ ID NO: 3086 - protein, 44 aa, Homo sapiens
IKSTPYSSQLPQGLCPNSLNNCKIIFRNHDSVWYIEDTGNGFLN

SEQ ID NO: 3087 - DNA, 7537 bp, Homo sapiens
atgcacttagacaaagacctggaacaagccagatctgtgggggcccatagccaagaaatgggaatcacacaaagtctccagaatctgctggggccacaaggggaaactcatactgtcatagatctgtactggggagtggaagaagatgagtgggacagcccagagctccagaagacccgcatgaagctgctggagaattgcttgaaaacttctgcagtgtggatgaggtggaaatttgctgtgggagaagcattggcaggtgaccctagaagagccaagcctgataccacgcatgcgatgagaggagcaccattaccaccaatggaggcaggcctgtctgctgattcctcagttaaaaagaagaaaattcccttggaacagtggatcagcaggatgtatgggcaactcagctgttttggactattaggtgaaaaatatgggaatatccgaatccctggagaagttgaagcctcagagtttgaaatgattttggatgccgccatagaggcaaagctggagaccaagttgctggaggagtggtactgtcgagatgagaactcggtgccagcagcctattacctcagacccaagtcagaaatgctgagaagcaatagaaatgcaatgcagccttctaccaatgctgaaaacgagaagacatggcaagagatatcagatgagatcaagaagatatttaaggctgctgtaaagctgttacacgaaaagggtaaaatgaaacacagccaggctaagaggtacctgttctcagctatagaggatgagtttgactttgctctgggaaaacaaactccagcatttctaaagaagtgtgtttgctacattaggaaaattgctaacattgagcgctttgtgaaaatcccagagatgggaaaatacatggatataactggaacagaaccgaggattattcgggacccagaagcccaagagaagctgataaaactcagggatgaatttattcctactattgttgcatcatctaatctgagagtgtacacatctgttactcattgtgacatgaaactaggctactcccaagaaatagaaaatcattacatcgaaggacttggtaaacaattttatgaggacatgattgatataattcaggcaacgatacaacagaattttgacactgaaactgatacactctatgatgaaatccttcaacattcatcattatgtaaaacatacgcctccttctatgagtacaaatgtgaatctctaaacatagtgcataactacattcttccaagcaaagctggacacatcaaccctcttattatatatggtgggccatgcactgggaagacccttctgctagctgaagtagcaaagaaggcttatggctggctacatgaggacacaggaccagaatctgacccagtagtcatcgtgagatttctaggaacgacagacatgagctctgaccttaggactctccttctaagtgtttgtgaacaattggcagttaactaccggtgtctggttcaaagctaccctaagaagatccatgacctctgtgacttatttataaatcttttgaatgagtcttcactgcagagacctctagtcataatattcgatgcactagagcagctctcagagaatgatgatgccaggaagctttggtggctcccagctcacctgccccgctttgtccggatagtcctttccacgctgcccaacaaacatgggatcttgcagaaactaaggtgccttatccatgaagaagacaactacatcgagctgattccccgagacaggaagatgtgcagccaggtcctcaaacaccagctgctgcgcgtcaaaaggaaggtcacatcaggccagcagatttatgtgaacaatgcattatccaagtgcacactgccaatgtttgtgaacctgaccttcagggaggtgaggcactggagatctcacaaagacgtcgatgaatcctccctctctgtcaccgttcatgaaagtatagagcagttattctggtccttggagaagaagtgtggtcagaaactggtctctagggctcttggttacatcaccatggccaaaatgggtctgagtgaaatggaactggaggatgtgttagccctagacaacagtgtaatgagtgagctcaaagaaaacaccagacccagcaatcccctgagagtaccttacttgtacattgcaaggctcaaggagggtctcagtggatacctaatagaaagacatgtgaaaaatgtcacactcctagtctgggccaacagacacctgcagctcatagcccagaagctatatctgcaggatgacaatgacctgcgtgaaatgcacaccatcttagcagattattttctgggggtttggtcagggggcaggaggaaagccttctgccttgaggacccctacttgaatggctgccttgacttggagaacagaagtttgctggaggaagaaaagcacttcatggaacaggcttcctttgacaggcaggctccagaccagccctgggttttccagtgtaatcccctggaacctgacatctttttcgttaatcatcggaaaatgtctgagctgttgtaccacttgacgaggtgtggaaaaaccgatgacctgctttacggcatcatcatgaacttcagctggctttataccatgatcaaaattggccagtttgacaaagtgctttcagacattgagctggcttacaactactcgcaagagaaggagctgaagttcctggccaacaccctccgcagcatcaaaaacaaggtcactgcatttcccggctccctttcagcagagcttcagcaaagactgctgcctgttgtaagctccctgcccaaacttagacatcttcttttagagtgtgataaagatgggcccaaatattgctccattgtaccactgcattcatccatggatgtgacatacagcccagagcgtcttcccttatcatccagtcacctgcatgtcacagagatcctgcctacctgtaaccccagcactgtcctcacagctttagaaaatggttccatcagcacctgggatgtagagactcgacagctactcaggcaaatcaccacagcccagtctgtcatcctgggcatgaaactcaccagtgatgaaaagtaccttgtggtggctacaacaaataacaccttgttgatttatgacaatgtcaattcttgcctcctgtctgaagtagaaatcaaggggaccaagcatggaagcagcgccacctacatcaatggatttacactgtccgccaaccacgcccttgcatggctcgaagccagcaaagatgtcactgtcatcgatctgctgtacggatggccgctttaccagttccactgctggtatgaagtgacgtgcgtccagtgctccctggatggtctgtatgctttctgtggccaatacctgaacacaaccaccatatttcatttagggagtggagaaaagttatgtacagtgacatcagaattttcaggtggatttgtgaagtttcttcttatcttggacacagctcaggaaatggtcatggtagacagtgaaggaagtctttctgtttggaatactgaggacatttccagcccccagctgactgatgactttgattgccgaagagaagacagtgaggtggtcagcattgagctttcagaagaccaaagtgcagttctgatctgtaaagccctcagcattgagctcttagatactggtctgtggaaggtggctgaaaagttcagagccaagcacaacgaacgctttatatctgccgtgctgtctaaaaatggagattgtatcatcgccaccatggaaaatacctcagctgtgtttttttggaggcgggacacaggacagtgtatggcaagcttgcaggaaatctcaggttccattgttaagttagtgaaatccagtcaccacaatatgctactgtctttatcaaccagtggtgttctttccatttgggacatagatataatcacagctatgtccaacatagataagactggaaaacccatccaaagtctgttgttgcctgctagaggggaaatcatttactccctggatggatccgattgtgttcataagtggaacttcagcagtggcttcatcgaagcagtattcaagcatgaaggaatagttgaacactgtgtgttaacatccaccggagatataatggtgacatcagatgacaaaagcagccagtatgtctggcacaccagcagtggtgaaaacctttttcgaattaacgggcagagaatatctcagctgctgattacacacaatgaccagtttgtggtctcgctctgtgaggaaaatgcctccagggtttggaggctcgccacaggccacagggtctgcaacattctgaccactttgcagaatgcctttattacctccgcaaataccttcgtggtgggaatgactaaaagcaaagtgttggcagtcagtctttggacaggaagtatcaccaagaaattttgctgtgaagatgggaccaccatcgtgaattttaaattaatccctgactgtcctgatatcatcgtgtttatcacatcggccgagactgtgaacatctggagtctgacagatgaagtgatctgtcggcgcgtgcaacttccaaacaacttcttgaaaaatctggaggactttgaaatttctcccaatggaaagctaggcattatagccaggggagatgaaaacatcaatgtgctagatttatacagtggtaaattgcgggtggttcacgcctctgggatcatctggcggcagaggttgtctcgggatggtcgctacctggtatacatttgtttccgaaatggggaggaggaggatgaaaatggtgcaatattcagtttaattgtaatgagactggcagatggcaaaaatatcggtgcttgttccctttacaaaacaccaactttccttgcactctcccagaggcacctgaacatcattgtgggctttgatgatgggagtatagggatctacacggtagtagaccgtgtagatgctgcactgaaaatcaaaattgccacttcaaatagcagacaaattttcaacaatgcaacacacacctccaggccaaagtgtaacagttattgttttaaaatatctgtggattgcttatggagagagtccactgaggtctttgcaagagacagccccatcacagttagtgactctactgagtccaatgaagcaacaccctccaagaaacacaactcttgttatgagcgggtatgctcggccctagaagccaggggccacagctatgcccctgataactgacaaaatgttttccagctaagcagaaatatgtgatccacgtacagaagggaaaaaaatgtgccccaaatgataaactattcatttattaaaaggcaggagcgatgctggaattccagtgttttattaagatgttcatgaaatggacaaataggttagtcttgggtgtggtctttttgtcaaagtgtatccagaatgtcagaatttctagtagtaatatttaaatggttacttcatctgaaaggcagaggctaaaagtttttaaattagctgtgtggtgaggcagcataatacatcccactggttaagatgagagaggctagagttatatacagatcatttggatgggaattagttctacaaaaatcagctgaaatcatgaagacaaagagctgcttgacttcaaatgattgtgtgataagtaaacacagccttaatctctctttacattttacagtcctgacaactgtgtacacctagtctgcagtgaacggtctaaaggtgcaaaatatgtaacaaaaatacccaagtgtattcccagtttcccgagagatatgacctgaaacatgagactgtggactggactgggacaagaactaactaccactatcatagggctactgaacatggagagtcagtctttattaaaagacagttgcaacaattgcatgcgagggtttctgtataacagaatatatgatttttaaactatttcctgggttgcaaaagaacacatttagtaagaaacaacaatcttttcgcatctttttgaaatgcatatttgtgctgggtgtaaagaagattacaggaagggcattacaaatctggtcaaaacacctgtccatttccatcattgtactaacagaagtctgtactatttggtcagtttgtatggaagcataaatattccctaaattcctgcagttagtcttcatagaaagcaagctttctcaacatgccatctctgagatactgatgacgtttgccttactcacattccttctctttcctgtgtaaaatgcagatagatgaccaaatactctgggataaactgaatatgcctgtctttgtgctaaaatattccataaatcttaagggtgtccaaaagttctttattgtccttgtttgtaatcactttcttacttctacacaccatctgtatgcttctttatctgttactcttcctgattgaggactcttctgagccttttatagtcctatccatttcaaagcagaagctgtggaatggtattaaatattttttaaaattaattcacctgtttaaaagaaaacattgcatctcaaaaggtgaagatgattgttctttcttccatatcctccttacggcatgtccttggataacttttcaaaaggtatccacacttttggttgagtttagttttcttagaaagtagagaagtaacactttactagaataatgaacaaggaattgatttgctctaggcccagctctgccataaactcattgtgtattcctagacaggtctttaacttcatcagtgtgttgtttttgtgaagtgcaaaataaagatagtgatagtttctgctgtagccctcatagggacattgggaagcagtataagaaaaacttcagcaacatcatgattattgatgctaataggaaaaataaattcatgtaacccatagagaatccaggtcaattgtatttcctcttggaaagcagtttaacatgtaagcgttcaaagatgtgattcagataaaaatacccaggtccatagtgaaagatgtttttcagtatgttacttatggtttagctactagccagggaggtggtagcccagagaaggcaaaccacatacagatcacctggagttgattatatgagtctatgcttttgagctctttaggcaacacattctcattcctgtcattatcagttgaacctccatgccacacatttctaagaattaaatgcctagatggattaaatgtagtatgtgaatgttctatgtaaaagccaatagagtatacaagtgacttgaatgatttttcctaacttgtttgcaactgatagctcatattgaatgtttttatgtaaactttgtatcgttgggaagaattacccaatcagagatttatattttcataaatgttacatttagttaaattttgttacagagttgttacactagaaaattatttcagtcttcaaacaatatacagtcttgtgtatgtattatttgtatgaataaaagataaactacttaga

SEQ ID NO: 3088 - protein, 1762 aa, Homo sapiens
MHLDKDLEQARSVGAHSQEMGITQSLQNLLGPQGETHTVIDLYWGVEEDEWDSPELQKTRMKLLENCLKTSAVWMRWKFAVGEALAGDPRRAKPDTTHAMRGAPLPPMEAGLSADSSVKKKKIPLEQWISRMYGQLSCFGLLGEKYGNIRIPGEVEASEFEMILDAAIEAKLETKLLEEWYCRDENSVPAAYYLRPKSEMLRSNRNAMQPSTNAENEKTWQEISDEIKKIFKAAVKLLHEKGKMKHSQAKRYLFSAIEDEFDFALGKQTPAFLKKCVCYIRKIANIERFVKIPEMGKYMDITGTEPRIIRDPEAQEKLIKLRDEFIPTIVASSNLRVYTSVTHCDMKLGYSQEIENHYIEGLGKQFYEDMIDIIQATIQQNFDTETDTLYDEILQHSSLCKTYASFYEYKCESLNIVHNYILPSKAGHINPLIIYGGPCTGKTLLLAEVAKKAYGWLHEDTGPESDPVVIVRFLGTTDMSSDLRTLLLSVCEQLAVNYRCLVQSYPKKIHDLCDLFINLLNESSLQRPLVIIFDALEQLSENDDARKLWWLPAHLPRFVRIVLSTLPNKHGILQKLRCLIHEEDNYIELIPRDRKMCSQVLKHQLLRVKRKVTSGQQIYVNNALSKCTLPMFVNLTFREVRHWRSHKDVDESSLSVTVHESIEQLFWSLEKKCGQKLVSRALGYITMAKMGLSEMELEDVLALDNSVMSELKENTRPSNPLRVPYLYIARLKEGLSGYLIERHVKNVTLLVWANRHLQLIAQKLYLQDDNDLREMHTILADYFLGVWSGGRRKAFCLEDPYLNGCLDLENRSLLEEEKHFMEQASFDRQAPDQPWVFQCNPLEPDIFFVNHRKMSELLYHLTRCGKTDDLLYGIIMNFSWLYTMIKIGQFDKVLSDIELAYNYSQEKELKFLANTLRSIKNKVTAFPGSLSAELQQRLLPVVSSLPKLRHLLLECDKDGPKYCSIVPLHSSMDVTYSPERLPLSSSHLHVTEILPTCNPSTVLTALENGSISTWDVETRQLLRQITTAQSVILGMKLTSDEKYLVVATTNNTLLIYDNVNSCLLSEVEIKGTKHGSSATYINGFTLSANHALAWLEASKDVTVIDLLYGWPLYQFHCWYEVTCVQCSLDGLYAFCGQYLNTTTIFHLGSGEKLCTVTSEFSGGFVKFLLILDTAQEMVMVDSEGSLSVWNTEDISSPQLTDDFDCRREDSEVVSIELSEDQSAVLICKALSIELLDTGLWKVAEKFRAKHNERFISAVLSKNGDCIIATMENTSAVFFWRRDTGQCMASLQEISGSIVKLVKSSHHNMLLSLSTSGVLSIWDIDIITAMSNIDKTGKPIQSLLLPARGEIIYSLDGSDCVHKWNFSSGFIEAVFKHEGIVEHCVLTSTGDIMVTSDDKSSQYVWHTSSGENLFRINGQRISQLLITHNDQFVVSLCEENASRVWRLATGHRVCNILTTLQNAFITSANTFVVGMTKSKVLAVSLWTGSITKKFCCEDGTTIVNFKLIPDCPDIIVFITSAETVNIWSLTDEVICRRVQLPNNFLKNLEDFEISPNGKLGIIARGDENINVLDLYSGKLRVVHASGIIWRQRLSRDGRYLVYICFRNGEEEDENGAIFSLIVMRLADGKNIGACSLYKTPTFLALSQRHLNIIVGFDDGSIGIYTVVDRVDAALKIKIATSNSRQIFNNATHTSRPKCNSYCFKISVDCLWRESTEVFARDSPITVSDSTESNEATPSKKHNSCYERVCSALEARGHSYAPDN

SEQ ID NO: 3089 - DNA, 1944 bp, Homo sapiens
cgcggagccgctagcgtctcccggcgcggctgcccgaggccggcgaagccatgggcgccgggaccccgccgccgccgccgccgccgccgtctggccccaggaagagaagttaaacttctagagaaacctaacagacaatatccacaacaggtggtaacagaaaacaatccagatggggtgcaggtgctgtaaaataatacaaagctatctctttgatccagttcaagtgccctctcctggctatgtcaatgaagtcaacagctgcaagctagatgaagacgacactgataaattaaaaggcaaatggagcagtgaagtcttggtgcagaaaaatgaccctcagaggcagggctcaaagaagactgagagcagcagcaggacagctgatccatgggagccctgctggcctcaccaagggccgctcccacagggggacgctggaggggaacaccatgcctgcggtgtcaacggcatcggccctgctgccactccacagcccactgggaattccagccccacccaggatgacaggggctcctgggccagtactgcaaatactgttcccccaactcaacccttcctggaaggagggggcaccaggaaacaggactgtgtgctgctggcctcagaagggacccaagtcatgagaaatggagactccagagctccttctgaggcagaaagttttgccttggaagtacaagaccatgtcttccagataccagccccagattaccttcagcattggggcccagctggagacaacgttgatcataatgaaaaggactgtgttttcaagaaccatactgaggatgaatccctagagggaattcagcccccagtgggggagcatggtttgaatacgcccttctctgtgaggagaagctgggattcattgaatgaggatgtggaaacagaagttctaagcatctgctttaatgagaagggtcctgttcatgccatgcctgtggttgactcaggaaacaggcaggaggatacccatggctccgatggagatggggatggggagattgtggacgaggatgcagcggtggcggaggcccttgcagctttagaagctgctactgcaggagaagatttggatgagactgattaggggaggggatttgcacagggaggtaagctggtgtcatgctgagcatgcagatgcatttgctccctggatgcatagcaggtgattctgccagcatgcaccagtgcagccttaccagttgtttacatccagcatctgttctgattgtcagcatctgtcccatgctgcttgtcacatatctggagtttcactctgtgtagatgagctgtcattcaggacactaggagaaaaatctgagtgggtcattgtgcccatatccacagaaaatgcagaagttgaacagcttgcttgacaaccctcaaacatctttgagcacctggtacagatgtttatgagaatactctaagatctcaacccttgatcccaaaggcacacaatcacagagcattccttttgactgtaaactgtttaccttgcttttgagagccaaacattgtacccaacctggaaaaagtaactaccccaattaaagtgcctcatgtgtccccagagcatggcttaacttcagggacaatcacccagggaactaataactaaccagttgttcaacagcgggttaagctcagcagttttcacagtagagcagaagtccccaggaaacaaagggttagtcattagctgagatgttgattttaaaacaccttgaccttaacttttttacattattacttttaaatctcctttgggattggggaggctggccaaaataagtcttaaaactgcttatgtcatatttggattttaagttcatgacattcggaacagcaaagccatatatgcaatgtttttatgccattaaatgtctgattccaattaaaatataacaacgt

SEQ ID NO: 3090 - protein, 314 aa, Homo sapiens
MGCRCCKIIQSYLFDPVQVPSPGYVNEVNSCKLDEDDTDKLKGKWSSEVLVQKNDPQRQGSKKTESSSRTADPWEPCWPHQGPLPQGDAGGEHHACGVNGIGPAATPQPTGNSSPTQDDRGSWASTANTVPPTQPFLEGGGTRKQDCVLLASEGTQVMRNGDSRAPSEAESFALEVQDHVFQIPAPDYLQHWGPAGDNVDHNEKDCVFKNHTEDESLEGIQPPVGEHGLNTPFSVRRSWDSLNEDVETEVLSICFNEKGPVHAMPVVDSGNRQEDTHGSDGDGDGEIVDEDAAVAEALAALEAATAGEDLDETD

SEQ ID NO: 3091 - DNA, 2131 bp, Homo sapiens
cgcggagccgctagcgtctcccggcgcggctgcccgaggccggcgaagccatgggcgccgggaccccgccgccgccgccgccgccgccgtctggccccaggaagagaagttaaacttctagagaaacctaacagacaatatccacaacaggtggtaacagaaaacaatccagatggggtgcaggtgctgtaaaataatacaaagctatctctttgatccagttcaagtgccctctcctggctatgtcaatgaagtcaacagctgcaagctagatgaagacgacactgataaattaaaaggcaaatggagcagtgaagtcttggtgcagaaaaatgaccctcagaggcagggctcaaagaagactgagagcagcagcaggacagctgatccatgggagccctgctggcctcaccaagggccgctcccacagggggacgctggaggggaacaccatgcctgcggtgtcaacggcatcggccctgctgccactccacagcccactgggaattccagccccacccaggatgacaggggctcctgggccagtactgcaaatactgttcccccaactcaacccttcctggaaggagggggcaccaggaaacaggactgtgtgctgctggcctcagaagggacccaagtcatgagaaatggagactccagagctccttctgaggcagaaagttttgccttggaagtacaagaccatgtcttccagataccagccccagattaccttcagcattggggcccagctggagacaacgttgatcataatgaaaaggactgtgttttcaagaaccatactgaggatgaatccctagagggaattcagcccccagtgggggagcatggtttgaatacgcccttctctgtgaggagaagctgggattcattgaatgaggatgtggaaacagaagttctaagcatctgctttaatgagaagggtcctgttcatgccatgcctgtggttgactcaggaaacaggcaggaggatacccatggctccgatggagatggggatggggagattgtggacgaggatgcagcggtggcggaggcccttgcagctttagaagctgctactgcaggagaagatttggatgagactgattaggggaggggatttgcacagggaggtaagctggtgtcatgctgagcatgcagatgcatttgctccctggatgcatagcaggtgattctgccagcatgcaccagtgcagccttaccagttgtttacatccagcatctgttctgattgtcagcatctgtcccatgctgcttgtcacatatctggagtttcactctgtgtagatgagctgtcattcaggacactaggagaaaaatctgagtgggtcattgtgcccatatccacagaaaatgcagaagttgaacagcttgcttgacaaccctcaaacatctttgagcacctggtacagatgtttatgagaatactctaagatctcaacccttgatcccaaaggcacacaatcacagagcattccttttgactgtaaactgtttaccttgcttttgagagccaaacattgtacccaacctggaaaaagtaactaccccaattaaagtgcctcatgtgtccccagagcatggcttaacttcagggacaatcacccagggaactaataactaaccagttgttcaacagcgggttaagctcagcagttttcacagtagagcagaagtccccaggaaacaaagggttagtcattagctgagatgttgattttaaaacaccttgaccttaacttttttacattattacttttaaatctcctttgggattggggaggctggccaaaataagtcttaaaactgcttatgtcatatttggattttaagttcatgacattcggaacagcaaagccatatatgcaatgtttttatgccattaaatgtctgattccaattaaaatataacaacgtatgtgtctttctagaagtcttaactcaaaggtggttctaattttctcagaatatcagtgaccctggatgttactttcaatgtaaagaactaatctagatggccgggcgtggtggctcatgcctgtaatcccagcactttgggaggccgaggcgggtggatcacaaggtcaggagttcaagatcagcc

SEQ ID NO: 3092 - protein, 314 aa, Homo sapiens; identical to SEQ ID NO: 3090

SEQ ID NO: 3093 - DNA, 828 bp, Homo sapiens
gccatgggcgccgggaccccgccgccgccgccgccgccgccgtctggccccaggaagagaagttaaacttctagagaaacctaacagacaatatccacaacaggtggtaacagaaaacaatccagatggggtgcaggtgctgtaaaataatacaaagacagagtcttgctgttgtcaccccggctgaagtgcagtggcatgatctcggctcacggcaacctctgcctcccgggttcaactgactctcctgcctcagcctcccgagtagctgggactacaggtgcccgccaccatgcctacctaatttttgtatttttagtagagatggggtttcaccgtgttgtccaggctggtctcgaactcctgacctcatgatctgcccaccttggcctcccaaagtgctgagattacaggtgtgagccaccgcacccggccaagaaatactttttaaagatataattgtacctccattgatctgaactagcaatcacagctgctctggagtctgcaagtctatgaccttcatctacctggaagaaaactgaatggctcacacacctggacctgatccagacagagccttaaaatccatcagctgctcatcagatgatcccatcggatgccaaggaggccatccaaaggctggaatgatcagttctgtgagctattgagctatgtgaagaaacggcggttgatttgctttcttgccaagaaaagcaaagctccctcacactccacggccactgagcatgtaagctcccaagtataaatttcttcccatccaagccctctcactacctagccctgagatatggggaacattaatcc

SEQ ID NO: 3094 - protein, 38 aa, Homo sapiens
MGCRCCKIIQRQSLAVVTPAEVQWHDLGSRQPLPPGFN

SEQ ID NO: 3095 - DNA, 1879 bp, Homo sapiens
aatagccatattgcccaaagtaatttatagattcaatgctattcccatcaaaccaccattgacattattcacaaaattagaaaaaaagctaatttaaaattaatatggaaccaaaaaagagtccatacagccaagacaatcctcagcagaaagaacaaaggtggaggcatcacgctacctgacttcaaattatattacaaggctacagtaaccaacacagcatggtactggtaccaacacagatatagagacctcagaaataagaccacacatctacaaccatctgatcttcaataaacctgacaaaaacaagcaatggggaaagaattccctatttaatatgtggtgctgggaaaactggctagccatatgcagaaaactgaaactgcaccccttccttaaaccacatagaaaaattaactcaagatggattaaagacttaaatgtaaaacccaaaaccataaaaaccccagaagagaatctaggcaataccactcaggacataggcatgggcaaagattttatgatgaaatcgtcaaaaataattgcaacaaaaaccaaaattgacaaatgggatctaattaaactaaagagcttctgcacagcaaaagaaactatcatcagagtgaacaggcaacctatagaatggaggaaaatttttgcaatctacccacctgacaaaggtctaatttccagaatttataaggaacttaaacaaatttacaagaaaaagaccaaacaactccatcaaaaagtgggtaaaggacatgaacagacacttctcaaaagaggagatttatgtgaccaacaaacatataaaaaaagctcatcactgatcattagacaaatgcaaatcaaaaccacaatgagattccacagcataccagtcagaatggtgattattaaaaagtcaagaaacagtagatgctggcaaggctgtggagaaataggaacactttaacactggtggtgggaatgtaaattagttccaccattgtggaagacagtgtggcaattcctcaaggatctagaaccagaaataccattcaacccagcaatctcattattgggtatatacccaaaggaatataaataattctattataaagatacatgcacatgtatatttattgcggcactattcacaatagcaaagacgtggaatcaacccaaatgtccatcagtgacagactggataaagcaaatgtggcacatatacaccacagaatactatacagccataaaaaagaagcatgatcatgtcttctgtagggacatggataatgctggaaaccatcatcctcagcaaactaacacaggagcagaaaaccaaacaccacatgttctcactcataagtgggagttgaacaatgagaacacatgaacacagggaggggaacaacacacaccggggctgtagggagggcagggggaggagagtatcaggataaatagctaatgcatgcagggcttaatatctaggtgatgggttgacaggtgcagcaaaccaccatggcacatgtttacctatgtaacaaacctgcacgttctgcacatgtatcctggaacttaaaataaaataaaattaaaaaaaaaaaccaagctaaaaaaaaaaaaaaaagaaagaaagctcttccaccctccttcacctatcttaatacaagtcatttctccaagctccctttagtgcagggctctgcatttactgtggttatgcaatcatctgggagatcctgttaaaatgcaggttctgattcagtagactggaggtgaagtcaggactctgcatttccaacaagctcccagatggttatgatgctgctggtccatggacctcacttcgaggaccaaagcttactggcttattggaaaaaaatgg

SEQ ID NO: 3096 - protein, 206 aa, Homo sapiens [sequence omitted]

SEQ ID NO: 3097 - DNA, 391 bp, Homo sapiens
gaggccagcccccattcctggggctccccgaggagctggctttcagcagggtttagagcagcacgaaaagtgaactgaccctggaaaaatggtaatcttctcatctgtgaggatatggaaccccaacctcttcctggacacctgatgatctgcttgtgatgggctcagagtcttgaaacacagaactatgagctcatctcatatcccaatccagcagcatggaaacctcagactgcaaggcccaagactggcacttgttctctcccaactcttttctttctctctctcctttcttttatcccttaattccttcttgcttccttccaagatttatactattaccttttaggcaaaacatcctgaacatgtaaaataaactaattaaaatcaa

SEQ ID NO: 3098 - protein, 53 aa, Homo sapiens
MSSSHIPIQQHGNLRLQGPRLALVLSQLFSFSLSFLLSLNSFLLPSKIYTITF

SEQ ID NO: 3099 - DNA, 360 bp, Homo sapiens
gtgctggagttacagatgtgaactgctgcactcggtccacaccacatttttaacatcaacaggtaatcttctcatctgtgaggatatggaaccccaacctcttcctggacacctgatgatctgcttgtgatgggctcagagtcttgaaacacagaactatgagctcatctcatatcccaatccagcagcatggaaacctcagactgcaaggcccaagactggcacttgttctctcccaactcttttctttctctctctcctttcttttatcccttaattccttcttgcttccttccaagatttatactattaccttttaggcaaaacatcctgaacatgtaaaataaactaattaaaatc

SEQ ID NO: 3100 - protein, 53 aa, Homo sapiens; identical to SEQ ID NO: 3098

SEQ ID NO: 3101 - DNA, 478 bp, Homo sapiens
agcccccattcctggggctccccgaggagctggctttcagcagggtttagagcagcacgaaaagtgaactgaccctggaaaaatgccttagaccttgtgatccaagatggctgctggacctccagttccaagcaggaagtacaggaagcgggcaaaggcaacaagggtgtgatgaacatgaagccagcccccttcgctgagatttcccagaaacctcaccccctgatttctgcttgcactcactggccaattctatctgcaaggatgataagaaatattttattttagctgagcacattgctgcccagtgttctattaccatgaaaataagaggaaaatggatgttgtgtaacccagaggcttggtgcatgcatcagaatcttctggtggccttattaagacacggtagttcccccttattcacgggagatccattccaagacccccaatggatgcctaaaaccacagatagtactga

SEQ ID NO: 3102 - protein, 51 aa, Homo sapiens
MKIRGKWMLCNPEAWCMHQNLLVALLRHGSSPLFTGDPFQDPQWMPKTTDS

SEQ ID NO: 3103 - DNA, 2027 bp, Homo sapiens
cgacagccccagcaactgcctctgccggcgcctcccgcaggccctcgccaactcgccccgcgcaccatgctgactcccggcctgcggaactcgtagtgcagcccctgtcgcctccccggcccctgctatcccacgcaggactggcttcggccgccggggccagcagcttgcgacgtgtccctggggaggcggaatcgctgtgcgccctgagcccgggctcagcccttcgctttccagctgcgtcctgctcccggccgcccagggagcccagtggcgatgagggcactgctggcgctttgccttctccttggctggctgcgctggggcccggcgggcgcccagcagtccggagagtactgccacggctgggtggacgtgcagggcaactaccacgagggcttccagtgcccagaggacttcgacacgctggacgctaccatctgctgcggctcctgcgcgctccgctactgttgcgccgcggccgacgccaggctggagcagggcggctgcaccaacgaccgccgcgaactggagcacccaggcatcactgcgccctgtctacgtcccctttctcatcgtcggctccatcttcattgcgttcatcatcctgggctctgtagtggctatttattgttgcacctgtttgagacccaaggagccctcgcagcagccaatccgcttctcactccgcagctatcagacagagaccctgcccatgatcctgacctccaccagccccagggcaccctcccggcagtccagcacagccacgagctccagctccacaggcggctccatccgcaggttctcctttgccagggctgagccgggctgcctggtgccctcaccgcccccgccatacaccaccagccactcaatccacctggctcagccatctggtttcctggtgtcaccccagtatttcgcttaccccctccagcaggagcccccactgcctgggaagagctgtccagacttcagttccagttgacacgcccaggccatgaatccacaactcagtcagatggcagacaggtggagccctgctcccattgccacatgcaattctgagaaaatttcccttgtaactgatcagtgtcatggaggagcatgctaggaaaacacagcaccttctaatttgaaagttcctgtctccaatcacagaaaggctaaaccagagaactgttttctggttttgcaaacatgtgatcattacatttcaatctatgctacttttattcaaaatatgcagcagtttgactttaaagttgcaaactggctaaaaacgttttactggacattcagctatattgcttagaaaagggctacatgtttctttttcatataagttgttcattgagttatgataggaatatattcataaataagcaaagaaaaatacctaattgtaattatcaaaggttcacttaaaaaattaactattaggtaaacttaagggggcagtgaaaaatctatttatgatttcgggagtaacctaaccatgaataatattagcataatgagaacatttactttttaaataaataactaaattttgtttacaatatgagtttttccagaatacaaggtttcaataatcacatgaggagtttaaagttttaaatatatactcagacattcattgtaacacagagtgtatgtaaaatcatttcccccactcactggagggagtatttattgcagactttttgttcagcaacatttagtgtttcagtgaaagttggacagttggggcttaaaacatttatttgtaaaatgagctatgttcaaatgtaaatatttgtaatttaatgtatttaccacattgactgtactaattatttagtagtcatactgtaatttttatgttaataataactggagttcaaagtctagctattggtataatcatctaatattatatatatctccagtgcccctgaattttatgtttgatgactatatatttgggcatatatcttgttggattagaataaataaaacactttatattttcatgaactcta

SEQ ID NO: 3104 - protein, 182 aa, Homo sapiens
MRALLALCLLLGWLRWGPAGAQQSGEYCHGWVDVQGNYHEGFQCPEDFDTLDATICCGSCALRYCCAAADARLEQGGCTNDRRELEHPGITAPCLRPLSHRRLHLHCVHHPGLCSGYLLLHLFETQGALAAANPLLTPQLSDRDPAHDPDLHQPQGTLPAVQHSHELQLHRRLHPQVLLCQG

SEQ ID NO: 3105 - DNA, 5918 bp, Homo sapiens
aatcttcagctacttggagcaacagccattgaggataaattacaagatcaagtgcctgaaaccatagaaacgctaatgaaagcagacatcaaaatctggatccttacaggggacaagcaagaaactgccattaacatcggacactcctgcaaactgttgaagaagaacatgggaatgattgttataaatgaaggctctcttgatggtttctcctcttcaaaaatctgaagttgttgagatggttaagaaacaagtcaaagtcgtaacgcttgcaatcggtgatggagcaaatgatgtcagcatgatacagacagcgcacgttggtgttggtatcagtggcaatgaaggcctgcaggcagctaattcctctgactactccatagctcagttcaaatatttgaagaatttactgatgattcatggtgcctggaactataacagagtctccaagtgcatcttatactgcttctacaagaatatagtgctctatattatcgagatctggtttgcctttgttaatggcttttctggacagatcctctttgaaagatggtgtataggtctctataacgtgatgtttacagcaatgcctcctttaactcttggaatatttgagagatcatgcagaaaagagaacatgttgaagtaccctgaattatacaaaacatctcagaatgccctggacttcaacaccaaggttttctgggttcattgtttaaatggcctcttccactcagttattctgttttggtttccactaaaagcccttcagtatggtactgcatttggaaatgggaaaacctcggattatctgctactgggaaactttgtgtacacttttgtggtgataactgtgtgtttgaaagctggattggagacatcatattggacatggttcagccacatagcgatatgggggagcatcgcactctgggtggtgttttttggaatctactcatctctgtggcctgccattccgatggcccctgatatgtcaggagaggcagccatgttgttcagttctggagtcttttggatgggcttgttattcatccctgtggcatctctgctccttgatgtggtgtacaaggttatcaagaggactgcttttaaaacattggtcgatgaagttcaggagctggaggcaaaatctcaagacccaggagcagttgtacttggaaaaagcctgaccgagagggcgcaactgctcaagaacgtctttaagaagaaccacgtgaacttgtaccgctctgaatccttgcaacaaaatctgctccatgggtatgcgttctctcaagatgaaaatggaatcgtttcacagtctgaagtgataagagcatatgataccacgaaacagaggcccgacgaatggtgatggggagagcctgaaaggcaggctctgttacctctctaaggagagctaccaggttgtcaccgcagtctgctaaccaattccagtctggtccatgaagaggaaaggtagatctgagctcatctcgctgatggacattcagattcatgtatattatagacataagcactgtgcaactgtactgtaacaccatctcttttggatttttttaaggtatttgctaagtctttgtaaacggaaattgaaaatgacctggtatcttgccagagggctttcttaaacggagaataagtcagtattcttatgccattactgtggggctgtaactgactgtcagtttattggctgtaccacaaggtaaccaaccattaaaaaactctaaatgatatttagttaaagggactcttggtatccagacttagatttcaggatatgctgaaacaaaccagcattcttaaggaactgactcaccttcctgagcaaaatttctaaacaagcatttgtgtccaaaattgtcttgataaatgtttgccaaagaggttcagtaagtgtttttctagttcagtagtcatatgcccagaaatgtaagagaaagtttacttccagttccgctgtaagatctgcatgcctgactttccaaatgtaagagtgatttacaaaaatgaatatttcaaggcatttgctactaaaatcggtgatgttgcacctttggccttacaaatgcttctttgttgtttgtcgtgtttatttgttagaggacacacgtgttaatgtgactctgttgttatgacactgatttttcaaactatgtatgtttcaggtatttctgatgaagtttcatcatcatttagatttttctaaaaatctggctaatgcagtagattgagtgatgtcattttgtcttaaagtttttcctcttaagaaacatatgctacgtatttacgtgggatttccaaagcttctgttgcaatatttggaataacatgtcagataaatgcatgggcttttgtcctgtgttccagttcccactagagatgcctgtgtcttgtgtagcacacccagtgttatggtgactgccccctatactgaagactgaaaattatttcacagttcactcatcaaatagttcccaaaattcgtcacatgctgcttattgggacaaataggtagtacattttccccatttaaaaaatgcggattttactcaggccggtaactttacagtcagaggacacgttcatcatgagtagcttttgttagtatgttttaaaatgtatcttcagttcaattattttcagcatttacaagacatctgaaaatggctattttgctaccaacagtaaatgaaggggctgtttaaaaaccacaaccagttttctacactattttttaaataatactttcatttgaaaaaaaggaattagttttcagatacacttcagagattgaagcaaactatttgccttttactcaaaagcctgcttgcctttacatggacttaccagcaaaataggtagaactttctcttttaaaaaaagtcaactagaattgagaagaggtgattttttttcagatcgcttctcgagtttaatattttcacattcttttcaccctttttctcaatctagatttaaaattaggatatatgtcatttccttgtctgtatttgtagctccttagttaccagtatgcctctccattttctacaaataagaggttataacacatatacataattctaaccttaagggaacacacgtttacatactttacttcccaagcccttcctgtttggggtacagattgagagagtcatgaatcaacacatctagcaagaccacaggtgtaagagtctaagatcgtcttcaaaattctgaagtcccagtctttacctgtccagtgaatgaatattcagagcagcttttcctgggcttcccagtggtgatagctgaggtcaaaccacaaaaaataagaaagcaagagtgaaatgcacccctccagagaaacactttgtagtgtttaattctgttaatagagaagagctgcttctgtttgcgctcacttcatcagtggcacccttctgcagaattttaatataaaaacattatggatataatagaactggattttctgacttaaaaatgtaagttttattttaatcttgaaacgtggattgtttctgtggagctcttaaacatgagaagaatacttacggttgataatgtgtaacatgatctgaaatgtgactaatttgagcctctttgtcccatcgtcctgtttttgaattattgacattgtcagtctctttgcttcctgggtgagacttggggtttgagggacagggaatgaccttcttggtgaaacttaaaatataacattgcaattgcagtgactttacagtgttaaattagagaaaatagtctgattttttaaaccttccttaactggaaaaaagtcacatggttttaccaggattgaaataaacagtcaatgtgacttttaacatgtgtttttttgaaataaagggcacgtactcttcaattaaaaagttccttatagggactctggcaaatgctaacacagttgctttacaatgtttacaattcagacaatacgacttataatagaaaatcctcattcatttagcattgaaaagctggaagttgcttctttaatgttgaatagtatacagtggtattgagcatggactttctaaatgttttatatatacatataaaaatatattggtgtctcacacccagaaagatgttatattgtagatattattaggaaaacagtgtttctcaggaacgttgtaaattttaaatgatatatgtacttcccgtcctcccacctccactctgtgctctaatgtgagactgcttcagcagtgttgctaagttaatggaaaactttttctaatcaagtcaggtgaatgtgtattctgctaaataatgttagccatttacatgaattgtatggtcattaaatggaatcagtgattcctctttaatttccagaggggaaatgaattatggaaatcagtcagcattctgatcattaaattttatactttaattttgccgttcagcattctaaatatccaatgtgaaagtcacatgataatttgttttgcattgcgtgcactgtacaacacttacaacttgtcatttaaaatgttttctcgggaaatgaatgctagtcagaaagtaatagattgtattattcatagttttaaaattatgacaatgtcataattactacaaagctaaataatcgtgtttatttttgtgcagttgccctttgatagttcctggttttaaaacctattaagtgtataatcttacaaatagtcatctacaaaatttatggagaaagtgcccagcccattcacatcacatggaccaggaattcttttgtaaatgacttaaggtaacatcatgcagttcagtgcctaataaatgctttttaatgatgaacatttctataatgactcgtaagataccatagtctgatttttctcacattaaaataactgaagtcacttgtgtaacgtagttatactttgctgcattttaattaaccttcaacagctattaaagtggaatgtaagttaaattttgaaggaaaggaaataaatgttttccatatttcgtcttgatttactttctgtatgagaacagctgtgtttttgataggtttatggtttgcatgagttcatatttaaagtgatccaggccaatgcatggctattgctgtaaatcttgatgtttatttctgccttgtaaagttctatcacggcctacctggaatttaaaattcagtagacaaattaattggtcctctgcacaacttttttaataagtagattattttacaaagaaatttgaacaaatttaattgaatcttttgtttagcttgcctctaagaacttttcttaataaagctcccaaaacttctcagcaaataaatctcccttaagtaggaaagctagatttcatatttgcttactttgaattaacagcaactttccacaggtaaatctgttcttgcaaagatgtgagcagaatagttaaaaataatatttttatgtttcatggttctaaatggaagccataaatgcagtaaatactatctgttgtttaactactttaatcgtcattttttacattttcaagtttattaggttaagaaaaacagggcagccttggaaggcagctactacagaaaactgcagttttgcgttaaagataaagtagtattttcagctccctgaaaaaccattcctgctgaaactgctgtagaaattgtgaagctgcatgagtggagagtattgaatctgtggttatagtagttttctcaggtttgtttatcttgatgtttgatgcactgtgttttatagttattaaaattgagtaatattatttctatgcagtgttatgtgtcattggccttttgtgaatgtgcatgttttaaactgcaaattttaaacattttgtcctctaattgttattaaaaatgaaataaactttaccattacttaaaa

SEQ ID NO: 3106 - protein, 395 aa, Homo sapiens
MKALLMVSPLQKSEVVEMVKKQVKVVTLAIGDGANDVSMIQTAHVGVGISGNEGLQAANSSDYSIAQFKYLKNLLMIHGAWNYNRVSKCILYCFYKNIVLYIIEIWFAFVNGFSGQILFERWCIGLYNVMFTAMPPLTLGIFERSCRKENMLKYPELYKTSQNALDFNTKVFWVHCLNGLFHSVILFWFPLKALQYGTAFGNGKTSDYLLLGNFVYTFVVITVCLKAGLETSYWTWFSHIAIWGSIALWVVFFGIYSSLWPAIPMAPDMSGEAAMLFSSGVFWMGLLFIPVASLLLDVVYKVIKRTAFKTLVDEVQELEAKSQDPGAVVLGKSLTERAQLLKNVFKKNHVNLYRSESLQQNLLHGYAFSQDENGIVSQSEVIRAYDTTKQRPDEW

SEQ ID NO: 3107 - DNA, 8147 bp, Homo sapiens
cccaggctgcagctgagcgctctgcgcggcgcagccgggtctcccgcgtgtaccacgccgtgacaggtgcagagtccgggctgaggacccacctgcagccgccgccgcgatgcccaccatgcggaggaccgtgtcggagatccgctcgcgcgccgaaggttatgagaagacagatgatgtttcagagaagacctcactggctgaccaggaggaagtaaggactattttcatcaaccagccccagctgacaaaattctgcaataaccatgtcagcactgcaaaatacaacataatcacattccttccaagatttctctactctcagttcagaagagctgctaattcattttttctctttattgcactgctgcagcaaatacctgatgtgtcaccaacaggtcgttatacaacactggttcctctcttatttattttagctgtggcagctatcaaagagataatagaagatattaaacgacataaagctgataatgcagtgaacaagaaacaaacgcaagttttgagaaatggtgcttgggaaattgtccactgggaaaaggtggcagtaggggagatagtgaaagtgaccaatggggaacatctcccagcagatctcatcagtctgtcctcaagtgagccccaagccatgtgctacattgaaacatccaacttagatggtgaaacaaacttgaaaattagacagggcttaccagcaacatcagatatcaaagacgttgacagtttgatgaggatttctggcagaattgagtgtgaaagtccaaacagacatctctacgattttgttggaaacataaggcttgatggacatggcaccgttccactgggagcagatcagattcttcttcgaggagctcagttgagaaatacacagtgggttcatggaatagttgtctacactggacatgacaccaagctgatgcagaattcaacaagtccaccacttaagctctcaaatgtggaacggattacaaatgtacaaattttgattttattttgtatcttaattgccatgtctcttgtctgttctgtgggctcagccatttggaatcgaaggcattctggaaaagactggtatctcaatctaaactatggtggcgctagtaattttggactgaatttcttgaccttcatcatccttttcaacaatctcattcctatcagcttattggttacattagaagttgtgaaatttacccaggcatacttcataaattgggatcttgacatgcactatgaacccacagacactgctgctatggctcgaacatctaatctgaatgaggaacttggccaggttaaatacatattttctgacaaaactggtactctgacatgcaatgtaatgcagtttaagaagtgcaccatagcgggagttgcttatggccatgtccctgaacctgaggattatggctgctctcctgatgaatggcagaactcacagtttggagatgaaaaaacatttagtgattcatcattgctggaaaatctccaaaataatcatccaactgcacctataatatgtgaatttcttacaatgatggcagtctgtcacacagcagtgccagagcgagaaggtgacaagattatttatcaagcagcatctccagatgagggagcattggtcagagcagccaagcaattgaattttgttttcactggaagaacacccgactcggtgattatagattcactggggcaggaagaaagatatgaattgctcaatgtcttggagtttaccagtgctaggaaaagaatgtcagtgattgttcgcactccatctggaaagttacgactctactgcaaaggagctgacactgtaatttatgatcgactggcagagacgtcaaaatacaaagaaattaccctaaaacatttagagcagtttgctacagaagggttaagaactttatgttttgctgtggctgagatttcagagagcgactttcaggagtggcgagcagtctatcagcgagcatctacatctgtgcagaacaggctactcaaactcgaagagagttatgagttgattgaaaagaatcttcagctacttggagcaacagccattgaggataaattacaagatcaagtgcctgaaaccatagaaacgctaatgaaagcagacatcaaaatctggatccttacaggggacaagcaagaaactgccattaacatcggacactcctgcaaactgttgaagaagaacatgggaatgattgttataaatgaaggctctcttgatggaacaagggaaactctcagtcgtcactgtactacccttggtgatgctctccggaaagagaatgattttgctcttataattgatgggaaaaccctcaaatatgccttaacctttggagtacgacagtatttcctggacttagctttgtcatgcaaagctgtcatttgctgtcgggtttctcctcttcaaaaatctgaagttgttgagatggttaagaaacaagtcaaagtcgtaacgcttgcaatcggtgatggagcaaatgatgtcagcatgatacagacagcgcacgttggtgttggtatcagtggcaatgaaggcctgcaggcagctaattcctctgactactccatagctcagttcaaatatttgaagaatttactgatgattcatggtgcctggaactataacagagtctccaagtgcatcttatactgcttctacaagaatatagtgctctatattatcgagatctggtttgcctttgttaatggcttttctggacagatcctctttgaaagatggtgtataggtctctataacgtgatgtttacagcaatgcctcctttaactcttggaatatttgagagatcatgcagaaaagagaacatgttgaagtaccctgaattatacaaaacatctcagaatgccctggacttcaacaccaaggttttctgggttcattgtttaaatggcctcttccactcagttattctgttttggtttccactaaaagcccttcagtatggtactgcatttggaaatgggaaaacctcggattatctgctactgggaaactttgtgtacacttttgtggtgataactgtgtgtttgaaagctggattggagacatcatattggacatggttcagccacatagcgatatgggggagcatcgcactctgggtggtgttttttggaatctactcatctctgtggcctgccattccgatggcccctgatatgtcaggagaggcagccatgttgttcagttctggagtcttttggatgggcttgttattcatccctgtggcatctctgctccttgatgtggtgtacaaggttatcaagaggactgcttttaaaacattggtcgatgaagttcaggagctggaggcaaaatctcaagacccaggagcagttgtacttggaaaaagcctgaccgagagggcgcaactgctcaagaacgtctttaagaagaaccacgtgaacttgtaccgctctgaatccttgcaacaaaatctgctccatgggtatgcgttctctcaagatgaaaatggaatcgtttcacagtctgaagtgataagagcatatgataccacgaaacagaggcccgacgaatggtgatggggagagcctgaaaggcaggctctgttacctctctaaggagagctaccaggttgtcaccgcagtctgctaaccaattccagtctggtccatgaagaggaaaggtagatctgagctcatctcgctgatggacattcagattcatgtatattatagacataagcactgtgcaactgtactgtaacaccatctcttttggatttttttaaggtatttgctaagtctttgtaaacggaaattgaaaatgacctggtatcttgccagagggctttcttaaacggagaataagtcagtattcttatgccattactgtggggctgtaactgactgtcagtttattggctgtaccacaaggtaaccaaccattaaaaaactctaaatgatatttagttaaagggactcttggtatccagacttagatttcaggatatgctgaaacaaaccagcattcttaaggaactgactcaccttcctgagcaaaatttctaaacaagcatttgtgtccaaaattgtcttgataaatgtttgccaaagaggttcagtaagtgtttttctagttcagtagtcatatgcccagaaatgtaagagaaagtttacttccagttccgctgtaagatctgcatgcctgactttccaaatgtaagagtgatttacaaaaatgaatatttcaaggcatttgctactaaaatcggtgatgttgcacctttggccttacaaatgcttctttgttgtttgtcgtgtttatttgttagaggacacacgtgttaatgtgactctgttgttatgacactgatttttcaaactatgtatgtttcaggtatttctgatgaagtttcatcatcatttagatttttctaaaaatctggctaatgcagtagattgagtgatgtcattttgtcttaaagtttttcctcttaagaaacatatgctacgtatttacgtgggatttccaaagcttctgttgcaatatttggaataacatgtcagataaatgcatgggcttttgtcctgtgttccagttcccactagagatgcctgtgtcttgtgtagcacacccagtgttatggtgactgccccctatactgaagactgaaaattatttcacagttcactcatcaaatagttcccaaaattcgtcacatgctgcttattgggacaaataggtagtacattttccccatttaaaaaatgcggattttactcaggccggtaactttacagtcagaggacacgttcatcatgagtagcttttgttagtatgttttaaaatgtatcttcagttcaattattttcagcatttacaagacatctgaaaatggctattttgctaccaacagtaaatgaaggggctgtttaaaaaccacaaccagttttctacactattttttaaataatactttcatttgaaaaaaaggaattagttttcagatacacttcagagattgaagcaaactatttgccttttactcaaaagcctgcttgcctttacatggacttaccagcaaaataggtagaactttctcttttaaaaaaagtcaactagaattgagaagaggtgattttttttcagatcgcttctcgagtttaatattttcacattcttttcaccctttttctcaatctagatttaaaattaggatatatgtcatttccttgtctgtatttgtagctccttagttaccagtatgcctctccattttctacaaataagaggttataacacatatacataattctaaccttaagggaacacacgtttacatactttacttcccaagcccttcctgtttggggtacagattgagagagtcatgaatcaacacatctagcaagaccacaggtgtaagagtctaagatcgtcttcaaaattctgaagtcccagtctttacctgtccagtgaatgaatattcagagcagcttttcctgggcttcccagtggtgatagctgaggtcaaaccacaaaaaataagaaagcaagagtgaaatgcacccctccagagaaacactttgtagtgtttaattctgttaatagagaagagctgcttctgtttgcgctcacttcatcagtggcacccttctgcagaattttaatataaaaacattatggatataatagaactggattttctgacttaaaaatgtaagttttattttaatcttgaaacgtggattgtttctgtggagctcttaaacatgagaagaatacttacggttgataatgtgtaacatgatctgaaatgtgactaatttgagcctctttgtcccatcgtcctgtttttgaattattgacattgtcagtctctttgcttcctgggtgagacttggggtttgagggacagggaatgaccttcttggtgaaacttaaaatataacattgcaattgcagtgactttacagtgttaaattagagaaaatagtctgattttttaaaccttccttaactggaaaaaagtcacatggttttaccaggattgaaataaacagtcaatgtgacttttaacatgtgtttttttgaaataaagggcacgtactcttcaattaaaaagttccttatagggactctggcaaatgctaacacagttgctttacaatgtttacaattcagacaatacgacttataatagaaaatcctcattcatttagcattgaaaagctggaagttgcttctttaatgttgaatagtatacagtggtattgagcatggactttctaaatgttttatatatacatataaaaatatattggtgtctcacacccagaaagatgttatattgtagatattattaggaaaacagtgtttctcaggaacgttgtaaattttaaatgatatatgtacttcccgtcctcccacctccactctgtgctctaatgtgagactgcttcagcagtgttgctaagttaatggaaaactttttctaatcaagtcaggtgaatgtgtattctgctaaataatgttagccatttacatgaattgtatggtcattaaatggaatcagtgattcctctttaatttccagaggggaaatgaattatggaaatcagtcagcattctgatcattaaattttatactttaattttgccgttcagcattctaaatatccaatgtgaaagtcacatgataatttgttttgcattgcgtgcactgtacaacacttacaacttgtcatttaaaatgttttctcgggaaatgaatgctagtcagaaagtaatagattgtattattcatagttttaaaattatgacaatgtcataattactacaaagctaaataatcgtgtttatttttgtgcagttgccctttgatagttcctggttttaaaacctattaagtgtataatcttacaaatagtcatctacaaaatttatggagaaagtgcccagcccattcacatcacatggaccaggaattcttttgtaaatgacttaaggtaacatcatgcagttcagtgcctaataaatgctttttaatgatgaacatttctataatgactcgtaagataccatagtctgatttttctcacattaaaataactgaagtcacttgtgtaacgtagttatactttgctgcattttaattaaccttcaacagctattaaagtggaatgtaagttaaattttgaaggaaaggaaataaatgttttccatatttcgtcttgatttactttctgtatgagaacagctgtgtttttgataggtttatggtttgcatgagttcatatttaaagtgatccaggccaatgcatggctattgctgtaaatcttgatgtttatttctgccttgtaaagttctatcacggcctacctggaatttaaaattcagtagacaaattaattggtcctctgcacaacttttttaataagtagattattttacaaagaaatttgaacaaatttaattgaatcttttgtttagcttgcctctaagaacttttcttaataaagctcccaaaacttctcagcaaataaatctcccttaagtaggaaagctagatttcatatttgcttactttgaattaacagcaactttccacaggtaaatctgttcttgcaaagatgtgagcagaatagttaaaaataatatttttatgtttcatggttctaaatggaagccataaatgcagtaaatactatctgttgtttaactactttaatcgtcattttttacattttcaagtttattaggttaagaaaaacagggcagccttggaaggcagctactacagaaaactgcagttttgcgttaaagataaagtagtattttcagctccctgaaaaaccattcctgctgaaactgctgtagaaattgtgaagctgcatgagtggagagtattgaatctgtggttatagtagttttctcaggtttgtttatcttgatgtttgatgcactgtgttttatagttattaaaattgagtaatattatttctatgcagtgttatgtgtcattggccttttgtgaatgtgcatgttttaaactgcaaattttaaacattttgtcctctaattgttattaaaaatgaaataaactttaccattacttaaaa

SEQ ID NO: 3108 - protein, 1164 aa, Homo sapiens; identical to SEQ ID NO: 294

SEQ ID NO: 3109 - DNA, 466 bp, Homo sapiens
gtttctcctcttcaaaaatctgaagttgttgagatggttaagaaacaagtcaaagtcgtaacgcttgcaatcggtgatggagcaaatgatgtcagcatgatacagacagcgcacgttggtgttggtatcagtggcaatgaaggcctgcaggcagctaattcctctgactactccatagctcagttcaaatatttgaagaatttactgatgattcatggtgcctggaactataacagagtctccaagtgcatcttatactgcttctacaagaatatagtgctctatattatcgagaacactgacattcaagcaaataacaatttatacagtttatttacatagatttatcaagataccaggaatttaaagccactgccagcaataaatctgcttataaaaagttaattttataaaataagaatgtccaacttgtcgctttttaaatctaaattgacagcaataaagt

SEQ ID NO: 3110 - protein, 102 aa, Homo sapiens
MVKKQVKVVTLAIGDGANDVSMIQTAHVGVGISGNEGLQAANSSDYSIAQFKYLKNLLMIHGAWNYNRVSKCILYCFYKNIVLYIIENTDIQANNNLYSLFT

SEQ ID NO: 3111 - DNA, 555 bp, Homo sapiens
ggtactctgacatgcaatgtaatgcagtttaagaagtgcaccatagcgggagttgcttatgggcagaactcacagtttggagatgaaaaaacatttagtgattcatcattgctggaaaatctccaaaataatcatccaactgcacctataatatgtgaatttcttacaatgatggcagtctgtcacacagcagtgccagagcgagaaggtgacaagattatttatcaagcagcatctccagatgagggagcattggtcagagcagccaagcaattgaattttgttttcactggaagaacacccgactcggtgattatagattcactggggcaggaagaaagatatgaattgctcaatgtcttggagtttaccagtgctaggaaaagaatgtcagtgattgttcgcactccatctggaaagttacgactctactgcaaaggagctgacactgtaatttatgatcgactggcagagacgtcaaaatacaaagaaattaccctaaaacatttagagcagtttgctacagaagggttaagaactttatgttttgctgtg

SEQ ID NO: 3112 - protein, 177 aa, Homo sapiens
MQFKKCTIAGVAYGQNSQFGDEKTFSDSSLLENLQNNHPTAPIICEFLTMMAVCHTAVPEREGDKIIYQAASPDEGALVRAAKQLNFVFTGRTPDSVIIDSLGQEERYELLNVLEFTSARKRMSVIVRTPSGKLRLYCKGADTVIYDRLAETSKYKEITLKHLEQFATEGLRTLCFA

SEQ ID NO: 3113 - DNA, 430 bp, Homo sapiens
acatttagtgattcatcattgctggaaaatctccaaaataatcatccaactgcacctataatatgtgaatttcttacaatgatggcagtctgtcacacagcagtgccagagcgagaaggtgacaagattatttatcaagcagcatctccagatgagggagcattggtcagagcagccaagcaattgaattttgttttcactggaagaacacccgactcggtgattatagattcactggggcaggaagaaagatatgaattgctcaatgtcttggagtttaccaggtaaaacatctgctcagtgatttgtatggataagataaatttatatccatttttattttttcccttttgaataactagaaagtatgttttgtttttatttaactaaatttgtttagacaaaatattaaatcaaaatctttagtaca

SEQ ID NO: 3114 - protein, 69 aa, Homo sapiens
MMAVCHTAVPEREGDKIIYQAASPDEGALVRAAKQLNFVFTGRTPDSVIIDSLGQEERYELLNVLEFTR

SEQ ID NO: 3115 - DNA, 324 bp, Homo sapiens
cattttagaatgcttgaatatattttgtgatacaatcatgaaatctgtgatgtcttacttagaaatgcaggccaaattacatttaatttattgagggtttggagacataacactttactcataaagtacattaacaaatagatcagtgggctggtataaatgaactgggtttactctattttttacccccttcaggcagaactcacagtttggagatgaaaaaacatttagtgattcatcattgctggaaaatctccaaaataatcatccaactgcacctataatatgtgaatttcttacaatgatggcagtctgtcacacagc

SEQ ID NO: 3116 - protein, 36 aa, Homo sapiens
YNHEICDVLLRNAGQITFNLLRVWRHNTLLIKYINK

SEQ ID NO: 3117 - DNA, 1032 bp, Homo sapiens
acaatccaattcctagatgctttctccagttatggccctgactgggatctccgaagaatgactcagctgaaactatttcatcattgcctacatttgtcttcagacgacctgcagtacaaacttggcttaaacctgcagttgacaatggattcaccgtgggagaataaattacaatggataaaaaacagcattacaatccctcaataaaatgggattttaacagacaaagctcctggtatgtggtcgttctcaggcccaaaggcccattttgcttttggctgcaactctgtaactctgtaacagagaccaagtgcctgcagggagcagatgtttggggcagtatctgctaaggtggctttgctgaaacttgtttctctcattgggtcttggaagtggcgaataggacgttcctatagaaaaactcagaaagagactgtgaaagataatcttaaagaggcactcacgaaacacaagctccttctccgggaaaaagaatcatcacccttgttatcccatgaaaattcatcttctccttttcagctgatatgaggacttgatctgtcctttcctataagtgccatctgtgtttaaatgaggctgttactctaactcaaagcagacttgcaagagtaaaataatcaatcttcatcatattgctgcactttcgacagttaattttctagagtaatttgtcattgtgaggagcataagatttgtctgaatttgtgtcaaaggttattgactgaattgccacctcatcttttcagtcaatctataaatatgggcaagtttgggcagaggctaatggccttctcactaaggggatgagattgtccaagttaggcaactgataagaggtagaaatatctattgtgtcacccatttcttgtggtagcattgacttagagttaatctcagaaacttcacttaaccttcttaatccttttcttcctgtaaaacaaggctaaaaattgtcataactatattctagtttccacaaaagctaatctaagtattaaaatttttattgtg

SEQ ID NO: 3118 - protein, 73 aa, Homo sapiens [sequence omitted]

SEQ ID NO: 3119 - DNA, 439 bp, Homo sapiens
agctgccccttagaggaaaaatttattgttctagcttctaggaatgttattggcaggtggcatttaaatctcagccccttcagggtttacctgaactgcagagaacgagcctacctgaccaagtacaagatcctttccaagtcagcccaggagggatgactgacagagcagaggcagaaaggaccagccattctggagcaggataagtgttgatcccaagggctcgcatagaaaacacgtgcacattaaactcagtatcctaatctgcttgtagacaaatgttacctgcaacatccagtggaagagagtaggaattcgggaagattaaagttgccaccattgcagagaaaaatcattattgagccgggtctcaaatttattattattaccattttccacatactggtgtccgaaaataaacctgaaataaatgcttaag

SEQ ID NO: 3120 - protein, 36 aa, Homo sapiens
QSRGRKDQPFWSRISVDPKGSHRKHVHIKLSILICL

SEQ ID NO: 3121 - DNA, 3080 bp, Homo sapiens
cctggtctggagcgaccaatgccgtcctccttcctccaggcacctgttcaccgaagttgaggctggtcacaactccggcggcccaaggagctgctcggttcacccacaaggaatgagagctgcctgcctgctgctgcttggagagccccagacagtcgcttgaagaggtgtgtggatgtctcctagatcttgacttgctcctgaggaaatattgtgtgactgagtttcctgttatactgctctccaatccatcatgaaccagccagagtctgccaacgatcctgaacccctgtgtgcagtgtgtggccaagcccactccttggaggaaaaccacttctacagctatccagaggaagtggatgatgacctcatctgccacatctgcctgcaggctttgctggaccccctggacactccgtgtggacacacctactgcaccctctgcctcaccaacttcctggtggagaaggacttctgtcccatggaccgcaagcctctggttctgcagcactgcaagaagtccagcatcctggtcaacaaactcctcaacaagctactggtgacctgcccattcagggagcactgcacccaggtgttgcagcgctgtgacctcgagcatcactttcaaaccagctgtaaaggtgcctcccactacggcctgaccaaagataggaagaggcgctcacaagatggctgtccagacggctgtgcgagcctcacagccacggctccctccccagaggtttctgcagctgccaccatctccttaatgacagacgagcctggcctagacaaccctgcctacgtgtcctcggcagaggacgggcagccagcaatcagcccagtggactctggccggagcaaccgaactagggcacggccctttgagagatccactattagaagcagatcatttaaaaaaataaatcgagctttgagtgttcttcgaaggacaaagagcgggagtgcagttgccaaccatgccgaccagggcagggaaaattctgaaaacaccactgcccctgaagtctttccaaggttgtaccacctgattccagatggtgaaattaccagcatcaagatcaatcgagtagatcccagtgaaagcctctctattaggctggtgggaggtagcgaaaccccactggtccatatcattatccaacacatttatcgtgatggggtgatcgccagagacggccggctactgccaggagacatcattctaaaggtcaacgggatggacatcagcaatgtccctcacaactacgctgtgcgtctcctgcggcagccctgccaggtgctgtggctgactgtgatgcgtgaacagaagttccgcagcaggaacaatggacaggccccggatgcctacagaccccgagatgacagctttcatgtgattctcaacaaaagtagccccgaggagcagcttggaataaaactggtgcgcaaggtggatgagcctggggttttcatcttcaatgtgctggatggcggtgtggcatatcgacatggtcagcttgaggagaatgaccgtgtgttagccatcaatggacatgatcttcgatatggcagcccagaaagtgcggctcatctgattcaggccagtgaaagacgtgttcacctcgtcgtgtcccgccaggttcggcagcggagccctgacatctttcaggaagccggctggaacagcaatggcagctggtccccagggccaggggagaggagcaacactcccaagcccctccatcctacaattacttgtcatgagaaggtggtaaatatccaaaaagaccccggtgaatctctcggcatgaccgtcgcagggggagcatcacatagagaatgggatttgcctatctatgtcatcagtgttgagcccggaggagtcataagcagagatggaagaataaaaacaggtgacattttgttgaatgtggatggggtcgaactgacagaggtcagccggagtgaggcagtggcattattgaaaagaacatcatcctcgatagtactcaaagctttggaagtcaaagagtatgagccccaggaagactgcagcagcccagcagccctggactccaaccacaacatggccccacccagtgactggtccccatcctgggtcatgtggctggaattaccacggtgcttgtataactgtaaagatattgtattacgaagaaacacagctggaagtctgggcttctgcattgtaggaggttatgaagaatacaatggaaacaaaccttttttcatcaaatccattgttgaaggaacaccagcatacaatgatggaagaattagatgtggtgatattcttcttgctgtcaatggtagaagtacatcaggaatgatacatgcttgcttggcaagactgctgaaagaacttaaaggaagaattactctaactattgtttcttggcctggcacttttttatagaatcaatgatgggtcagaggaaaacagaaaaatcacaaataggctaagaagttgaaacactatatttatcttgtcagtttttatatttaaagaaagaatacattgtaaaaatgtcaggaaaagtatgatcatctaatgaaagccagttacacctcagaaaatatgattccaaaaaaattaaaactactagttttttttcagtgtggaggatttctcattactctacaacattgtttatattttttctattcaataaaaagccctaaaacaactaaaatgatttgtataccccactgaattcaagctgatttaaatttaaaatttggtatatgctgaagtctgccaagggtacattatggccatttttaatttacagctaaaatattttttaaaatgcattgctgagaaacgttgctttcatcaaacaagaataaatatttttcagaagttatagttgtcttttagtatgtgatactaattaagattacttttgtattatcactatttaaaagatcctagtaatttattctttcaaataccatgttatttgttaccatcaccgatgaatacctcctaggcttatccctaaaaatgctcgctcagagaattaattataaacttgttttgtttttagtaagaa

SEQ ID NO: 3122 - protein, 728 aa, Homo sapiens
MNQPESANDPEPLCAVCGQAHSLEENHFYSYPEEVDDDLICHICLQALLDPLDTPCGHTYCTLCLTNFLVEKDFCPMDRKPLVLQHCKKSSILVNKLLNKLLVTCPFREHCTQVLQRCDLEHHFQTSCKGASHYGLTKDRKRRSQDGCPDGCASLTATAPSPEVSAAATISLMTDEPGLDNPAYVSSAEDGQPAISPVDSGRSNRTRARPFERSTIRSRSFKKINRALSVLRRTKSGSAVANHADQGRENSENTTAPEVFPRLYHLIPDGEITSIKINRVDPSESLSIRLVGGSETPLVHIIIQHIYRDGVIARDGRLLPGDIILKVNGMDISNVPHNYAVRLLRQPCQVLWLTVMREQKFRSRNNGQAPDAYRPRDDSFHVILNKSSPEEQLGIKLVRKVDEPGVFIFNVLDGGVAYRHGQLEENDRVLAINGHDLRYGSPESAAHLIQASERRVHLVVSRQVRQRSPDIFQEAGWNSNGSWSPGPGERSNTPKPLHPTITCHEKVVNIQKDPGESLGMTVAGGASHREWDLPIYVISVEPGGVISRDGRIKTGDILLNVDGVELTEVSRSEAVALLKRTSSSIVLKALEVKEYEPQEDCSSPAALDSNHNMAPPSDWSPSWVMWLELPRCLYNCKDIVLRRNTAGSLGFCIVGGYEEYNGNKPFFIKSIVEGTPAYNDGRIRCGDILLAVNGRSTSGMIHACLARLLKELKGRITLTIVSWPGTFL

SEQ ID NO: 3123 - DNA, 2890 bp, Homo sapiens
cctggtctggagcgaccaatgccgtcctccttcctccaggcacctgttcaccgaagttgaggctggtcacaactccggcggcccaaggagctgctcggttcacccacaaggaatgagagctgcctgcctgctgctgcttggagagccccagacagtcgcttgaagaggtgtgtggatgtctcctagatcttgacttgctcctgaggaaatattgtgtgactgagtttcctgttatactgctctccaatccatcatgaaccagccagagtctgccaacgatcctgaacccctgtgtgcagtgtgtggccaagcccactccttggaggaaaaccacttctacagctatccagaggaagtggatgatgacctcatctgccacatctgcctgcaggctttgctggaccccctggacactccgtgtggacacacctactgcaccctctgcctcaccaacttcctggtggagaaggacttctgtcccatggaccgcaagcctctggttctgcagcactgcaagaagtccagcatcctggtcaacaaactcctcaacaagctactggtgacctgcccattcagggagcactgcacccaggtgttgcagcgctgtgacctcgagcatcactttcaaaccagctgtaaaggtgcctcccactacggcctgaccaaagataggaagaggcgctcacaagatggctgtccagacggctgtgcgagcctcacagccacggctccctccccagaggtttctgcagctgccaccatctccttaatgacagacgagcctggcctagacaaccctgcctacgtgtcctcggcagaggacgggcagccagcaatcagcccagtggactctggccggagcaaccgaactagggcacggccctttgagagatccactattagaagcagatcatttaaaaaaataaatcgagctttgagtgttcttcgaaggacaaagagcgggagtgcagttgccaaccatgccgaccagggcagggaaaattctgaaaacaccactgcccctgaagtctttccaaggttgtaccacctgattccagatggtgaaattaccagcatcaagatcaatcgagtagatcccagtgaaagcctctctattaggctggtgggaggtagcgaaaccccactggtccatatcattatccaacacatttatcgtgatggggtgatcgccagagacggccggctactgccaggagacatcattctaaaggtcaacgggatggacatcagcaatgtccctcacaactacgctgtgcgtctcctgcggcagccctgccaggtgctgtggctgactgtgatgcgtgaacagaagttccgcagcaggaacaatggacaggccccggatgcctacagaccccgagatgacagctttcatgtgattctcaacaaaagtagccccgaggagcagcttggaataaaactggtgcgcaaggtggatgagcctggggttttcatcttcaatgtgctggatggcggtgtggcatatcgacatggtcagcttgaggagaatgaccgtgtgttagccatcaatggacatgatcttcgatatggcagcccagaaagtgcggctcatctgattcaggccagtgaaagacgtgttcacctcgtcgtgtcccgccaggttcggcagcggagccctgacatctttcaggaagccggctggaacagcaatggcagctggtccccagggccaggggagaggagcaacactcccaagcccctccatcctacaattacttgtcatgagaaggtggtaaatatccaaaaagaccccggtgaatctctcggcatgaccgtcgcagggggagcatcacatagagaatgggatttgcctatctatgtcatcagtgttgagcccggaggagtcataagcagagatggaagaataaaaacaggtgacattttgttgaatgtggatggggtcgaactgacagaggtcagccggagtgaggcagtggcattattgaaaagaacatcatcctcgatagtactcaaagctttggaagtcaaagagtatgagccccaggaagactgcagcagcccagcagccctggactccaaccacaacatggccccacccagtgactggtccccatcctgggtcatgtggctggaattaccacggtgcttgtataactgtaaagatattgtattacgaagaaacacagctggaagtctgggcttctgcattgtaggaggttatgaagaatacaatggaaacaaaccttttttcatcaaatccattgttgaaggaacaccagcatacaatgatggaagaattagatgtggtgatattcttcttgctgtcaatggtagaagtacatcaggaatgatacatgcttgcttggcaagactgctgaaagaacttaaaggaagaattactctaactattgtttcttggcctggcacttttttatagaatcaatgatgggtcagaggaaaacagaaaaatcacaaataggctaagaagttgaaacactatatttatcttgtcagtttttatatttaaagaaagaatacattgtaaaaatgtcaggaaaagtatgatcatctaatgaaagccagttacacctcagaaaatatgattccaaaaaaattaaaactactagttttttttcagtgtggaggatttctcattactctacaacattgtttatattttttctattcaataaaaagccctaaaacaactaaaatgatttgtataccccactgaattcaagctgatttaaatttaaaatttggtatatgctgaagtctgccaagggtacattatggccatttttaatttacagctaaaatattttttaaaatgcattgctgagaaacgttgctttcatcaaacaagaataaatatttttcagaagtt

SEQ ID NO: 3124 - protein, 728 aa, Homo sapiens; identical to SEQ ID NO: 3122

SEQ ID NO: 3125 - DNA, 1227 bp, Homo sapiens
caggtctaagctacctctttgcacctgggaactctgtgccttttgagagttgaaggcttaaaacaacaacaaccaccacaacaaaactattcacctttttatccaatagaaactaaggctgtaaaggatgatgcccggcatctgctcagcttctgatgaggcctcaggaagcttccaatcatggcagaaggcaaaggggaacccatgtatcacatagcaagagcaggagcaagagaggcgcggggagaggttttaaaccacgtcttgcaagaactcactattgcgaggacagtaccttggggatggtgctaaatcattcatgagaaatctgcccccatgatctaatcacctcccaccaggccccaactccgacactggagattacatttcaacatgagatttgggtggggacaaatatccagactatatcggggctgtaccagcaattgactcctgacatctgttctgactggtcagagtctgttctgataggttggtgcctctactgattattaaatattttatgctataccaattattaaatattttgaaaaccacctactgttacatgggctatcatattgcctagaatatttggtgatggtttcataaatggaaagcaattgatttctgatagtcattccaccgcaacctaaggtcaccatatctattaataattcctgtagatggtagtgggatggagggtgatttaatcaaattgatgacaatttgaagttgccaaactgctgatttttgttctacccttcgtagaagacaatttgtattactctttccctgctgccccactagaaatatattagcacctaaagcttgtatattcatttatcacaagcataatatgttctccttaagctggatagagaatgtttgagttaaaaatgaactgagaccaaagagaagtgacctgttattcaagtccttatactcacaaatgcttggggcaaagggaatgtttggagaaaagtgatgaattctctagacttaaaagccagttggataaaaagcagaactggcagagcctatgccaatgtgggattatggatgcaggaagaagcaagaggaagtagcccaggaacttacagaaattataatgagggctccgaattcttatgggttgtggtactggcattcaggccaggtttaactagatgtccaaaggctgtgcagggggatatctgatatctggaatattcttaggctcaattc

SEQ ID NO: 3126 - protein, 70 aa, Homo sapiens [sequence omitted]

SEQ ID NO: 3127 - DNA, 345 bp, Homo sapiens
aactctgtgccttttgagagttgaaggcttaaaacaacaacaaccaccacaacaaaactattcacctttttatccaatagaaactaagctgggaaaaccaagacatagtgaatctgagaaactgcctaaggacaagctcatcggcaagcggcagagcagtttttaatcaaggcccactttttaaccactggaaagaaaagagggaaggttctgatttcatgctcactgggacacttcctggacacattcagcttcttacccattattcagaaggagaagtagaaacctgtagaagtagccctggggagggtagtttctgataaaggatgtctccatttggaaatt

SEQ ID NO: 3128 - protein, 33 aa, Homo sapiens
MLTGTLPGHIQLLTHYSEGEVETCRSSPGEGSF

SEQ ID NO: 3129 - DNA, 1616 bp, Homo sapiens
accactccagtcactttccaggcaagacagggctaccttcagcatctctagtgaaagtggtgaattagcacttcagaagtgagatggcatggacagaagcttctggggctgagctcaccattggaagcttctttccagcttcctgaaggtctctggaggtctcttcttaccggggaggatgatccctggtggctccctgctgacattcttcaaaactcggctatttccccagtgtcctgctgataaaacagaagaggaaatgatgaaactgtttgcagtggcctgtagtgaagtggctctttctgcccttgctgtgcgtctcactccaggacctcctgaagagcgctgatcctgcactatacatgtggttcttctcctatgcctcccgacttgtcagagaatttcttgaggacatggatgactgtctggcagcgacagttccaggatgccagtgtctctacatcgtgacaactttgaatgtgaccattgtatcacctactaagtccggcagaactagaaattatggctgaagttccagaaagttccagaaagcacatttggccttataatagataattactaactgcaagagctgtgcatttactaaatgatatgctctgccaaggagcgagttccccatcacagagagcagcagaagccatcatcaggaatgctgcgtgtggatttctgagttgagtatgcggttaaaacacaagacgctaggtttagtccaatcttaaaattctacgattttaatcttttaaaaatagtgtttgcatagtatttttaagtttttgatgaacctcacatacatgatctcattgattcttttttaaaaaatggaggtcactttttcttggcttaaacaaatgaaaataaatataaacaatatagacttctgaagaaggatggcagaataaaggcaaaataaagactctcctcctccaacatctaaaatatgaataaaaataataaaaatcagcaaaaaaaaaaaaacccacaaaaaaacagcaacagcaagaacacaaagaaatgggagcaacctaacgtcatagacttcaaaaaggggaggacaaaggaaggaaggagagattttagaaaagtagtttctctgtgctcactttggaagacttggattaccaaaatattgaaaaattgaatcaaaagctattaatctgaaaagaaacaaattagcagggcatattgttttccttgaatgctttaggttatagaacaggttaataacaatatgaattcaacatagtgggtcccaaagaggaaatgatgaaacaagagaatgatctggaaaagtgattttctactgtcctatagaaacaaattaaagaccaaaacaatattatttttttttaatgatactttagttctagggtacatgtgcacaatgtgcaggtttgatacataggtatacatgtgccacgttggtttgctgcactcatcaactcgtcatttacattaggtatttctcctaatgttatcccttcccccgtcgcccaaccccacgacaggcccgggtgtgtgatgttccccgccctgtgtccaagtgttttcattcaaaacgacattattatagaactgataaatagataaaaatcatc

SEQ ID NO: 3130 - protein, 56 aa, Homo sapiens
MIPGGSLLTFFKTRLFPQCPADKTEEEMMKLFAVACSEVALSALAVRLTPGPPEER

SEQ ID NO: 3131 - DNA, 829 bp, Homo sapiens
ggcttttgggttatgttcctattaatataaatcatcgtctccatttcagaagaagaaccaaaacacatctgatctgctcttaaaggaaactcaattgtgacaagcagaggaaactaaagaggctggcatgcagtggcatgatctcggctcaccgcaacctctgcctcccaggtgcaactgattatcctgcctcagcctcctgagtagctggattacagggcctggcccatggcaggagctcaggaaatgtcagataaatgattgaatttacaagaacaagcccaacagttaagaaaacttcagctcctgcctcctgcccatgcagcccagaagggccagtttcatgccatgtttgattgccgctccggtcccaggagggatggaatctgctgtctcaccaagacttgggcatgaggctggccttctccagaagctccaggcccagagaaacaatacatctaaccaaagtcccccagggagtcttggcacacagttggtgctcagtggacattggaatgtttcaacagccatgtctccttgttgctgaactgagcaacatccatggacatccatgggacagatggttctctctccagcatggaatcagaaggcctggtttcaagttccaggactgtgcctcattcattgtgtgttgctggctgagtcacttaacctgcctgagcaaagaacagagaagcagtcagatttggaatccactggggaggcagggtttgtaaaacttgttgattaaatgaacaagagtatgtgggaatgagaagaatcaaaatctaagccaagcatctggcctgaacagctgggtggtcagtga

SEQ ID NO: 3132 - protein, 108 aa, Homo sapiens
MRLAFSRSSRPRETIHLTKVPQGVLAHSWCSVDIGMFQQPCLLVAELSNIHGHPWDRWFSLQHGIRRPGFKFQDCASFIVCCWLSHLTCLSKEQRSSQIWNPLGRQGL

SEQ ID NO: 3133 - DNA, 916 bp, Homo sapiens
gggccgggaggagtcggggctgggccgcgccgaggcagctggctgactccagtttagccgccgccggagaggacgggcgccgagccggggctgcggacttcggcctgcccctcacctcactcccgctgcttgcacctcccggatggtgctgactgctccctaagcggcggcggcggcgagtcgtgaggacgcgccgcggaggctgttcggggtcgaggcttcccgtcgccggcacttcctcttgcggcgcccgtgcgcggccggcccggcaggcgggatggcggccgcggctccagggaacggccgcgcatcggcgccccggctgcttctgctctttctggttccgctgctgtgggccccggctgcggtccgggccggcccagatgaagaccttagccaccggaacaaagaaccgccggcgccggcccagcagctgcagccgcagcctgtggctgtgcagggccccgagccggcccgggtcgagaaaatatttacaccagcagctccagttcataccaataaagaagatcctgctacccaaactaatttgggatttatccatgcatttgtcgctgccatatcagttattattgtatctgaattgggtgataagacattttttatagcagccatcatggcaatgcgctataaccgcctgaccgtgctggctggtgcaatgcttgccttgggactaatgacatgcttgtcagttttgtttggctatgccaccacagtcatccccagggtctatacatactatgtttcaactgtattatttgccatttttggcattagaatgcttcgggaaggcttaaagatgagccctgatgagggtcaagaggaactggaagaagttcaagctgaattaaagaagaaagatgaagaatttcaacgaaccaaacttttaaatggaccg

SEQ ID NO: 3134 - protein, 212 aa, Homo sapiens
MAAAAPGNGRASAPRLLLLFLVPLLWAPAAVRAGPDEDLSHRNKEPPAPAQQLQPQPVAVQGPEPARVEKIFTPAAPVHTNKEDPATQTNLGFIHAFVAAISVIIVSELGDKTFFIAAIMAMRYNRLTVLAGAMLALGLMTCLSVLFGYATTVIPRVYTYYVSTVLFAIFGIRMLREGLKMSPDEGQEELEEVQAELKKKDEEFQRTKLLNG

SEQ ID NO: 3135 - DNA, 1348 bp, Homo sapiens
gggccgggaggagtcggggctgggccgcgccgaggcagctggctgactccagtttagccgccgccggagaggacgggcgccgagccggggctgcggacttcggcctgcccctcacctcactcccgctgcttgcacctcccggatggtgctgactgctccctaagcggcggcggcggcgagtcgtgaggacgcgccgcggaggctgttcggggtcgaggcttcccgtcgccggcacttcctcttgcggcgcccgtgcgcggccggcccggcaggcgggatggcggccgcggctccagggaacggccgcgcatcggcgccccggctgcttctgctctttctggttccgctgctgtgggccccggctgcggtccgggccggcccagatgaagaccttagccaccggaacaaagaaccgccggcgccggcccagcagctgcagccgcagcctgtggctgtgcagggccccgagccggcccgggtcgagaaaatatttacaccagcagctccagttcataccaataaagaagatcctgctacccaaactaatttgggatttatccatgcatttgtcgctgccatatcagttattattgtatctgaattgggtgataagacattttttatagcagccatcatggcaatgcgctataaccgcctgaccgtgctggctggtgcaatgcttgccttgggactaatgacatgcttgtcagttttgtttggctatgccaccacagtcatccccagggtctatacatactatgtttcaactgtattatttgccatttttggcattagaatgcttcgggaaggcttaaagatgagccctgatgagggtcaagaggaactggaagaagttcaagctgaattaaagaagaaagatgaagaatttcaacgaaccaaacttttaaatggaccgggagatgttgaaacgggtacaagcataacagtacctcagaaaaagtggttgcattttatttcacccatttttgttcaagctcttacattaacattcttagcagaatggggtgatcgctctcaactaactacaattgtattggcagctagagaggacccctatggtgtagccgtgggtggaactgtggggcactgcctgtgcacgggattggcagtaattggaggaagaatgatagcacagaaaatctctgtcagaactgtgacaatcataggaggcatcgtttttttggcgtttgcattttctgcactatttataagccctgattctggtttttaacaagctgtttgttcatctatatttagtttaaaataggtagtattatctttctgtacatagtgtacattacaactaaaagtgatggaaaaatactgt

SEQ ID NO: 3136 - protein, 324 aa, Homo sapiens; identical to SEQ ID NO: 298

SEQ ID NO: 3137 - DNA, 1431 bp, Homo sapiens
gggccgggaggagtcggggctgggccgcgccgaggcagctggctgactccagtttagccgccgccggagaggacgggcgccgagccggggctgcggacttcggcctgcccctcacctcactcccgctgcttgcacctcccggatggtgctgactgctccctaagcggcggcggcggcgagtcgtgaggacgcgccgcggaggctgttcggggtcgaggcttcccgtcgccggcacttcctcttgcggcgcccgtgcgcggccggcccggcaggcgggatggcggccgcggctccagggaacggccgcgcatcggcgccccggctgcttctgctctttctggttccgctgctgtgggccccggctgcggtccgggccggcccagatgaagaccttagccaccggaacaaagaaccgccggcgccggcccagcagctgcagccgcagcctgtggctgtgcagggccccgagccggcccgggtcgagaaaatatttacaccagcagctccagttcataccaataaagaagatcctgctacccaaactaatttgggatttatccatgcatttgtcgctgccatatcagttattattgtatctgaattgggtgataagacattttttatagcagccatcatggcaatgcgctataaccgcctgaccgtgctggctggtgcaatgcttgccttgggactaatgacatgcttgtcagttttgtttggctatgccaccacagtcatccccagggtctatacatactatgtttcaactgtattatttgccatttttggcattagaatgcttcgggaaggcttaaagatgagccctgatgagggtcaagaggaactggaagaagttcaagctgaattaaagaagaaagatgaagaatttcaacgaaccaaacttttaaatggaccgggagatgttgaaacgggtacaagcataacagtacctcagaaaaagtggttgcattttatttcacccatttttgttcaagctcttacattaacattcttagcagaatggggtgatcgctctcaactaactacaattgtattggcagctagagaggacccctatggtgtagccgtgggtggaactgtggggcactgcctgtgcacgggattggcagtaattggaggaagaatgatagcacagaaaatctctgtcagaactgtgacaatcataggaggcatcgtttttttggcgtttgcattttctgcactatttataagccctgattctggtttttaacaagctgtttgttcatctatatttagtttaaaataggtagtattatctttctgtacatagtgtacattacaactaaaagtgatggaaaaatactgtattttgtagcactgattttgtgagtttgacccattattatgtctgagatataatcattgattctatttgtaacaaggagtttt

SEQ ID NO: 3138 - protein, 324 aa, Homo sapiens; identical to SEQ ID NO: 298

SEQ ID NO: 3139 - DNA, 1975 bp, Homo sapiens
gggccgggaggagtcggggctgggccgcgccgaggcagctggctgactccagtttagccgccgccggagaggacgggcgccgagccggggctgcggacttcggcctgcccctcacctcactcccgctgcttgcacctcccggatggtgctgactgctccctaagcggcggcggcggcgagtcgtgaggacgcgccgcggaggctgttcggggtcgaggcttcccgtcgccggcacttcctcttgcggcgcccgtgcgcggccggcccggcaggcgggatggcggccgcggctccagggaacggccgcgcatcggcgccccggctgcttctgctctttctggttccgctgctgtgggccccggctgcggtccgggccggcccagatgaagaccttagccaccggaacaaagaaccgccggcgccggcccagcagctgcagccgcagcctgtggctgtgcagggccccgagccggcccgggtcgagaaaatatttacaccagcagctccagttcataccaataaagaagatcctgctacccaaactaatttgggatttatccatgcatttgtcgctgccatatcagttattattgtatctgaattgggtgataagacattttttatagcagccatcatggcaatgcgctataaccgcctgaccgtgctggctggtgcaatgcttgccttgggactaatgacatgcttgtcagttttgtttggctatgccaccacagtcatccccagggtctatacatactatgtttcaactgtattatttgccatttttggcattagaatgcttcgggaaggcttaaagatgagccctgatgagggtcaagaggaactggaagaagttcaagctgaattaaagaagaaagatgaagaatttcaacgaaccaaacttttaaatggaccgggagatgttgaaacgggtacaagcataacagtacctcagaaaaagtggttgcattttatttcacccatttttgttcaagctcttacattaacattcttagcagaatggggtgatcgctctcaactaactacaattgtattggcagctagagaggacccctatggtgtagccgtgggtggaactgtggggcactgcctgtgcacgggattggcagtaattggaggaagaatgatagcacagaaaatctctgtcagaactgtgacaatcataggaggcatcgtttttttggcgtttgcattttctgcactatttataagccctgattctggtttttaacaagctgtttgttcatctatatttagtttaaaataggtagtattatctttctgtacatagtgtacattacaactaaaagtgatggaaaaatactgtattttgtagcactgattttgtgagtttgacccattattatgtctgagatataatcattgattctatttgtaacaaggagttttaaaagaaacctgacttctaagtgtgggtttttcttctctccaacataattatgttaatatggtcctcatttttcttttggtgcagaaccgttgtgcagtggggtctaccatgcaattttctttcagcactgacccctttttaaggaatacaaattttctccttcatcacttaggtgttttaagatgtttaccttaaagtttttcttggggaaagaatgaattaatttctatttcttaaaacatttccctgagccagtaaacagtagtttaatcattggtcttttcaaaactaggtgtttaaaaaaagagacatatatgatattgctgttatatcaataacatggcacaacaagaactgtctgccaggtcattcttcctcttttttttttaattgggtaggacacccaatataaaaacagtcaatatttgacaatgtggaattaccaaattaaaagagaatactatgaatgtattcatattttttctatattgaataaacaatgtaacatagataacaatataaataaaagtggtatgaccagtg

SEQ ID NO: 3140 - protein, 324 aa, Homo sapiens; identical to SEQ ID NO: 298

SEQ ID NO: 3141 - DNA, 2150 bp, Homo sapiens
gggccgggaggagtcggggctgggccgcgccgaggcagctggctgactccagtttagccgccgccggagaggacgggcgccgagccggggctgcggacttcggcctgcccctcacctcactcccgctgcttgcacctcccggatggtgctgactgctccctaagcggcggcggcggcgagtcgtgaggacgcgccgcggaggctgttcggggtcgaggcttcccgtcgccggcacttcctcttgcggcgcccgtgcgcggccggcccggcaggcgggatggcggccgcggctccagggaacggccgcgcatcggcgccccggctgcttctgctctttctggttccgctgctgtgggccccggctgcggtccgggccggcccagatgaagaccttagccaccggaacaaagaaccgccggcgccggcccagcagctgcagccgcagcctgtggctgtgcagggccccgagccggcccgggtcgagaaaatatttacaccagcagctccagttcataccaataaagaagatcctgctacccaaactaatttgggatttatccatgcatttgtcgctgccatatcagttattattgtatctgaattgggtgataagacattttttatagcagccatcatggcaatgcgctataaccgcctgaccgtgctggctggtgcaatgcttgccttgggactaatgacatgcttgtcagttttgtttggctatgccaccacagtcatccccagggtctatacatactatgtttcaactgtattatttgccatttttggcattagaatgcttcgggaaggcttaaagatgagccctgatgagggtcaagaggaactggaagaagttcaagctgaattaaagaagaaagatgaagaatttcaacgaaccaaacttttaaatggaccgggagatgttgaaacgggtacaagcataacagtacctcagaaaaagtggttgcattttatttcacccatttttgttcaagctcttacattaacattcttagcagaatggggtgatcgctctcaactaactacaattgtattggcagctagagaggacccctatggtgtagccgtgggtggaactgtggggcactgcctgtgcacgggattggcagtaattggaggaagaatgatagcacagaaaatctctgtcagaactgtgacaatcataggaggcatcgtttttttggcgtttgcattttctgcactatttataagccctgattctggtttttaacaagctgtttgttcatctatatttagtttaaaataggtagtattatctttctgtacatagtgtacattacaactaaaagtgatggaaaaatactgtattttgtagcactgattttgtgagtttgacccattattatgtctgagatataatcattgattctatttgtaacaaggagttttaaaagaaacctgacttctaagtgtgggtttttcttctctccaacataattatgttaatatggtcctcatttttcttttggtgcagaaccgttgtgcagtggggtctaccatgcaattttctttcagcactgacccctttttaaggaatacaaattttctccttcatcacttaggtgttttaagatgtttaccttaaagtttttcttggggaaagaatgaattaatttctatttcttaaaacatttccctgagccagtaaacagtagtttaatcattggtcttttcaaaactaggtgtttaaaaaaagagacatatatgatattgctgttatatcaataacatggcacaacaagaactgtctgccaggtcattcttcctcttttttttttaattgggtaggacacccaatataaaaacagtcaatatttgacaatgtggaattaccaaattaaaagagaatactatgaatgtattcatattttttctatattgaataaacaatgtaacatagataacaatataaataaaagtggtatgaccagtgcttgtttttccttgtgtgtcatataaaattatcagtattgataggccaatttctaaagctgatgtaaaaacactaacatattaaatatttgagatatgcctaaagtagctaaacaggagccaggcattgttcgaaagcattgtcacccttacagttctgtgaggtagtaggtact

SEQ ID NO: 3142 - protein, 324 aa, Homo sapiens; identical to SEQ ID NO: 298

SEQ ID NO: 3143 - DNA, 1378 bp, Homo sapiens
gtcggggctgggccgcgccgaggcagctggctgactccagtttagccgccgccggagaggacgggcgccgagccggggctgcggacttcggcctgcccctcacctcactcccgctgcttgcacctcccggatggtgctgactgctccctaagcggcggcggcggcgagtcgtgaggacgcgccgcggaggctgttcggggtcgaggcttcccgtcgccggcacttcctcttgcggcgcccgtgcgcggccggcccggcaggcgggatggcggccgcggctccagggaacggccgcgcatcggcgccccggctgcttctgctctttctggttccgctgctgtgggccccggctgcggtccgggccggcccagatgaagaccttagccaccggaacaaagaaccgccggcgccggcccagcagctgcagccgcagcctgtggctgtgcagggccccgagccggcccgggtcgaggacccctatggtgtagccgtgggtggaactgtggggcactgcctgtgcacgggattggcagtaattggaggaagaatgatagcacagaaaatctctgtcagaactgtgacaatcataggaggcatcgtttttttggcgtttgcattttctgcactatttataagccctgattctggtttttaacaagctgtttgttcatctatatttagtttaaaataggtagtattatctttctgtacatagtgtacattacaactaaaagtgatggaaaaatactgtattttgtagcactgattttgtgagtttgacccattattatgtctgagatataatcattgattctatttgtaacaaggagttttaaaagaaacctgacttctaagtgtgggtttttcttctctccaacataattatgttaatatggtcctcatttttcttttggtgcagaaccgttgtgcagtggggtctaccatgcaattttctttcagcactgacccctttttaaggaatacaaattttctccttcatcacttaggtgttttaagatgtttaccttaaagtttttcttggggaaagaatgaattaatttctatttcttaaaacatttccctgagccagtaaacagtagtttaatcattggtcttttcaaaactaggtgtttaaaaaaagagacatatatgatattgctgttatatcaataacatggcacaacaagaactgtctgccaggtcattcttcctcttttttttttaattgggtaggacacccaatataaaaacagtcaatatttgacaatgtggaattaccaaattaaaagagaatactatgaatgtattcatattttttctatattgaataaacaatgtaacatagataacaatataaataaaagtggtatgaccagtg

SEQ ID NO: 3144 - protein, 129 aa, Homo sapiens
MAAAAPGNGRASAPRLLLLFLVPLLWAPAAVRAGPDEDLSHRNKEPPAPAQQLQPQPVAVQGPEPARVEDPYGVAVGGTVGHCLCTGLAVIGGRMIAQKISVRTVTIIGGIVFLAFAFSALFISPDSGF

SEQ ID NO: 3145 - DNA, 1553 bp, Homo sapiens
gtcggggctgggccgcgccgaggcagctggctgactccagtttagccgccgccggagaggacgggcgccgagccggggctgcggacttcggcctgcccctcacctcactcccgctgcttgcacctcccggatggtgctgactgctccctaagcggcggcggcggcgagtcgtgaggacgcgccgcggaggctgttcggggtcgaggcttcccgtcgccggcacttcctcttgcggcgcccgtgcgcggccggcccggcaggcgggatggcggccgcggctccagggaacggccgcgcatcggcgccccggctgcttctgctctttctggttccgctgctgtgggccccggctgcggtccgggccggcccagatgaagaccttagccaccggaacaaagaaccgccggcgccggcccagcagctgcagccgcagcctgtggctgtgcagggccccgagccggcccgggtcgaggacccctatggtgtagccgtgggtggaactgtggggcactgcctgtgcacgggattggcagtaattggaggaagaatgatagcacagaaaatctctgtcagaactgtgacaatcataggaggcatcgtttttttggcgtttgcattttctgcactatttataagccctgattctggtttttaacaagctgtttgttcatctatatttagtttaaaataggtagtattatctttctgtacatagtgtacattacaactaaaagtgatggaaaaatactgtattttgtagcactgattttgtgagtttgacccattattatgtctgagatataatcattgattctatttgtaacaaggagttttaaaagaaacctgacttctaagtgtgggtttttcttctctccaacataattatgttaatatggtcctcatttttcttttggtgcagaaccgttgtgcagtggggtctaccatgcaattttctttcagcactgacccctttttaaggaatacaaattttctccttcatcacttaggtgttttaagatgtttaccttaaagtttttcttggggaaagaatgaattaatttctatttcttaaaacatttccctgagccagtaaacagtagtttaatcattggtcttttcaaaactaggtgtttaaaaaaagagacatatatgatattgctgttatatcaataacatggcacaacaagaactgtctgccaggtcattcttcctcttttttttttaattgggtaggacacccaatataaaaacagtcaatatttgacaatgtggaattaccaaattaaaagagaatactatgaatgtattcatattttttctatattgaataaacaatgtaacatagataacaatataaataaaagtggtatgaccagtgcttgtttttccttgtgtgtcatataaaattatcagtattgataggccaatttctaaagctgatgtaaaaacactaacatattaaatatttgagatatgcctaaagtagctaaacaggagccaggcattgttcgaaagcattgtcacccttacagttctgtgaggtagtaggtact

SEQ ID NO: 3146 - protein, 129 aa, Homo sapiens; identical to SEQ ID NO: 3144

SEQ ID NO: 3147 - DNA, 639 bp, Homo sapiens
agtttttttcttggtagcaagctgtagattttgtttcaaggaaagcatcttcatcttctctagtttcatcatgtatagatggagattccgatgcagaaaatatttacaccagcagctccagttcataccaataaagaagatcctgctacccaaactaatttgggatttatccatgcatttgtcgctgccatatcagttattattgtatctgaattgggtgataagacattttttatagcagccatcatggcaatgcgctataaccgcctgaccgtgctggctggtgcaatgcttgccttgggactaatgacatgcttgtcaggtgagtgtgcttttccctctcatgagttcgctgaattaaagggaaagcgtgttgtgtgacatggagtcactgagtcattaacctagtcttatgggaatttggcttacaccttatttgtggtcttccaaccttttccttgtgtatcctttccttgtgtatcctctaaaataattttgtaccccctctcgcatagttgtctgaaatttttcatcttcaatttaaggaattgcaaagatctaatttctgttatattgtgtaaagtaagacagttagggctgggcacagtcactcacgcctgtaatcccagcactttggga

SEQ ID NO: 3148 - protein, 100 aa, Homo sapiens
MEIPMQKIFTPAAPVHTNKEDPATQTNLGFIHAFVAAISVIIVSELGDKTFFIAAIMAMRYNRLTVLAGAMLALGLMTCLSGECAFPSHEFAELKGKRVV

SEQ ID NO: 3149 - DNA, 1525 bp, Homo sapiens
atggtttataattaattatttaactattttgctgcttaaattatccgatgttaggccagtgagagcctctccaaactgtgtcctgtgtctttgtggcatgctcccatttgattttgctcctcactttctagtacaacaagatattacaggttcatcatgcacctgctctgcccagtcctggaactggccatttctcggcggagctttgaggagctttttaggggagaatggtattagaacccaagatctaggtgcaaggttactgagctccttgttactgagatgtctttgcctcttgtctttttcagtggacagagctagaaaatatatgcttgtatcctgtgtgtacacatacatatatacaaatatacatccatacatatatacacacacaataatttaaatacagatgtgcacacaaacataggtttgctgcatttctaaccatgattttaagatcttttcagttttgtaatgtagggaattatttacatacaggttatacatttacaggcagatttgtaagtgttgcacccgttttataaaaagagctggtgaattaaagagtaattgtatttttctttctttctttttttttttctgagatgggatctcactctgttgcccaagctgggatgcagtggcatgatcgcagctcactgcagctttgacctcctgggctcaagtgatcctcctatctcagcccctcaagtaggctgggaccaaggcgtgtgtcaccccgtcaggctaatttttgtattttttttgtagagacaggatttcgccatgttgaccagtggtctcaagctcctgggctcaagtaatccgcccgactcggtctcccaaagtgctgggattacaggcatgagccaccgtgcctggccagattttgtttggctatgccaccacagtcatccccagggtctatacatactatgtttcaactgtattatttgccatttttggcattagaatgcttcgggaaggcttaaagatgagccctgatgagggtcaagaggaactggaagaagttcaagctgaattaaagaagaaagatgaagaatttcaacgaaccaaacttttaaatggaccgggagatgttgaaacgggtacaagcataacagtacctcagaaaaagtggttgcattttatttcacccatttttgttcaagctcttacattaacattcttagcagaatggggtgatcgctctcaactaactacaattgtattggcagctagagaggacccctatggtgtagccgtgggtggaactgtggggcactgcctgtgcacgggattggcagtaattggaggaagaatgatagcacagaaaatctctgtcagaactgtgacaatcataggaggcatcgtttttttggcgtttgcattttctgcactatttataagccctgattctggtttttaacaagctgtttgttcatctatatttagtttaaaataggtagtattatctttctgtacatagtgtacattacaactaaaagtgatggaaaaatactgt

SEQ ID NO: 3150 - protein, 151 aa, Homo sapiens [sequence omitted]

SEQ ID NO: 3151 - DNA, 1608 bp, Homo sapiens
atggtttataattaattatttaactattttgctgcttaaattatccgatgttaggccagtgagagcctctccaaactgtgtcctgtgtctttgtggcatgctcccatttgattttgctcctcactttctagtacaacaagatattacaggttcatcatgcacctgctctgcccagtcctggaactggccatttctcggcggagctttgaggagctttttaggggagaatggtattagaacccaagatctaggtgcaaggttactgagctccttgttactgagatgtctttgcctcttgtctttttcagtggacagagctagaaaatatatgcttgtatcctgtgtgtacacatacatatatacaaatatacatccatacatatatacacacacaataatttaaatacagatgtgcacacaaacataggtttgctgcatttctaaccatgattttaagatcttttcagttttgtaatgtagggaattatttacatacaggttatacatttacaggcagatttgtaagtgttgcacccgttttataaaaagagctggtgaattaaagagtaattgtatttttctttctttctttttttttttctgagatgggatctcactctgttgcccaagctgggatgcagtggcatgatcgcagctcactgcagctttgacctcctgggctcaagtgatcctcctatctcagcccctcaagtaggctgggaccaaggcgtgtgtcaccccgtcaggctaatttttgtattttttttgtagagacaggatttcgccatgttgaccagtggtctcaagctcctgggctcaagtaatccgcccgactcggtctcccaaagtgctgggattacaggcatgagccaccgtgcctggccagattttgtttggctatgccaccacagtcatccccagggtctatacatactatgtttcaactgtattatttgccatttttggcattagaatgcttcgggaaggcttaaagatgagccctgatgagggtcaagaggaactggaagaagttcaagctgaattaaagaagaaagatgaagaatttcaacgaaccaaacttttaaatggaccgggagatgttgaaacgggtacaagcataacagtacctcagaaaaagtggttgcattttatttcacccatttttgttcaagctcttacattaacattcttagcagaatggggtgatcgctctcaactaactacaattgtattggcagctagagaggacccctatggtgtagccgtgggtggaactgtggggcactgcctgtgcacgggattggcagtaattggaggaagaatgatagcacagaaaatctctgtcagaactgtgacaatcataggaggcatcgtttttttggcgtttgcattttctgcactatttataagccctgattctggtttttaacaagctgtttgttcatctatatttagtttaaaataggtagtattatctttctgtacatagtgtacattacaactaaaagtgatggaaaaatactgtattttgtagcactgattttgtgagtttgacccattattatgtctgagatataatcattgattctatttgtaacaaggagtttt

SEQ ID NO: 3152 - protein, 151 aa, Homo sapiens [sequence omitted]

SEQ ID NO: 3153 - DNA, 2152 bp, Homo sapiens
atggtttataattaattatttaactattttgctgcttaaattatccgatgttaggccagtgagagcctctccaaactgtgtcctgtgtctttgtggcatgctcccatttgattttgctcctcactttctagtacaacaagatattacaggttcatcatgcacctgctctgcccagtcctggaactggccatttctcggcggagctttgaggagctttttaggggagaatggtattagaacccaagatctaggtgcaaggttactgagctccttgttactgagatgtctttgcctcttgtctttttcagtggacagagctagaaaatatatgcttgtatcctgtgtgtacacatacatatatacaaatatacatccatacatatatacacacacaataatttaaatacagatgtgcacacaaacataggtttgctgcatttctaaccatgattttaagatcttttcagttttgtaatgtagggaattatttacatacaggttatacatttacaggcagatttgtaagtgttgcacccgttttataaaaagagctggtgaattaaagagtaattgtatttttctttctttctttttttttttctgagatgggatctcactctgttgcccaagctgggatgcagtggcatgatcgcagctcactgcagctttgacctcctgggctcaagtgatcctcctatctcagcccctcaagtaggctgggaccaaggcgtgtgtcaccccgtcaggctaatttttgtattttttttgtagagacaggatttcgccatgttgaccagtggtctcaagctcctgggctcaagtaatccgcccgactcggtctcccaaagtgctgggattacaggcatgagccaccgtgcctggccagattttgtttggctatgccaccacagtcatccccagggtctatacatactatgtttcaactgtattatttgccatttttggcattagaatgcttcgggaaggcttaaagatgagccctgatgagggtcaagaggaactggaagaagttcaagctgaattaaagaagaaagatgaagaatttcaacgaaccaaacttttaaatggaccgggagatgttgaaacgggtacaagcataacagtacctcagaaaaagtggttgcattttatttcacccatttttgttcaagctcttacattaacattcttagcagaatggggtgatcgctctcaactaactacaattgtattggcagctagagaggacccctatggtgtagccgtgggtggaactgtggggcactgcctgtgcacgggattggcagtaattggaggaagaatgatagcacagaaaatctctgtcagaactgtgacaatcataggaggcatcgtttttttggcgtttgcattttctgcactatttataagccctgattctggtttttaacaagctgtttgttcatctatatttagtttaaaataggtagtattatctttctgtacatagtgtacattacaactaaaagtgatggaaaaatactgtattttgtagcactgattttgtgagtttgacccattattatgtctgagatataatcattgattctatttgtaacaaggagttttaaaagaaacctgacttctaagtgtgggtttttcttctctccaacataattatgttaatatggtcctcatttttcttttggtgcagaaccgttgtgcagtggggtctaccatgcaattttctttcagcactgacccctttttaaggaatacaaattttctccttcatcacttaggtgttttaagatgtttaccttaaagtttttcttggggaaagaatgaattaatttctatttcttaaaacatttccctgagccagtaaacagtagtttaatcattggtcttttcaaaactaggtgtttaaaaaaagagacatatatgatattgctgttatatcaataacatggcacaacaagaactgtctgccaggtcattcttcctcttttttttttaattgggtaggacacccaatataaaaacagtcaatatttgacaatgtggaattaccaaattaaaagagaatactatgaatgtattcatattttttctatattgaataaacaatgtaacatagataacaatataaataaaagtggtatgaccagtg

SEQ ID NO: 3154 - protein, 151 aa, Homo sapiens [sequence omitted]

SEQ ID NO: 3155 - DNA, 2327 bp, Homo sapiens
atggtttataattaattatttaactattttgctgcttaaattatccgatgttaggccagtgagagcctctccaaactgtgtcctgtgtctttgtggcatgctcccatttgattttgctcctcactttctagtacaacaagatattacaggttcatcatgcacctgctctgcccagtcctggaactggccatttctcggcggagctttgaggagctttttaggggagaatggtattagaacccaagatctaggtgcaaggttactgagctccttgttactgagatgtctttgcctcttgtctttttcagtggacagagctagaaaatatatgcttgtatcctgtgtgtacacatacatatatacaaatatacatccatacatatatacacacacaataatttaaatacagatgtgcacacaaacataggtttgctgcatttctaaccatgattttaagatcttttcagttttgtaatgtagggaattatttacatacaggttatacatttacaggcagatttgtaagtgttgcacccgttttataaaaagagctggtgaattaaagagtaattgtatttttctttctttctttttttttttctgagatgggatctcactctgttgcccaagctgggatgcagtggcatgatcgcagctcactgcagctttgacctcctgggctcaagtgatcctcctatctcagcccctcaagtaggctgggaccaaggcgtgtgtcaccccgtcaggctaatttttgtattttttttgtagagacaggatttcgccatgttgaccagtggtctcaagctcctgggctcaagtaatccgcccgactcggtctcccaaagtgctgggattacaggcatgagccaccgtgcctggccagattttgtttggctatgccaccacagtcatccccagggtctatacatactatgtttcaactgtattatttgccatttttggcattagaatgcttcgggaaggcttaaagatgagccctgatgagggtcaagaggaactggaagaagttcaagctgaattaaagaagaaagatgaagaatttcaacgaaccaaacttttaaatggaccgggagatgttgaaacgggtacaagcataacagtacctcagaaaaagtggttgcattttatttcacccatttttgttcaagctcttacattaacattcttagcagaatggggtgatcgctctcaactaactacaattgtattggcagctagagaggacccctatggtgtagccgtgggtggaactgtggggcactgcctgtgcacgggattggcagtaattggaggaagaatgatagcacagaaaatctctgtcagaactgtgacaatcataggaggcatcgtttttttggcgtttgcattttctgcactatttataagccctgattctggtttttaacaagctgtttgttcatctatatttagtttaaaataggtagtattatctttctgtacatagtgtacattacaactaaaagtgatggaaaaatactgtattttgtagcactgattttgtgagtttgacccattattatgtctgagatataatcattgattctatttgtaacaaggagttttaaaagaaacctgacttctaagtgtgggtttttcttctctccaacataattatgttaatatggtcctcatttttcttttggtgcagaaccgttgtgcagtggggtctaccatgcaattttctttcagcactgacccctttttaaggaatacaaattttctccttcatcacttaggtgttttaagatgtttaccttaaagtttttcttggggaaagaatgaattaatttctatttcttaaaacatttccctgagccagtaaacagtagtttaatcattggtcttttcaaaactaggtgtttaaaaaaagagacatatatgatattgctgttatatcaataacatggcacaacaagaactgtctgccaggtcattcttcctcttttttttttaattgggtaggacacccaatataaaaacagtcaatatttgacaatgtggaattaccaaattaaaagagaatactatgaatgtattcatattttttctatattgaataaacaatgtaacatagataacaatataaataaaagtggtatgaccagtgcttgtttttccttgtgtgtcatataaaattatcagtattgataggccaatttctaaagctgatgtaaaaacactaacatattaaatatttgagatatgcctaaagtagctaaacaggagccaggcattgttcgaaagcattgtcacccttacagttctgtgaggtagtaggtact

SEQ ID NO: 3156 - protein, 151 aa, Homo sapiens [sequence omitted]

SEQ ID NO: 3157 - DNA, 1235 bp, Homo sapiens
gatgttgaaacgggtacaagcataacagtacctcagaaaaagtggttgcattttatttcacccatttttgttcaagctcttacattaacattcttagcagaatggggtgatcgctctcaactaactacaattgtattggcagctagagaggtgagtgatatttgagaggagactgtttaaaatgaaacgtaattattattactttgttccagaaaacactggacacactgaagtgggccacagcattccttcatatgcaagactgttttacatctgataattcagctgctctctaaaattggccttctcccagttcctgctacctgcaggacccctatggtgtagccgtgggtggaactgtggggcactgcctgtgcacgggattggcagtaattggaggaagaatgatagcacagaaaatctctgtcagaactgtgacaatcataggaggcatcgtttttttggcgtttgcattttctgcactatttataagccctgattctggtttttaacaagctgtttgttcatctatatttagtttaaaataggtagtattatctttctgtacatagtgtacattacaactaaaagtgatggaaaaatactgtattttgtagcactgattttgtgagtttgacccattattatgtctgagatataatcattgattctatttgtaacaaggagttttaaaagaaacctgacttctaagtgtgggtttttcttctctccaacataattatgttaatatggtcctcatttttcttttggtgcagaaccgttgtgcagtggggtctaccatgcaattttctttcagcactgacccctttttaaggaatacaaattttctccttcatcacttaggtgttttaagatgtttaccttaaagtttttcttggggaaagaatgaattaatttctatttcttaaaacatttccctgagccagtaaacagtagtttaatcattggtcttttcaaaactaggtgtttaaaaaaagagacatatatgatattgctgttatatcaataacatggcacaacaagaactgtctgccaggtcattcttcctcttttttttttaattgggtaggacacccaatataaaaacagtcaatatttgacaatgtggaattaccaaattaaaagagaatactatgaatgtattcatattttttctatattgaataaacaatgtaacatagataacaatataaataaaagtggtatgaccagtg

SEQ ID NO: 3158 - protein, 35 aa, Homo sapiens
MIAQKISVRTVTIIGGIVFLAFAFSALFISPDSGF

SEQ ID NO: 3159 - DNA, 1410 bp, Homo sapiens
gatgttgaaacgggtacaagcataacagtacctcagaaaaagtggttgcattttatttcacccatttttgttcaagctcttacattaacattcttagcagaatggggtgatcgctctcaactaactacaattgtattggcagctagagaggtgagtgatatttgagaggagactgtttaaaatgaaacgtaattattattactttgttccagaaaacactggacacactgaagtgggccacagcattccttcatatgcaagactgttttacatctgataattcagctgctctctaaaattggccttctcccagttcctgctacctgcaggacccctatggtgtagccgtgggtggaactgtggggcactgcctgtgcacgggattggcagtaattggaggaagaatgatagcacagaaaatctctgtcagaactgtgacaatcataggaggcatcgtttttttggcgtttgcattttctgcactatttataagccctgattctggtttttaacaagctgtttgttcatctatatttagtttaaaataggtagtattatctttctgtacatagtgtacattacaactaaaagtgatggaaaaatactgtattttgtagcactgattttgtgagtttgacccattattatgtctgagatataatcattgattctatttgtaacaaggagttttaaaagaaacctgacttctaagtgtgggtttttcttctctccaacataattatgttaatatggtcctcatttttcttttggtgcagaaccgttgtgcagtggggtctaccatgcaattttctttcagcactgacccctttttaaggaatacaaattttctccttcatcacttaggtgttttaagatgtttaccttaaagtttttcttggggaaagaatgaattaatttctatttcttaaaacatttccctgagccagtaaacagtagtttaatcattggtcttttcaaaactaggtgtttaaaaaaagagacatatatgatattgctgttatatcaataacatggcacaacaagaactgtctgccaggtcattcttcctcttttttttttaattgggtaggacacccaatataaaaacagtcaatatttgacaatgtggaattaccaaattaaaagagaatactatgaatgtattcatattttttctatattgaataaacaatgtaacatagataacaatataaataaaagtggtatgaccagtgcttgtttttccttgtgtgtcatataaaattatcagtattgataggccaatttctaaagctgatgtaaaaacactaacatattaaatatttgagatatgcctaaagtagctaaacaggagccaggcattgttcgaaagcattgtcacccttacagttctgtgaggtagtaggtact

SEQ ID NO: 3160 - protein, 35 aa, Homo sapiens; identical to SEQ ID NO: 3158

SEQ ID NO: 3161 - DNA, 630 bp, Homo sapiens
ccatttttgttcaagctcttacattaacattcttagcagaatggggtgatcgctctcaactaactacaattgtattggcagctagagaggtgagtgatatttgagaggagactgtttaaaatgaaacgtaattattattactttgttccagaaaacactggacacactgaagtgggccacagcattccttcatatgcaagactgttttacatctgataattcagctgctctctaaaattggccttctcccagttcctgctacctgcaggacccctatggtgtagccgtgggtggaactgtggggcactgcctgtgcacgggattggcagtaattggaggaagaatgatagcacagaaaatctctgtcagaactgtgacaatcataggaggcatcgtttttttggcgtttgcattttctgcactatttataagccctgattctggtttttaacaagctgtttgttcatctatatttagtttaaaataggtagtattatctttctgtacatagtgtacattacaactaaaagtgatggaaaaatactgtattttgtagcactgattttgtgagtttgacccattattatgtctgagatataatcattgattctatttgtaacaaggagtttt

SEQ ID NO: 3162 - protein, 35 aa, Homo sapiens; identical to SEQ ID NO: 3158

SEQ ID NO: 3163 - DNA, 1510 bp, Homo sapiens
attaacattcttagcagaatggggtgatcgctctcaactaactacaattgtattggcagctagagaggtgagtgatatttgagaggagactgtttaaaatgaaacgtaattattattactttgttccagaaaacactggacacactgaagtgggccacagcattccttcatatgcaagactgttttacatctgataattcagctgctctctaaaattggccttctcccagttcctgctacctgcaggacccctatggtgtagccgtgggtggaactgtggggcactgcctgtgcacgggattggcagtaattggaggaagaatgatagcacagaaaatctctgtcagaactggtagtttctctccctggctcatcttgcatgcttgctctgatggaaaaggtcacctggaaaggaactgaggatagccttcagccagcaagaaaccaaggccctcagtccaactgcccatgaggaactgaagtgtgccagcaaccactaagtgaggtggaaacagatgccacctcagttgaactttgagatgactgtggctcccaccaacaccttgattacagcctcatgaaagaatctgaagtagagggtccagctaaactgtgcctggactcttgactcaccaaactaggagataacaagtgtgttgttttatatcactaaattttggagtaagttgttacacagctatagataactaatatactatacttctgacctgatataacaaaaaagaaaccagagttccaattctgactataatttcccagccagtgtctttagggaagatttttttttcccctcttgaaaccccaatttcagtattttcaaagtggggatattacctacccgataaaaatatctgatgtgtaaattatatttcataattcatataaataacctagccagagactagtacatcactgggaataaatggtagttttgagatcagacacatctctcatccaattttctttttagaggcaggtgagactctaaaatattaaattaaaaataagtagtaaagtataatcacatccccgttataagtgaggaaataaagtatttttgaaaaatagttttcctattaattattgagtttcatcttttattggggagaaattaaaaataattttttttaattataagaaacatactttgtcagcagctgtctcaggaagagactcttcaatgccaagttctcgtcgtctttcagccctaacttctgcataactacaaatggaaaaaataatcaaattttagtgtctggtcattcgtttaaaatactgcacagctgtaactattcagtgttgttacgtgtctcatctgttcatctagactatttgctatgtgctacacaaacctaaaatatacctataatgtcttaatttaacttgcatttttctaggtatcttaaagtttcatacactgctgtaaacgatccataaccacacaatacttaaattaagaaaaataaataaaggaagtgtatgcttatct

SEQ ID NO: 3164 - protein, 32 aa, Homo sapiens
MIAQKISVRTGSFSPWLILHACSDGKGHLERN

SEQ ID NO: 3165 - DNA, 439 bp, Homo sapiens
gagtcaaatttggcaaataatatatccctgtcgttttgttttttctttttaagacttgggccaggtgtggtggctcacgcgtttaatcccatgctgagattacgcccggcctaaatattactttcaaatagaaccatcttcatgggtagcagtttataatacacaagtagaatttgggaaatgtagtcccagtcttccattcttcacagtggatgcttcagccagtttcctgtctctgcacacacactgcccgacagcgggctttcccttctccttcagagcagtagcagttccctttcttcattcccacccatcacagtggcagccccctctgccctcctgtattctgaatcccacccttataatatgcttagattttgcctttctcccagccgttttgtgagcattgttcgtgtgtaccaattttttctcatccttt

SEQ ID NO: 3166 - protein, 101 aa, Homo sapiens
DYARPKYYFQIEPSSWVAVYNTQVEFGKCSPSLPFFTVDASASFLSLHTHCPTAGFPFSFRAVAVPFLHSHPSQWQPPLPSCILNPTLIICLDFAFLPAVL

SEQ ID NO: 3167 - DNA, 763 bp, Homo sapiens
cagccccctctgccctcctgtattctgaatcccacccttataatatgcttagattttgcctttctcccagccgttttgtgagcattgttcgtgtgtaccaattttttctcatcctttaaaaagaaaaaaaaaaagccccttttctcaattgtacatcgcaaatccaactcttgccctcctgcagtgtcagaggacttggctgtgatgggaataagccttggctctgttctccttgcatacttagcccatgggaacccagtttctggcctcaccaggaatgttgttgtgctttgagctccctgtggccttgcatgatgcctccgttggtccttacaggaggtgattggctggccacctcacttgctttctcctgtggacccttctttctctgtccttccttgaatgctgcctttgtccctcatgattatgctatcaacattcttctctttctgctttctctgtaacaggtttattgactcttttttttgagagtcttgctctgtcacccaggctggagtacagtggcacaatcttggcttgctgcaacctctgcttcctgggtccaagcgattcttctgcctcagcctcccgagtagctaggattagagacatgtgccaccaagtctggctagtttttgtatttttagtaaagatggggtttcaccatgttgtccaggttggtctcaaactcccaacctcaggtgatctgccctcctcggcctcccaaagtgctggcattacaggcgtgagccactgcacccag

SEQ ID NO: 3168 - protein, 50 aa, Homo sapiens
MCHQVWLVFVFLVKMGFHHVVQVGLKLPTSGDLPSSASQSAGITGVSHCT

SEQ ID NO: 3169 - DNA, 2330 bp, Homo sapiens
tttaagagacgggatctcgctgtactgctcaggctagccttgaactcctggcctcaagtgatccttctgccttagcctcctgagtggctggctccactctgcttggctctgatatttttccataaagcctatcattcatttatcatggaggtatgttaattttgccttcttaatttctctcaaattcacctgctctttgcctacagtcatctgccccgatctggggcaacgcagtttcttcccagggctgttgccatagcatcgcagtggatcacccttccttcagtcttgttcccctctggttctttctctccactagactttaaaaaatttttgagatagggtcttgctctgttgcccaggatggagaacaatcatagctcactgcagccacgacctcctgggctcaaatgatcctcccacctcagcctcccgagtagctgggaccacttgtgcttgctaggatgcctggctaatttttaatttttttgtagagacaaggtctcactgtgttgcctaggctagtctcaaactgccaggctcaagcaatcctcttgcttcagcctcccaaagtgttgggattacaggcatgagccactgcacctggcctagcggatttctgaagcattaatctgttctgttactttccagctaaaaaccaacaagtgtctgaggacacagtttaaactccaagatgatagggtcctccctcacctggactcccacctaccctcatgacctccttttgtgaaatgctgaagggctctgcagctggttgtctggtactgctggcctttgctttctatttagcatgttccttctcccacaaaacaaaatcacattctcactatgccctgttcattcttcaggactatcttctgggaaacttttactacatacccctctccccctaatctgagtgtctgctttgctcaggtaacatgtgttcactggataaatccttgattcctggcactgaggcagggtttctgttcccaggaagcagaggcatactattctgtgaaggattgactgagtttctcctaataccaagcagtatctgagggaacagatgtctagcttaaaatcctccctagcacttgtcatagcagtgctacgtattgcctgtgaaggaagtttaataactgctgaaaggttcgattagctttatttcatcaggatttgtttgactttacaaattgatttgggttatttcaacttttaggtctagtcttaagtataactggtacatattccttcaagcagccattacacctctcataaatttattatacacctgcatttttataactattatgctttttaattgttggccaccatttttagtgcttctgaattgttatggttctcaagcagcagttgtcaccttggttttgaattaatgctgtgacgcttgcttccaggacccctatggtgtagccgtgggtggaactgtggggcactgcctgtgcacgggattggcagtaattggaggaagaatgatagcacagaaaatctctgtcagaactgtgacaatcataggaggcatcgtttttttggcgtttgcattttctgcactatttataagccctgattctggtttttaacaagctgtttgttcatctatatttagtttaaaataggtagtattatctttctgtacatagtgtacattacaactaaaagtgatggaaaaatactgtattttgtagcactgattttgtgagtttgacccattattatgtctgagatataatcattgattctatttgtaacaaggagttttaaaagaaacctgacttctaagtgtgggtttttcttctctccaacataattatgttaatatggtcctcatttttcttttggtgcagaaccgttgtgcagtggggtctaccatgcaattttctttcagcactgacccctttttaaggaatacaaattttctccttcatcacttaggtgttttaagatgtttaccttaaagtttttcttggggaaagaatgaattaatttctatttcttaaaacatttccctgagccagtaaacagtagtttaatcattggtcttttcaaaactaggtgtttaaaaaaagagacatatatgatattgctgttatatcaataacatggcacaacaagaactgtctgccaggtcattcttcctcttttttttttaattgggtaggacacccaatataaaaacagtcaatatttgacaatgtggaattaccaaattaaaagagaatactatgaatgtattcatattttttctatattgaataaacaatgtaacatagataacaatataaataaaagtggtatgaccagtg

SEQ ID NO: 3170 - protein, 35 aa, Homo sapiens; identical to SEQ ID NO: 3158

SEQ ID NO: 3171 - DNA, 2505 bp, Homo sapiens
tttaagagacgggatctcgctgtactgctcaggctagccttgaactcctggcctcaagtgatccttctgccttagcctcctgagtggctggctccactctgcttggctctgatatttttccataaagcctatcattcatttatcatggaggtatgttaattttgccttcttaatttctctcaaattcacctgctctttgcctacagtcatctgccccgatctggggcaacgcagtttcttcccagggctgttgccatagcatcgcagtggatcacccttccttcagtcttgttcccctctggttctttctctccactagactttaaaaaatttttgagatagggtcttgctctgttgcccaggatggagaacaatcatagctcactgcagccacgacctcctgggctcaaatgatcctcccacctcagcctcccgagtagctgggaccacttgtgcttgctaggatgcctggctaatttttaatttttttgtagagacaaggtctcactgtgttgcctaggctagtctcaaactgccaggctcaagcaatcctcttgcttcagcctcccaaagtgttgggattacaggcatgagccactgcacctggcctagcggatttctgaagcattaatctgttctgttactttccagctaaaaaccaacaagtgtctgaggacacagtttaaactccaagatgatagggtcctccctcacctggactcccacctaccctcatgacctccttttgtgaaatgctgaagggctctgcagctggttgtctggtactgctggcctttgctttctatttagcatgttccttctcccacaaaacaaaatcacattctcactatgccctgttcattcttcaggactatcttctgggaaacttttactacatacccctctccccctaatctgagtgtctgctttgctcaggtaacatgtgttcactggataaatccttgattcctggcactgaggcagggtttctgttcccaggaagcagaggcatactattctgtgaaggattgactgagtttctcctaataccaagcagtatctgagggaacagatgtctagcttaaaatcctccctagcacttgtcatagcagtgctacgtattgcctgtgaaggaagtttaataactgctgaaaggttcgattagctttatttcatcaggatttgtttgactttacaaattgatttgggttatttcaacttttaggtctagtcttaagtataactggtacatattccttcaagcagccattacacctctcataaatttattatacacctgcatttttataactattatgctttttaattgttggccaccatttttagtgcttctgaattgttatggttctcaagcagcagttgtcaccttggttttgaattaatgctgtgacgcttgcttccaggacccctatggtgtagccgtgggtggaactgtggggcactgcctgtgcacgggattggcagtaattggaggaagaatgatagcacagaaaatctctgtcagaactgtgacaatcataggaggcatcgtttttttggcgtttgcattttctgcactatttataagccctgattctggtttttaacaagctgtttgttcatctatatttagtttaaaataggtagtattatctttctgtacatagtgtacattacaactaaaagtgatggaaaaatactgtattttgtagcactgattttgtgagtttgacccattattatgtctgagatataatcattgattctatttgtaacaaggagttttaaaagaaacctgacttctaagtgtgggtttttcttctctccaacataattatgttaatatggtcctcatttttcttttggtgcagaaccgttgtgcagtggggtctaccatgcaattttctttcagcactgacccctttttaaggaatacaaattttctccttcatcacttaggtgttttaagatgtttaccttaaagtttttcttggggaaagaatgaattaatttctatttcttaaaacatttccctgagccagtaaacagtagtttaatcattggtcttttcaaaactaggtgtttaaaaaaagagacatatatgatattgctgttatatcaataacatggcacaacaagaactgtctgccaggtcattcttcctcttttttttttaattgggtaggacacccaatataaaaacagtcaatatttgacaatgtggaattaccaaattaaaagagaatactatgaatgtattcatattttttctatattgaataaacaatgtaacatagataacaatataaataaaagtggtatgaccagtgcttgtttttccttgtgtgtcatataaaattatcagtattgataggccaatttctaaagctgatgtaaaaacactaacatattaaatatttgagatatgcctaaagtagctaaacaggagccaggcattgttcgaaagcattgtcacccttacagttctgtgaggtagtaggtact

SEQ ID NO: 3172 - protein, 35 aa, Homo sapiens; identical to SEQ ID NO: 3158

SEQ ID NO: 3173 - DNA, 5820 bp, Homo sapiens
gagcgagagcgcgaaggaaatctggccgccgccgccgcgagcgctcccgaatttttacttgttcctgcaaagctgctggagctcagaagctgattctatcacattgtaagatgcctttggataattctacagtcctcttaaatgaatctttagaacttggcaagtctcactagataccttcaatcatcattttgagctcaaagaattctgagacttatggttggtcatatagaagagtaccttgaacctatagtttcctgaagaatcagtttaaaagatccaaggagtacaaaaggagaagtacaaatgtctactacaagacgaaaacgtagtatgttatgttgtttaccgtaagctgtagtaaaatgagctcgattgttgacagagatgacagtagtatttttgatgggttggtggaagaagatgacaaggacaaagcgaaaagagtatctagaaacaaatctgaaaagaaacgtagagatcaatttaatgttctcattaaagaactgggatccatgcttcctggtaatgctagaaagatggacaaatctactgttctgcagaaaagcattgattttttacgaaaacataaagaaatcactgcacagtcagatgctagtgaaattcgacaggactggaaacctacattccttagtaatgaagagtttacacaattaatgttagaggctcttgatggtttttttttagcaatcatgacagatggaagcataatatatgtgtctgagagtgtaacttcattacttgaacatttaccatctgatcttgtggatcaaagtatatttaattttatcccagaaggggaacattcagaggtttataaaatactctctactcatctgctggaaagtgattcattaaccccagaatatttaaaatcaaaaaatcagttagaattctgttgtcacatgctgcgaggaacaatagacccaaaggagccatctacctatgaatatgtaaaatttataggaaatttcaaatctttaaacagtgtatcctcttcagcacacaatggttttgaaggaactatacaacgcacacataggccatcttatgaagatagagtttgttttgtagctactgtcaggttagctacacctcagttcatcaaggaaatgtgcactgttgaagaacccaatgaagagtttacatctagacatagtttagaatggaagtttctgtttctagatcacagggcaccacccataatagggtatttgccatttgaagttctgggaacatcaggctatgattactatcatgtggatgacctagaaaatttggcaaaatgtcatgagcacttaatgcaatatgggaaaggcaaatcatgttattataggttcctgactaaggggcaacagtggatttggcttcagactcattattatatcacttaccatcagtggaattcaaggccagagtttattgtttgtactcacactgtagtaagttatgcagaagttagggctgaaagacgacgagaacttggcattgaagagtctcttcctgagacagctgctgacaaaagccaagattctgggtcagataatcgtataaacacagtcagtctcaaggaagcattggaaaggtttgatcacagcccaaccccttctgcctcttctcggagttcaagaaaatcatctcacacggccgtctcagacccttcctcaacaccaaccaagatcccgacggatacgagcactccacccaggcagcatttaccagctcatgagaagatggtgcaaagaaggtcatcatttagtagtcagtccataaattcccagtctgttggttcatcattaacacagccagtgatgtctcaagctacaaatttaccaattccacaaggcatgtcccagtttcagttttcagctcaattaggagccatgcaacatctgaaagaccaattggaacaacggacacgcatgatagaagcaaatattcatcggcaacaagaagaactaagaaaaattcaagaacaacttcagatggtccatggtcaggggctgcagatgtttttgcaacaatcaaatcctgggttgaattttggttccgttcaactttcttctggaaattcatctaatatccagcaacttgcacctataaatatgcaaggccaagttgttcctactaaccagattcaaagtggaatgaatactggacacattggcacaactcagcacatgatacaacaacagactttacagagtacatcaactcagagtcaacaaaatgtactgagtgggcacagtcagcaaacatctctacccagtcagacacagagcactcttacagccccactgtataacactatggtgatttctcagcctgcagccggaagcatggtccagattccatctagtatgccacaaaacagcacccagagtgctgcagtaactacattcactcaggacaggcagataagattttctcaaggtcaacaacttgtgaccaaattagtgactgctcctgtagcttgtggggcagtcatggtacctagtactatgcttatgggccaggtggtgactgcatatcctacttttgctacacaacagcaacagtcacagacattgtcagtaacgcagcagcagcagcagcagagctcccaggagcagcagctcacttcagttcagcaaccatctcaggctcagctgacccagccaccgcaacaatttttacagacttctaggttgctccatgggaatccctcaactcaactcattctctctgctgcatttcctctacaacagagcaccttccctcagtcacatcaccagcaacatcagtctcagcaacagcagcaactcagccggcacaggactgacagcttgcccgacccttccaaggttcaaccacagtagcacacgtgcttcctctcttgacatcaagggaggaaggggatggcccattaagagttactcagatgacctgaggaaaggagggaaagttccagcagtttcatgagatgcagtattgagtgttctagttcctggaattagttggcagagaaaatgctgcctagtgctacagatgtacattaaataccagccagcaggaggtgatcataggggcatagccagttctgacagtgttttaggtgcctggatattttttgatggaaaaagaatatattgccaaatattaagaagctcagctatgaaatgacctccagggaatcagaaaggcactaatgatgttagtaacttttagtggttctgtgcctcttatcaagtgttacagaggacataccactgccatgtcaggggtttgcttacagtgatgccatgaagacagtccagtagacttggtagcgaccccctcccccaacccctctcccttttcagataatgatggaacagtaattactttcagaatgttgtgtgggttcaaattctctatgtacagatgatgtaaaaatatgtatatgtctagataaaaggagagaaagcaaaacattttgtatgctgcatgaaagcgttatctcttccttacaggtgtgagcacctttcctgaaattctgacaccatgtgcaaactgatccatcctgtttttccttttgtttacaacacagtagtgttctgttcacttttccggggcacaagtttttttgttcatactttggctgtgatgtcacagtttgttcagtgaggtatgatgtgctgctgggaatggattttttttttcaggttaaattattgatacaacaggattttcaagttattcagaaatatccctcatttcattatttttcaattatgtttgaaaataggatttgcactgctttattttaggtggctgggagttttgattgcatattttgttatagttcatagttggaaatatttgcgtaaatggttttcaacaagcctgaaagtaatttcaagaatgtttcagttatagaggtaaaatttgcacacaaaacatcttaggcactttttaacattctcaatcatgggaattttaacttttgggatttgttgaaatcttttttattatccttcacaatttcaatgcttcttttagtcagaaatgattcagggttatttgaggggaaaaaaccccatagtgccttgattttaattcaggtgataactcaccatcttgaagtcattgtccggtttccgtagcagttttgaaaccttagtacctttttaacagcatgtgggtgtcagtgtcattattagtctcctaataagttcctctgaagactgctatcagtctcttggactggaggtacaaataatttagaaataaaagatgataacctaacactatcatagttattaatgtgatcctaaaattgtttcctaaatcagcatttttctttagtcatttaagaatttaccagaaatatttgctcaatatgatcttgatattcctacaaagaaaaaagaaggggtagggatttggctatgccttcactacaacattagaatattgtaactcacatgccttctaaacgtgaactaagatttcctttggcaatatcatattctaaaagtaataaattccaatacaagttacatacatttaaaaaacattttacagattttatggtactaatgaaatttacagtgatagaacaaaagaggattagtagaaaatacattattagaatataaaaaatgttattactgaggaaagggaggagaggacaagtgtaataaatcaaaattgacctcaaaagaaaatgtgtaacagagttgaggttgttaaaacagaaaaggttctgaataatgaagattaacctaatgcagaattgctaggtaaagaggtcaggggaatgctaagccagttcttaagacttctctgtcctctgctttgctgttatccttaaggcatatactttgtctttctgcagaaaattctacctggctacaattactttgaacattaatgttgaaaaagaaaacaaccaaagaaaattggtacttacccttctacaaaagaagtgtgactagatatcaatcagtaattaacatatcaaggagctcttctagctaaatgaccatccagtagagatttcccacattcccatgaatatcaagaatagttgtcagaatatgtatgtacctgagcatatgtacacagacaagggggatgttgtggaatatggcaatagcattgttcttctcccctttcaaattgcctttcttgaccttatgccattccatatatatctgagttgtgcctcatttatttattggcaatacctagtgatacggatttagctaacaaaagatatgaagaactattatattgaggcctgtcctctacataccacacttaaaagatggtgaactgtgagtactacttaggttgacagcaacaaagcataagacaagccccaggtaaacgtctaaactgtttactcacattgtcctactccagccccttcaattatttcccatctccacaaatagtcgggggaaaaaattaaaattttcctttatgattcttactgttcttcgcagctcatcttttcctgcttagaattaaccattgctaatttaaaggagcagctagctgcttttctgtcagtctgaagcgtagtagtggaagaggtagtaagcaccagctgcctctttgctgctttgttttcctcctgattctcttaaatttgggttgcaaagctatcccgccccccaccctgccccatgaaacttgagcattcaaatgaagattcagcagtgtctgttcttcatttctatagccaaagctgttagttaaaatcccaaatctatagcatttaaagataccaaatagaaacaccttccagctttaaaaaaaaaaaaaaaaaag

SEQ ID NO: 3174 - protein, 846 aa, Homo sapiens; identical to SEQ ID NO: 300

SEQ ID NO: 3175 - DNA, 4217 bp, Homo sapiens
gccggggcggccagctcctccggggaacccccgccctcccggcgcccggcccgcgtgccgcagtccgcagtccgaacggccgccgttgccggccgcgggctggttccgttagtggtggtggttccggggttccgttcctaggcagcgcgcggctattagcgtctgactccagcgaccgcgcgcgggttcgagggttggcggcgaggcgctcggtttctcttcttccgtccacccgcgcttcccgttccccgtcaccgccgctggcgtttgtagatttctttccgccagtgaagctgggttttctggagttggctctggcgctctggcccctggagtgtaatttcctacacgcagcgccgcagagtttatattctttgaaagtgtttgtagctttgtagaggtcctcttgttgatggtaggtgagcctaattctgcaagataaaagcctagtctctgacctggcagatgaaagatcaaatcagattgtggtttcctgctattagaatgccgtgctattagactttaaggctttttagccttctttaaaaaataaaaaaatttttacagtggaagaaaagcacaagaagtaaacttttacagtcgttgatttgactataacgctgatccccccaaatcaaagaatttttacttgttcctgcaaagctgctggagctcagaagctgattctatcacattgtaagatgcctttggataattctacagtcctcttaaatgaatctttagaacttggcaagtctcactagataccttcaatcatcattttgagctcaaagaattctgagacttatggttggtcatatagaagagtaccttgaacctatagtttcctgaagaatcagtttaaaagatccaaggagtacaaaaggcagttattggaggaattactcaacaaaaataaagaagtaaactaaaaaagatgaaggcataggatacaagtaacagggaatatgacctaactagagacccagggaatcaccaggatgatgatgaataatgatcacaagaagacagcttgtcctcaggagaagtacaaatgtctactacaagacgaaaacgtagtatgttatgttgtttaccgtaagctgtagtaaaatgagctcgattgttgacagagatgacagtagtatttttgatgggttggtggaagaagatgacaaggacaaagcgaaaagagtatctagaaacaaatctgaaaagaaacgtagagatcaatttaatgttctcattaaagaactgggatccatgcttcctggtaatgctagaaagatggacaaatctactgttctgcagaaaagcattgattttttacgaaaacataaagaaatcactgcacagtcagatgctagtgaaattcgacaggactggaaacctacattccttagtaatgaagagtttacacaattaatgttagaggctcttgatggtttttttttagcaatcatgacagatggaagcataatatatgtgtctgagagtgtaacttcattacttgaacatttaccatctgatcttgtggatcaaagtatatttaattttatcccagaaggggaacattcagaggtttataaaatactctctactcatctgctggaaagtgattcattaaccccagaatatttaaaatcaaaaaatcagttagaattctgttgtcacatgctgcgaggaacaatagacccaaaggagccatctacctatgaatatgtaaaatttataggaaatttcaaatctttaaacagtgtatcctcttcagcacacaatggttttgaaggaactatacaacgcacacataggccatcttatgaagatagagtttgttttgtagctactgtcaggttagctacacctcagttcatcaaggaaatgtgcactgttgaagaacccaatgaagagtttacatctagacatagtttagaatggaagtttctgtttctagatcacagggcaccacccataatagggtatttgccatttgaagttctgggaacatcaggctatgattactatcatgtggatgacctagaaaatttggcaaaatgtcatgagcacttaatgcaatatgggaaaggcaaatcatgttattataggttcctgactaaggggcaacagtggatttggcttcagactcattattatatcacttaccatcagtggaattcaaggccagagtttattgtttgtactcacactgtagtaagttatgcagaagttagggctgaaagacgacgagaacttggcattgaagagtctcttcctgagacagctgctgacaaaagccaagattctgggtcagataatcgtataaacacagtcagtctcaaggaagcattggaaaggtttgatcacagcccaaccccttctgcctcttctcggagttcaagaaaatcatctcacacggccgtctcagacccttcctcaacaccaaccaagatcccgacggatacgagcactccacccaggcagcatttaccagctcatgagaagatggtgcaaagaaggtcatcatttagtagtcagtccataaattcccagtctgttggttcatcattaacacagccagtgatgtctcaagctacaaatttaccaattccacaaggcatgtcccagtttcagttttcagctcaattaggagccatgcaacatctgaaagaccaattggaacaacggacacgcatgatagaagcaaatattcatcggcaacaagaagaactaagaaaaattcaagaacaacttcagatggtccatggtcaggggctgcagatgtttttgcaacaatcaaatcctgggttgaattttggttccgttcaactttcttctggaaattcatctaatatccagcaacttgcacctataaatatgcaaggccaagttgttcctactaaccagattcaaagtggaatgaatactggacacattggcacaactcagcacatgatacaacaacagactttacagagtacatcaactcagagtcaacaaaatgtactgagtgggcacagtcagcaaacatctctacccagtcagacacagagcactcttacagccccactgtataacactatggtgatttctcagcctgcagccggaagcatggtccagattccatctagtatgccacaaaacagcacccagagtgctgcagtaactacattcactcaggacaggcagataagattttctcaaggtcaacaacttgtgaccaaattagtgactgctcctgtagcttgtggggcagtcatggtacctagtactatgcttatgggccaggtggtgactgcatatcctacttttgctacacaacagcaacagtcacagacattgtcagtaacgcagcagcagcagcagcagagctcccaggagcagcagctcacttcagttcagcaaccatctcaggctcagctgacccagccaccgcaacaatttttacagacttctaggttgctccatgggaatccctcaactcaactcattctctctgctgcatttcctctacaacagagcaccttccctcagtcacatcaccagcaacatcagtctcagcaacagcagcaactcagccggcacaggactgacagcttgcccgacccttccaaggttcaaccacagtagcacacgtgcttcctctcttgacatcaagggaggaaggggatggcccattaagagttactcagatgacctgaggaaaggagggaaagttccagcagtttcatgagatgcagtattgagtgttctagttcctggaattagttggcagagaaaatgctgcctagtgctacagatgtacattaaataccagccagcaggaggtgatcataggggcatagccagttctgacagtgttttaggtgcctggatattttttgatggaaaaagaatatattgccaaatattaagaagctcagctatgaaatgacctccagggaatcagaaaggcactaatgatgttagtaacttttagtggttctgtgcctcttatcaagtgttacagaggacataccactgccatgtcaggggtttgcttacagtgatgccatgaagacagtccagtagacttggtagcgaccccctcccccaacccctctcccttttcagataatgatggaacagtaattactttcagaatgttgtgtgggttcaaattctctatgtacagatgatgtaaaaatatgtatatgtctagataaaaggagagaaagcaa

SEQ ID NO: 3176 - protein, 846 aa, Homo sapiens; identical to SEQ ID NO: 300

SEQ ID NO: 3177 - DNA, 3467 bp, Homo sapiens
gagcgagagcgcgaaggaaatctggccgccgccgccgcgagcgctcccgaatttttacttgttcctgcaaagctgctggagctcagaagctgattctatcacattgtaagatgcctttggataattctacagtcctcttaaatgaatctttagaacttggcaagtctcactagataccttcaatcatcattttgagctcaaagaattctgagacttatggttggtcatatagaagagtaccttgaacctatagtttcctgaagaatcagtttaaaagatccaaggagtacaaaaggagaagtacaaatgtctactacaagacgaaaacgtagtatgttatgttgtttaccgtaagctgtagtaaaatgagctcgattgttgacagagatgacagtagtatttttgatgggttggtggaagaagatgacaaggacaaagcgaaaagagtatctagaaacaaatctgaaaagaaacgtagagatcaatttaatgttctcattaaagaactgggatccatgcttcctggtaatgctagaaagatggacaaatctactgttctgcagaaaagcattgattttttacgaaaacataaagaaatcactgcacagtcagatgctagtgaaattcgacaggactggaaacctacattccttagtaatgaagagtttacacaattaatgttagaggctcttgatggtttttttttagcaatcatgacagatggaagcataatatatgtgtctgagagtgtaacttcattacttgaacatttaccatctgatcttgtggatcaaagtatatttaattttatcccagaaggggaacattcagaggtttataaaatactctctactcatctgctggaaagtgattcattaaccccagaatatttaaaatcaaaaaatcagttagaattctgttgtcacatgctgcgaggaacaatagacccaaaggagccatctacctatgaatatgtaaaatttataggaaatttcaaatctttaaacagtgtatcctcttcagcacacaatggttttgaaggaactatacaacgcacacataggccatcttatgaagatagagtttgttttgtagctactgtcaggttagctacacctcagttcatcaaggaaatgtgcactgttgaagaacccaatgaagagtttacatctagacatagtttagaatggaagtttctgtttctagatcacagggcaccacccataatagggtatttgccatttgaagttctgggaacatcaggctatgattactatcatgtggatgacctagaaaatttggcaaaatgtcatgagcacttaatgcaatatgggaaaggcaaatcatgttattataggttcctgactaaggggcaacagtggatttggcttcagactcattattatatcacttaccatcagtggaattcaaggccagagtttattgtttgtactcacactgtagtaagttatgcagaagttagggctgaaagacgacgagaacttggcattgaagagtctcttcctgagacagctgctgacaaaagccaagattctgggtcagataatcgtataaacacagtcagtctcaaggaagcattggaaaggtttgatcacagcccaaccccttctgcctcttctcggagttcaagaaaatcatctcacacggccgtctcagacccttcctcaacaccaaccaagatcccgacggatacgagcactccacccaggcagcatttaccagctcatgagaagatggtgcaaagaaggtcatcatttagtagtcagtccataaattcccagtctgttggttcatcattaacacagccagtgatgtctcaagctacaaatttaccaattccacaaggcatgtcccagtttcagttttcagctcaattaggagccatgcaacatctgaaagaccaattggaacaacggacacgcatgatagaagcaaatattcatcggcaacaagaagaactaagaaaaattcaagaacaacttcagatggtccatggtcaggggctgcagatgtttttgcaacaatcaaatcctgggttgaattttggttccgttcaactttcttctggaaattcatctaatatccagcaacttgcacctataaatatgcaaggccaagttgttcctactaaccagattcaaagtggaatgaatactggacacattggcacaactcagcacatgatacaacaacagactttacagagtacatcaactcagagtcaacaaaatgtactgagtgggcacagtcagcaaacatctctacccagtcagacacagagcactcttacagccccactgtataacactatggtgatttctcagcctgcagccggaagcatggtccagattccatctagtatgccacaaaacagcacccagagtgctgcagtaactacattcactcaggacaggcagataagattttctcaaggtcaacaacttgtgaccaaattagtgactgctcctgtagcttgtggggcagtcatggtacctagtactatgcttatgggccaggtggtgactgcatatcctacttttgctacacaacagcaacagtcacagacattgtcagtaacgcagcagcagcagcagcagagctcccaggagcagcagctcacttcagttcagcaaccatctcaggctcagctgacccagccaccgcaacaatttttacagacttctaggttgctccatgggaatccctcaactcaactcattctctctgctgcatttcctctacaacagagcaccttccctcagtcacatcaccagcaacatcagtctcagcaacagcagcaactcagccggcacaggactgacagcttgcccgacccttccaaggttcaaccacagtagcacacgtgcttcctctcttgacatcaagggaggaaggggatggcccattaagagttactcagatgacctgaggaaaggagggaaagttccagcagtttcatgagatgcagtattgagtgttctagttcctggaattagttggcagagaaaatgctgcctagtgctacagatgtacattaaataccagccagcaggaggtgatcataggggcatagccagttctgacagtgttttaggtgcctggatattttttgatggaaaaagaatatattgccaaatattaagaagctcagctatgaaatgacctccagggaatcagaaaggcactaatgatgttagtaacttttagtggttctgtgcctcttatcaagtgttacagaggacataccactgccatgtcaggggtttgcttacagtgatgccatgaagacagtccagtagacttggtagcgaccccctcccccaacccctctcccttttcagataatgatggaacagtaattactttcagaatgttgtgtgggttcaaattctctatgtacagatgatgtaaaaatatgtatatgtctagataaaaggagagaaagc

SEQ ID NO: 3178 - protein, 846 aa, Homo sapiens; identical to SEQ ID NO: 300

SEQ ID NO: 3179 - DNA, 426 bp, Homo sapiens
aatactggacacattggcacaactcagcacatgatacaacaacagactttacagagtacatcaactcagagtcaacaaaatgtactgagtgggcacagtcagcaaacatctctacccagtcagacacagagcactcttacagccccactgtataacactatggtgatttctcagcctgcagccggaagcatggtccagattccatctagtatgccacaaaacagcacccagagtgctgcagtaactacattcactcaggacaggcagataaggtagttgtcatatttcatttgttatttttaaaattgtaaaccgattgattagaaaacaataatttgatttcttaatcaaattttttaatgtgattttaatgagatgctcactgcagccaatgttcttaaatttgaaataaaaacactgaatgta

SEQ ID NO: 3180 - protein, 81 aa, Homo sapiens
MIQQQTLQSTSTQSQQNVLSGHSQQTSLPSQTQSTLTAPLYNTMVISQPAAGSMVQIPSSMPQNSTQSAAVTTFTQDRQIR

SEQ ID NO: 3181 - DNA, 521 bp, Homo sapiens
gtaccatgtacggaaaaagtgtaatatattttagaattacttactccttataattgcacaacatgaaaagtaagcagtataacatgagtgaaggatgataacatccttcactagttatgtcccttagtttctaatccacccatctttgctctgctttgtaatattggacctggaccttcaaaatatttctcctttgccagcaggcacaaagttatccacatcagtaggtggtgctggagggacactgccaagaaagtgctcaactcctggttctggtgcttcttgctcttatgtcagggtgccaacgggaagatttctcacttttacatacacctgccccggcaggtggctttccagcaagtctcaatgacatcctagtgggcagcttccctgcaagctttaccagtaccccagctgatggcttccagctctctacctctaatctgtggcatgtcagtgaacttctctattatccagttgctatagccacatttgccccaagaagatctgcatcttagcct

SEQ ID NO: 3182 - protein, 75 aa, Homo sapiens [sequence omitted]

SEQ ID NO: 3183 - DNA, 398 bp, Homo sapiens
gtacatgctgtgtcatgtctaaattaacattgtattaaactacttgtgtaattaaatggattgtttaaaaaatgcatatttttcatttcatcagagtatctagaaacaaatctgaaaagaaacgtagagatcaatttaatgttctcattaaagaactgggatccatgcttcctggtaatgctagaaagatggacaaatctactgttctgcagaaaagcattgattttttacgaaaacataaagaaatcactgcacagtcagatgctagtgaaattcgacaggactggaaacctacattccttagtaatgaagagtttacacaattaatgttagaggctcttgatggtttttttttagcaatcatgacagatggaagcataatatatgtgtctgagagt

SEQ ID NO: 3184 - protein, 108 aa, Homo sapiens
MHIFHFIRVSRNKSEKKRRDQFNVLIKELGSMLPGNARKMDKSTVLQKSIDFLRKHKEITAQSDASEIRQDWKPTFLSNEEFTQLMLEALDGFFLAIMTDGSIIYVSE

SEQ ID NO: 3185 - DNA, 552 bp, Homo sapiens
gatcccaatgaagatacagaatggaatgacattttaagagatttcggcattcttcctcctaaagaagagtcaaaagatgaaattgaagaaatggttttacgtttacagaaagaagcaatggtgaaaccatttgaaaagatgactcttgcacagctaaaggaagctgaagatgaatttgatgaagaagatatgcaggctgttgaaacatatagaaagaagcggttacaggaatggaaagctcttaagaaaaaacaaaaatttggagaattaagagaaatttctggaaatcagtatgtgaatgaagtcacaaatgcagaagaagatgtgtgggttataattcatctatacagatcaagaacttgaatggaagctagcagaagttggagcaatacagactgatttggaagaaaaccccagaaaagacatggtagatatgatggtatcttcaattagaaacacttctattcatgatgacagtgatagctccaacagtgataatgataccaaatagagagaaatattcaataaatagcttttagtatatgtgtactg

SEQ ID NO: 3186 - protein, 90 aa, Homo sapiens
MVLRLQKEAMVKPFEKMTLAQLKEAEDEFDEEDMQAVETYRKKRLQEWKALKKKQKFGELREISGNQYVNEVTNAEEDVWVIIHLYRSRT

SEQ ID NO: 3187 - DNA, 870 bp, Homo sapiens
gaagcgggcgctcttccagcctggagaaggctgcgggtctccatccgtggcgcctcgccagctgcaggacgacgcgggctcttgaggggcagagcagcgcatcatgcaggatcccaatgaagatacagaatggaatgacattttaagagatttcggcattcttcctcctaaagaagagtcaaaagatgaaattgaagaaatggttttacgtttacagaaagaagcaatggtgaaaccatttgaaaagatgactcttgcacagctaaaggaagctgaagatgaatttgatgaagaagatatgcaggctgttgaaacatatagaaagaagcggttacaggaatggaaagctcttaagaaaaaacaaaaatttggagaattaagagaaatttctggaaatcagtatgtgaatgaagtcacaaatgcagaagaagatgtgtgggttataattcatctatacagatcaagcatcccaatgtgtttgttggttaaccagcatcttagtcttctagcaagaaagtttccagaaactaaatttgttaaagccatcgtgaatagctgtattcaacactaccatgacaattgtttaccaacaatttttgtgtataaaaatggtcagatagaagccaaattcattggaattatagaatgtggagggataaatctcaagctggaagaacttgaatggaagctagcagaagttggagcaatacagactgatttggaagaaaaccccagaaaagacatggtagatatgatggtatcttcaattagaaacacttctattcatgatgacagtgatagctccaacagtgataatgataccaaatagagagaaatattcaataaatagcttttagtatatgtgtactg

SEQ ID NO: 3188 - protein, 241 aa, Homo sapiens; identical to SEQ ID NO: 302

SEQ ID NO: 3189 - DNA, 756 bp, Homo sapiens
gccccgaggcacagccagggcaccaggtggagcaccagctacgcgtggcgcagcgcagcgtccctagcaccgagcctcccgcagccgccgagatgctgcgaacagagagctgccgccccaggtcgcccgccggacaggtggccgcggcgtccccgctcctgctgctgctgctgctgctcgcctggtgcgcgggcgcctgccgaggtgctccaatattacctcaaggattacagcctgaacaacagctacagttgtggaatgaggcatccaacgcactggaggagctttgctttatgattatgggaatgctaccaaagcctcaggaacaagatgaaaaagataatactaaaaggttcttatttcattattcgaagacacagaagttgggcaagtcaaatgttgtgtcgtcagttgtgcatccgttgctgcagctcgttcctcacctgcatgagagaagaatgaagagattcagagtggacgaagaattccaaagtccctttgcaagtcaaagtcgaggatattttttattcaggccacggaatggaagaaggtcagcagggttcatttaaaatggatgccagctaattttccacagagcaatgctatggaatacaaaatgtactgacattttgttttcttctgaaaaaaatccttgctaaatgtactctgttgaaaatccctgtgttgtcaatgttctcagttgtaacaatgttgtaaatgttcaatttgttgaaaattaaaaaatctaaaaatatt

SEQ ID NO: 3190 - protein, 158 aa, Homo sapiens
MLRTESCRPRSPAGQVAAASPLLLLLLLLAWCAGACRGAPILPQGLQPEQQLQLWNEASNALEELCFMIMGMLPKPQEQDEKDNTKRFLFHYSKTQKLGKSNVVSSVVHPLLQLVPHLHERRMKRFRVDEEFQSPFASQSRGYFLFRPRNGRRSAGFI

SEQ ID NO: 3191 - DNA, 696 bp, Homo sapiens
ggtggagcaccagctacgcgtggcgcagcgcagcgtccctagcaccgagcctcccgcagccgccgagatgctgcgaacagagagctgccgccccaggtcgcccgccggacaggtggccgcggcgtccccgctcctgctgctgctgctgctgctcgcctggtgcgcgggcgcctgccgaggtgctccaatattacctcaaggattacagcctgaacaacagctacagttgtggaatgagatagatgatacttgttcgtcttttctgtccattgattctcagcctcaggcatccaacgcactggaggagctttgctttatgattatgggaatgctaccaaagcctcagtcgtcagttgtgcatccgttgctgcagctcgttcctcacctgcatgagagaagaatgaagagattcagagtggacgaagaattccaaagtccctttgcaagtcaaagtcgaggatattttttattcaggccacggaatggaagaaggtcagcagggttcatttaaaatggatgccagctaattttccacagagcaatgctatggaatacaaaatgtactgacattttgttttcttctgaaaaaaatccttgctaaatgtactctgttgaaaatccctgtgttgtcaatgttctcagttgtaacaatgttgtaaatgttcaatttgttgaaaattaaaaaatctaaaaata

SEQ ID NO: 3192 - protein, 147 aa, Homo sapiens
MLRTESCRPRSPAGQVAAASPLLLLLLLLAWCAGACRGAPILPQGLQPEQQLQLWNEIDDTCSSFLSIDSQPQASNALEELCFMIMGMLPKPQSSVVHPLLQLVPHLHERRMKRFRVDEEFQSPFASQSRGYFLFRPRNGRRSAGFI

SEQ ID NO: 3193 - DNA, 711 bp, Homo sapiens
agggcaccaggtggagcaccagctacgcgtggcgcagcgcagcgtccctagcaccgagcctcccgcagccgccgagatgctgcgaacagagagctgccgccccaggtcgcccgccggacaggtggccgcggcgtccccgctcctgctgctgctgctgctgctcgcctggtgcgcgggcgcctgccgaggtgctccaatattacctcaaggattacagcctgaacaacagctacagttgtggaatgagatagatgatacttgttcgtcttttctgtccattgattctcagcctcaggcatccaacgcactggaggagctttgctttatgattatgggaatgctaccaaagcctcaggaacaagatgaaaaagataatactaaaaggttcttatttcattattcgaagacacagaagttgggcaagtcaaatgttgtggaagaattccaaagtccctttgcaagtcaaagtcgaggatattttttattcaggccacggaatggaagaaggtcagcagggttcatttaaaatggatgccagctaattttccacagagcaatgctatggaatacaaaatgtactgacattttgttttcttctgaaaaaaatccttgctaaatgtactctgttgaaaatccctgtgttgtcaatgttctcagttgtaacaatgttgtaaatgttcaatttgttgaaaattaaaaaatctaaaaata

SEQ ID NO: 3194 - protein, 149 aa, Homo sapiens
MLRTESCRPRSPAGQVAAASPLLLLLLLLAWCAGACRGAPILPQGLQPEQQLQLWNEIDDTCSSFLSIDSQPQASNALEELCFMIMGMLPKPQEQDEKDNTKRFLFHYSKTQKLGKSNVVEEFQSPFASQSRGYFLFRPRNGRRSAGFI

SEQ ID NO: 3195 - DNA, 816 bp, Homo sapiens
agtcctgtgtccgggccccgaggcacagccagggcaccaggtggagcaccagctacgcgtggcgcagcgcagcgtccctagcaccgagcctcccgcagccgccgagatgctgcgaacagagagctgccgccccaggtcgcccgccggacaggtggccgcggcgtccccgctcctgctgctgctgctgctgctcgcctggtgcgcgggcgcctgccgaggtgctccaatattacctcaaggattacagcctgaacaacagctacagttgtggaatgagatagatgatacttgttcgtcttttctgtccattgattctcagcctcaggcatccaacgcactggaggagctttgctttatgattatgggaatgctaccaaagcctcaggaacaagatgaaaaagataatactaaaaggttcttatttcattattcgaagacacagaagttgggcaagtcaaatgttgtgtcgtcagttgtgcatccgttgctgcagctcgttcctcacctgcatgagagaagaatgaagagattcagagtggacgaagaattccaaagtccctttgcaagtcaaagtcgaggatattttttattcaggccacggaatggaagaaggtcagcagggttcatttaaaatggatgccagctaattttccacagagcaatgctatggaatacaaaatgtactgacattttgttttcttctgaaaaaaatccttgctaaatgtactctgttgaaaatccctgtgttgtcaatgttctcagttgtaacaatgttgtaaatgttcaatttgttgaaaattaaaaaatctaaaaata

SEQ ID NO: 3196 - protein, 174 aa, Homo sapiens; identical to SEQ ID NO: 304

SEQ ID NO: 3197 - DNA, 2443 bp, Homo sapiens
ctgctcaaaatttgaagcctatatgccaactaaattcagaaatgttctccaaaatgctatctataagcaacagtagtcacaaatgcattgtagaaatatatcgatcatgctttttggaaaatccagcatgtcctgaggaagaatgtataagacataaaagtcataaattatggaaagactcttcagcttcttccaaatgtaaaggaatcatgatcttcccagcacattaatgccctttctcattagaatgtggggccggtccagacctaataacattgtctgagcagagaatccttggaggcactgaggctgaggagggaagctggccgtggcaagtcagtctgcggctcaataatgcccaccactgtggaggcagcctgatcaataacatgtggatcctgacagcagctcactgcttcagaagcaactctaatcctcgtgactggattgccacgtctggtatttccacaacatttcctaaactaagaatgagagtaagaaatattttaattcataacaattataaatctgcaactcatgaaaatgacattgcacttgtgagacttgagaacagtgtcacctttaccaaagatatccatagtgtgtgtctcccagctgctacccagaatattccacctggctctactgcttatgtaacaggatggggcgctcaagaatatgctggccacacagttccagagctaaggcaaggacaggtcagaataataagtaatgatgtatgtaatgcaccacatagttataatggagccatcttgtctggaatgctgtgtgctggagtacctcaaggtggagtggacgcatgtcagggtgactctggtggcccactagtacaagaagactcacggcggctttggtttattgtggggatagtaagctggggagatcagtgtggcctgccggataagccaggagtgtatactcgagtgacagcctaccttgactggattaggcaacaaactgggatctagtgcaacaagtgcatccctgttgcaaagtctgtatgcaggtgtgcctgtcttaaattccaaagctttacatttcaactgaaaaagaaactagaaatgtcctaatttaacatcttgttacataaatatggtttaacaaacactgtttaacctttctttattattaaaggttttctattttctccagagaactatatgaatgttgcatagtactgtggctgtgtaacagaagaaacacactaaactaattacaaagttaacaatttcattacagttgtgctaaatgcccgtagtgagaagaacaggaaccttgagcatgtatagtagaggaacctgcacaggtctgatgggtcagaggggtcttctctgggtttcactgaggatgagaagtaagcaaactgtggaaacatgcaaaggaaaaagtgatagaataatattcaagacaaaaagaacagtatgaggcaagagaaataatatgtatttaaaatttttggttactcaatatcttatacttagtatgagtcctaaaattaaaaatgtgaaactgttgtactatacgtataacctaaccttaattattctgtaagaacatgcttccataggaaatagtggataattttcagctatttaaggcaaaagctaaaatagttcactcctcaactgagacccaaagaattatagatatttttcatgatgacccatgaaaaatatcactcatctacataaaggagagactatatctattttatagagaagctaagaaatatacctacacaaacttgtcaggtgctttacaactacatagtactttttaacaacaaaataataattttaagaatgaaaaatttaatcatcgggaagaacgtcccactacagacttcctatcactggcagttatatttttgagcgtaaaagggtcgtcaaacgctaaatctaagtaacgaattgaaagtttaaagagggggaagagttggtttgcaaaggaaaagtttaaatagcttaatatcaatagaatgatcctgaagacagaaaaaactttgtcactcttcctctctcattttctttctctctctctccccttctcatacacatgcctcccccaccaaagaatataatgtaaattaaatccactaaaatgtaatggcatgaaaatctctgtagtctgaatcactaatattcctgagtttttatgagctcctagtacagctaaagtttgcctatgcatgatcatctatgcgtcagagcttcctccttctacaagctaactccctgcatctgggcatcaggactgctccatacatttgctgaaaacttcttgtatttcctgatgtaaaattgtgcaaacacctacaataaagccatctacttttagggaaagggagttgaaaatgcaaccaactcttggcgaactgtacaaacaaatctttgctatactttatttcaaataaattcttttt

SEQ ID NO: 3198 - protein, 199 aa, Homo sapiens [sequence omitted]

SEQ ID NO: 3199 - DNA, 1505 bp, Homo sapiens
catttgagtgggaatctcaaagcagttgagtaggcagaaaaaagaacctcttcattaaggattaaaatgtataggccagcacgtgtaacttcgacttcaagatttctgaatccatatgtagtatgtttcattgtcgtcgcaggggtagtgatcctggcagtcaccatagctctacttgtttactttttagcttttgatcaaaaatcttacttttataggagcagttttcaactcctaaatgttgaatataatagtcagttaaattcaccagctacacaggaatacaggactttgagtggaagaattgaatctctgattactaaaacattcaaagaatcaaatttaagaaatcagttcatcagagctcatgttgccaaactgaggcaagatggtagtggtgtgagagcggatgttgtcatgaaatttcaattcactagaaataacaatggagcatcaatgaaaagcagaattgagtctgttttacgacaaatgctgaataactctggaaacctggaaataaacccttcaactgagataacatcacttactgaccaggctgcagcaaattggcttattaatgaatgtggggccggtccagacctaataacattgtctgagcagagaatccttggaggcactgaggctgaggagggaagctggccgtggcaagtcagtctgcggctcaataatgcccaccactgtggaggcagcctgatcaataacatgtggatcctgacagcagctcactgcttcagaagcaactctaatcctcgtgactggattgccacgtctggtatttccacaacatttcctaaactaagaatgagagtaagaaatattttaattcataacaattataaatctgcaactcatgaaaatgacattgcacttgtgagacttgagaacagtgtcacctttaccaaagatatccatagtgtgtgtctcccagctgctacccagaatattccacctggctctactgcttatgtaacaggatggggcgctcaagaatatgctggccacacagttccagagctaaggcaaggacaggtcagaataataagtaatgatgtatgtaatgcaccacatagttataatggagccatcttgtctggaatgctgtgtgctggagtacctcaaggtggagtggacgcatgtcagggtgactctggtggcccactagtacaagaagactcacggcggctttggtttattgtggggatagtaagctggggagatcagtgtggcctgccggataagccaggagtgtatactcgagtgacagcctaccttgactggattaggcaacaaactgggatctagtgcaacaagtgcatccctgttgcaaagtctgtatgcaggtgtgcctgtcttaaattccaaagctttacatttcaactgaaaaagaaactagaaatgtcctaatttaacatcttgttacataaatatggtttaacaaacactgtttaacctttctttattattaaaggttttctattttctcc

SEQ ID NO: 3200 - protein, 418 aa, Homo sapiens; identical to SEQ ID NO: 306

SEQ ID NO: 3201 - DNA, 678 bp, Homo sapiens
atttgagtgggaatctcaaagcagttgagtaggcagaaaaaagaacctcttcattaaggattaaaatgtataggccagcacgtgtaacttcgacttcaagatttctgaatccatatgtagtatgtttcattgtcgtcgcaggggtagtgatcctggcagtcaccatagctctacttgtttactttttagcttttgatcaaaaatcttacttttataggagcagttttcaactcctaaatgttgaatataatagtcagttaaattcaccagctacacaggaatacaggactttgagtggaagaattgaatctctgattactaaaacattcaaagaatcaaatttaagaaatcagttcatcagagctcatgttgccaaactgaggcaagatggtagtggtgtgagagcggatgttgtcatgaaatttcaattcactagaaataacaatggagcatcaatgaaaagcagaattgagtctgttttacgacaaatgctgaataactctggaaacctggaaataaacccttcaactgagataacatgtaagtataatttttcataaacaattttatttcaatatatccctcaagtttaccaattcaaattcatattttaattgagaggctgacttttctttctttgaaactaaactgtgaaaacaatccattaaaaagctaaat

SEQ ID NO: 3202 - protein, 164 aa, Homo sapiens
MYRPARVTSTSRFLNPYVVCFIVVAGVVILAVTIALLVYFLAFDQKSYFYRSSFQLLNVEYNSQLNSPATQEYRTLSGRIESLITKTFKESNLRNQFIRAHVAKLRQDGSGVRADVVMKFQFTRNNNGASMKSRIESVLRQMLNNSGNLEINPSTEITCKYNFS

SEQ ID NO: 3203 - DNA, 2027 bp, Homo sapiens
ctgagggagaaggaaagggaccaagagtaggacattgtcaaacatggttttagtctcattttttacaaagaacatgtattaatatgttgtttgtctaattgaaaatgtttatttcttctctttttttcattctgataaatgtctgtcaatgttttatcacattaagtcatttggggaaacatatagttttatattaatttatttgcctgtactctcagaagtgggtatttaaaaaaactattatgtattagtaaattcactatgcttctgtaagatacctgctgttcaacatgaatttatggaatatttcttgagttatatttttattatgtatttagattttaagatctgtttgtttttatctagagcttttatgtgacagtttctttaaaatacttatatacctaccataatcttctttaaattcttaattctagtacattcctaaggtatttctcattctaatctttgtaaccagtttctcctcctttaacaaaattagtccatactaaaaaaatattgctttcttgttgggactatcctgtctctggctttcttcaaggccttctatgggttgaaacttctctgttcagacttgtcaaactagtttcatttcaactacttgtaatttgtttccttatttctttgagccgtagacttctaatacatctagagatgtcatatagttgattagaaagttgagttcagtgggtgcagacctgcaagatcatattcttcctcctgtacatgatgtatcggacagtgggatttggcacccgaagcagaaatctgaagccatggatgattgccgttctcattgtgttgtccctgacagtggtggcagtgaccataggtctcctggttcacttcctagtatttgaccaaaaaaaggagtactatcatggctcctttaaaattttagatccacaaatcaataacaatttcggacaaagcaacacatatcaacttaaggacttacgagagacgaccgaaaatttggtggatgagatatttatagattcagcctggaagaaaaattatatcaagaaccaagtagtcagactgactccagaggaagatggtgtgaaagtagatgtcattatggtgttccagttcccctctactgaacaaagggcagtaagagagaagaaaatccaaagcatcttaaatcagaagataaggaatttaagagccttgccaataaatgcctcatcagttcaagttaatgcaatgagctcatcaacaggggagttaactgtccaagcaagttgtggtaaacgagttgttccattaaacgtcaacagaatagcatctggagtcattgcacccaaggcggcctggccttggcaagcttcccttcagtatgataacatccatcagtgtggggccaccttgattagtaacacatggcttgtcactgcagcacactgcttccagaagtataaaaatccacatcaatggactgttagttttggaacaaaaatcaaccctcccttaatgaaaagaaatgtcagaagatttattatccatgagaagtaccgctctgcagcaagagagtacgacattgctgttgtgcaggtctcttccagagtcaccttttcggatgacatacgccagatttgtttgccagaagcctctgcatccttccaaccaaatttgactgtccacatcacaggatttggagcactttactatggtggggaatcccaaaatgatctccgagaagccagagtgaaaatcataagtgatgatgtctgcaagcaaccacaggtgtatggcaatgatataaaacctggaatgttctgtgccggatatatggaaggaatttatgatgcctgcaggggtgattctgggggacctttagtcacaagggatctgaaagatacgtggtatctcattggaattgtaagctggggagataactgtggtcaaaaggacaagcctggagtctacacacaagtgacttattaccgaaactggattgcttcaaaaacaggcatctaattcacgataaaagttaaacaaag

SEQ ID NO: 3204 - protein, 418 aa, Homo sapiens
MMYRTVGFGTRSRNLKPWMIAVLIVLSLTVVAVTIGLLVHFLVFDQKKEYYHGSFKILDPQINNNFGQSNTYQLKDLRETTENLVDEIFIDSAWKKNYIKNQVVRLTPEEDGVKVDVIMVFQFPSTEQRAVREKKIQSILNQKIRNLRALPINASSVQVNAMSSSTGELTVQASCGKRVVPLNVNRIASGVIAPKAAWPWQASLQYDNIHQCGATLISNTWLVTAAHCFQKYKNPHQWTVSFGTKINPPLMKRNVRRFIIHEKYRSAAREYDIAVVQVSSRVTFSDDIRQICLPEASASFQPNLTVHITGFGALYYGGESQNDLREARVKIISDDVCKQPQVYGNDIKPGMFCAGYMEGIYDACRGDSGGPLVTRDLKDTWYLIGIVSWGDNCGQKDKPGVYTQVTYYRNWIASKTGI

SEQ ID NO: 3205 - DNA, 8192 bp, Homo sapiens
gagtagctccagcggccacgctgaggcgagggtgacacaccatgctcacggcccctggagaccgtcgtgctggcgagccgtgctccgtagctccccggtccgcctcggcagcggtcagagtcgcctacaggagttgagccgcccgcgccagaaggttttggcgaagctcttggagaggcgtcgagcacagtagggcggcgggggtgcgttgagcgctcgggggtcaggcagtcggccgggatcgccgctggggagcgtttccgaggcgaggaggaggaggaggagatgctgctcctcttctccccctccccaggctccttctacagctccttcagcccacgcccgcagccgcttgtgggagaagtggtggtggctctcggcgcccgcggcggctgccggcggcccgccccgacgccgcgtccctgcagccctcgcccggcgctccagtagcaggacccggtctcgggaccagccggtaatatgcacgtgtcactagctgaggccctggaggttcggggtggaccacttcaggaggaagaaatatgggctgtattaaatcaaagtgctgaaagtctccaagaattattcagaaaagtaagcctagctgatcctgctgcccttggcttcatcatttctccatggtctctgctgttgctgccatctggtagtgtgtcatttacagatgaaaatatttccaatcaggatcttcgagcattcactgcaccagaggttcttcaaaatcagtcactaacttctctctcagatgttgaaaagatccacatttattctcttggaatgacactgtattggggggctgattatgaagtgcctcagagccaacctattaagcttggagatcatctcaacagcatactgcttggaatgtgtgaggatgttatttacgctcgagtttctgttcggactgtgctggatgcttgcagtgcccacattaggaatagcaattgtgcaccctcattttcctacgtgaaacacttggtaaaactggttctgggaaatctttctgggacagatcagctttcctgtaacagtgaacaaaagcctgatcgaagccaggctattcgagatcgattgcgaggaaaaggattaccaacaggaagaagctctacttctgatgtactagacatacaaaagcctccactctctcatcagacctttcttaacaaagggcttagtaaatctatgggatttctgtccatcaaagatacacaagatgagaattatttcaaggacattttatcagataattctggacgtgaagattctgaaaatacattctccccttaccagttcaaaactagtggcccagaaaaaaaacccatccctggcattgatgtgctttctaagaagaagatctgggcttcatccatggacttgctttgtacagctgacagagacttctcttcaggagagactgccacatatcgtcgttgtcaccctgaggcagtaacagtgcggacttcaactactcctagaaaaaaggaggcaagatactcagatggaagtatagccttggatatctttggccctcagaaaatggatccaatatatcacactcgagaattgcccacctcctcagcaatatcaagtgctttggaccgaatccgagagagacaaaagaaacttcaggttctgagggaagccatgaatgtagaagaaccagttcgaagatacaaaacttatcatggtgatgtctttagtacctccagtgaaagtccatctattatttcctctgaatcagatttcagacaagtgagaagaagtgaagcctcaaagaggtttgaatccagcagtggtctcccaggggtagatgaaaccttaagtcaaggccagtcacagagaccgagcagacaatatgaaacaccctttgaaggcaacttaattaatcaagagatcatgctaaaacggcaagaggaagaactgatgcagctacaagccaaaatggcccttagacagtctcggttgagcctatatccaggagacacaatcaaagcgtccatgcttgacatcaccagggatccgttaagagaaattgccctagaaacagccatgactcaaagaaaactgaggaatttctttggccctgagtttgtgaaaatgacaattgaaccatttatatctttggatttgccacggtctattcttactaagaaagggaagaatgaggataaccgaaggaaagtaaacataatgcttctgaacgggcaaagactggaactgacctgtgataccaaaactatatgtaaagatgtgtttgatatggttgtggcacatattggcttagtagagcatcatttgtttgctttagctaccctcaaagataatgaatatttctttgttgatcctgacttaaaattaaccaaagtggccccagagggatggaaagaagaaccaaagaaaaagaccaaagccactgttaattttactttgtttttcagaattaaattttttatggatgatgttagtctaatacaacatactctgacgtgtcatcagtattaccttcagcttcgaaaagatattttggaggaaaggatgcactgtgatgatgagacttccttattgctggcatccttggctctccaggctgagtatggagattatcaaccagaggttcatggtgtgtcttactttagaatggagcactatttgcccgccagagtgatggagaaacttgatttatcctatatcaaagaagagttacccaaattgcataatacctatgtgggagcttctgaaaaagagacagagttagaatttttaaaggtctgccaaagactgacagaatatggagttcattttcaccgagtgcaccctgagaagaagtcacaaacaggaatattgcttggagtctgttctaaaggtgtccttgtgtttgaagttcacaatggagtgcgcacattggtccttcgctttccatggagggaaaccaagaaaatatctttttctaaaaagaaaatcacattgcaaaatacatcagatggaataaaacatggcttccagacagacaacagtaagatatgccagtacctgctgcacctctgctcttaccagcataagttccagctacagatgagagcaagacagagcaaccaagatgcccaagatattgagagagcttcgtttaggagcctgaatctccaagcagagtctgttagaggatttaatatgggacgagcaatcagcactggcagtctggccagcagcaccctcaacaaacttgctgttcgacctttatcagttcaagctgagattctgaagaggctatcctgctcagagctgtcgctttaccagccattgcaaaacagttcaaaagagaagaatgacaaagcttcatgggaggaaaagcctagagagatgagtaaatcataccatgatctcagtcaggcctctctctatccacatcggaaaaatgtcattgttaacatggaacccccaccacaaaccgttgcagagttggtgggaaaaccttctcaccagatgtcaagatctgatgcagaatctttggcaggagtgacaaaacttaataattcaaagtctgttgcgagtttaaatagaagtcctgaaaggaggaaacatgaatcagactcctcatccattgaagaccctgggcaagcatatgttctaggaatgactatgcatagttctggaaactcttcatcccaagtacccttaaaagaaaatgatgtgctacacaaaagatggagcatagtatcttcaccagaaagggagatcaccttagtgaacctgaaaaaagatgcaaagtatggcttgggatttcaaattattggtggggagaagatgggaagactggacctaggcatatttatcagttcagttgcccctggaggaccagctgacttggatggatgcttgaagccaggagaccgtttgatatctgtgaatagtgtgagtctggagggagtcagccaccatgctgcaattgaaattttgcaaaatgcacctgaagatgtgacacttgttatctctcagccaaaagaaaagatatccaaagtgccttctactcctgtgcatctcaccaatgagatgaaaaactacatgaagaaatcttcctacatgcaagacagtgctatagattcttcttccaaggatcaccactggtcacgtggtaccctgaggcacatctcggagaactcctttgggccatctgggggcctgcgggaaggaagcctgagttctcaagattccaggactgagagtgccagcttgtctcaaagccaggtcaatggtttctttgccagccatttaggtgaccaaacctggcaggaatcacagcatggcagcccttccccatctgtaatatccaaagccaccgagaaagagactttcactgatagtaaccaaagcaaaactaaaaagccaggcatttctgatgtaactgattactcagaccgtggagattcagacatggatgaagccacttactccagcagtcaggatcatcaaacaccaaaacaggaatcttcctcttcagtgaatacatccaacaagatgaattttaaaactttttcttcatcacctcctaagcctggagatatctttgaggttgaactggctaaaaatgataacagcttggggataagtgtcacgggaggtgtgaatacgagtgtcagacatggtggcatttatgtgaaagctgttattccccagggagcagcagagtctgatggtagaattcacaaaggtgatcgcgtcctagctgtcaatggagttagtctagaaggagccacccataagcaagctgtggaaacactgagaaatacaggacaggtggttcatctgttattagaaaagggacaatctccaacatctaaagaacatgtcccggtaaccccacagtgtaccctttcagatcagaatgcccaaggtcaaggcccagaaaaagtgaagaaaacaactcaggtcaaagactacagctttgtcactgaagaaaatacatttgaggtaaaattatttaaaaatagctcaggtctaggattcagtttttctcgagaagataatcttataccggagcaaattaatgccagcatagtaagggttaaaaagctctttcctggacagccagcagcagaaagtggaaaaattgatgtaggagatgttatcttgaaagtgaatggagcctctttgaaaggactatctcagcaggaagtcatatctgctctcaggggaactgctccagaagtattcttgcttctctgcagacctccacctggtgtgctaccggaaattgatactgcgcttttgaccccacttcagtctccagcacaagtacttccaaacagcagtaaagactcttctcagccatcatgtgtggagcaaagcaccagctcagatgaaaatgaaatgtcagacaaaagcaaaaaacagtgcaagtccccatccagaagagacagttacagtgacagcagtgggagtggagaagatgacttagtgacagctccagcaaacatatcaaattcgacctggagttcagctttgcatcagactctaagcaacatggtatcacaggcacagagtcatcatgaagcacccaagagtcaagaagataccatttgtaccatgttttactatcctcagaaaattcccaataaaccagagtttgaggacagtaatccttcccctctaccaccggatatggctcctgggcagagttatcaaccccaatcagaatctgcttcctctagttcgatggataagtatcatatacatcacatttctgaaccaactagacaagaaaactggacacctttgaaaaatgacttggaaaatcaccttgaagactttgaactggaagtagaactcctcattaccctaattaaatcagaaaaaggaagcctgggttttacagtaaccaaaggcaatcagagaattggttgttatgttcatgatgtcatacaggatccagccaaaagtgatggaaggctaaaacctggggaccggctcataaaggttaatgatacagatgttactaatatgactcatacagatgcagttaatctgctccgggctgcatccaaaacagtcagattagttattggacgagttctagaattacccagaataccaatgttgcctcatttgctaccggacataacactaacgtgcaacaaagaggagttgggtttttccttatgtggaggtcatgacagcctttatcaagtggtatatattagtgatattaatccaaggtccgtcgcagccattgagggtaatctccagctattagatgtcatccattatgtgaacggagtcagcacacaaggaatgaccttggaggaagttaacagagcattagacatgtcacttccttcattggtattgaaagcaacaagaaatgatcttccagtggtccccagctcaaagaggtctgctgtttcagctccaaagtcaaccaaaggcaatggttcctacagtgtggggtcttgcagccagcctgccctcactcctaatgattcattctccacggttgctggggaagaaataaatgaaatatcgtaccccaaaggaaaatgttctacttatcagataaagggatcaccaaacttgactctgcccaaagaatcttatatacaagaagatgacatttatgatgattcccaagaagctgaagttatccagtctctgctggatgttgtggatgaggaagcccagaatcttttaaacgaaaataatgcagcaggatactcctgtggtccaggtacattaaagatgaatgggaagttatcagaagagagaacagaagatacagactgcgatggttcacctttacctgagtattttactgaggccaccaaaatgaatggctgtgaagaatattgtgaagaaaaagtaaaaagtgaaagcttaattcagaagccacaagaaaagaagactgatgatgatgaaataacatggggaaatgatgagttgccaatagagagaacaaaccatgaagattctgataaagatcattcctttctgacaaacgatgagctcgctgtactccctgtcgtcaaagtgcttccctctggtaaatacacgggtgccaacttaaaatcagtcattcgagtcctgcggggtttgctagatcaaggaattccttctaaggagctggagaatcttcaagaattaaaacctttggatcagtgtctaattgggcaaactaaggaaaacagaaggaagaacagatataaaaatatacttccctatgatgctacaagagtgcctcttggagatgaaggtggctatatcaatgccagcttcattaagataccagttgggaaagaagagttcgtttacattgcctgccaaggaccactgcctacaactgttggagacttctggcagatgatttgggagcaaaaatccacagtgatagccatgatgactcaagaagtagaaggagaaaaaatcaaatgccagcgctattggcccaacatcctaggcaaaacaacaatggtcagcaacagacttcgactggctcttgtgagaatgcagcagctgaagggctttgtggtgagggcaatgacccttgaagatattcagaccagagaggtgcgccatatttctcatctgaatttcactgcctggccagaccatgatacaccttctcaaccagatgatctgcttacttttatctcctacatgagacacatccacagatcaggcccaatcattacgcactgcagtgctggcattggacgttcagggaccctgatttgcatagatgtggttctgggattaatcagtcaggatcttgattttgacatctctgatttggtgcgctgcatgagactacaaagacacggaatggttcagacagaggatcaatatattttctgctatcaagtcatcctttatgtcctgacacgtcttcaagcagaagaagagcaaaaacagcagcctcagcttctgaagtgacatgaaaagagcctctggatgcatttccatttctctccttaacctccagcagactcctgctctctatccaaaataaagatcacagagcagcaagttcatacaacatgcatgttctcctctatcttagaggggtattcttcttgaaaataaaaaatattgaaatgctgtatttttacagctactttaacctatgataattatttacaaaattttaacactaaccaaacaatgcagatcttagggatgattaaagg

SEQ ID NO: 3206 - protein, 2485 aa, Homo sapiens; identical to SEQ ID NO: 312

SEQ ID NO: 3207 - DNA, 7987 bp, Homo sapiens
gagtagctccagcggccacgctgaggcgagggtgacacaccatgctcacggcccctggagaccgtcgtgctggcgagccgtgctccgtagctccccggtccgcctcggcagcggtcagagtcgcctacaggagttgagccgcccgcgccagaaggttttggcgaagctcttggagaggcgtcgagcacagtagggcggcgggggtgcgttgagcgctcgggggtcaggcagtcggccgggatcgccgctggggagcgtttccgaggcgaggaggaggaggaggagatgctgctcctcttctccccctccccaggctccttctacagctccttcagcccacgcccgcagccgcttgtgggagaagtggtggtggctctcggcgcccgcggcggctgccggcggcccgccccgacgccgcgtccctgcagccctcgcccggcgctccagtagcaggacccggtctcgggaccagccggtaatatgcacgtgtcactagctgaggccctggaggttcggggtggaccacttcaggaggaagaaatatgggctgtattaaatcaaagtgctgaaagtctccaagaattattcagaaaagtaagcctagctgatcctgctgcccttggcttcatcatttctccatggtctctgctgttgctgccatctggtagtgtgtcatttacagatgaaaatatttccaatcaggatcttcgagcattcactgcaccagaggttcttcaaaatcagtcactaacttctctctcagatgttgaaaagatccacatttattctcttggaatgacactgtattggggggctgattatgaagtgcctcagagccaacctattaagcttggagatcatctcaacagcatactgcttggaatgtgtgaggatgttatttacgctcgagtttctgttcggactgtgctggatgcttgcagtgcccacattaggaatagcaattgtgcaccctcattttcctacgtgaaacacttggtaaaactggttctgggaaatctttctgggacagatcagctttcctgtaacagtgaacaaaagcctgatcgaagccaggctattcgagatcgattgcgaggaaaaggattaccaacaggaagaagctctacttctgatgtactagacatacaaaagcctccactctctcatcagacctttcttaacaaagggcttagtaaatctatgggatttctgtccatcaaagatacacaagatgagaattatttcaaggacattttatcagataattctggacgtgaagattctgaaaatacattctccccttaccagttcaaaactagtggcccagaaaaaaaacccatccctggcattgatgtgctttctaagaagaagatctgggcttcatccatggacttgctttgtacagctgacagagacttctcttcaggagagactgccacatatcgtcgttgtcaccctgaggcagtaacagtgcggacttcaactactcctagaaaaaaggaggcaagatactcagatggaagtatagccttggatatctttggccctcagaaaatggatccaatatatcacactcgagaattgcccacctcctcagcaatatcaagtgctttggaccgaatccgagagagacaaaagaaacttcaggttctgagggaagccatgaatgtagaagaaccagttcgaagatacaaaacttatcatggtgatgtctttagtacctccagtgaaagtccatctattatttcctctgaatcagatttcagacaagtgagaagaagtgaagcctcaaagaggtttgaatccagcagtggtctcccaggggtagatgaaaccttaagtcaaggccagtcacagagaccgagcagacaatatgaaacaccctttgaaggcaacttaattaatcaagagatcatgctaaaacggcaagaggaagaactgatgcagctacaagccaaaatggcccttagacagtctcggttgagcctatatccaggagacacaatcaaagcgtccatgcttgacatcaccagggatccgttaagagaaattgccctagaaacagccatgactcaaagaaaactgaggaatttctttggccctgagtttgtgaaaatgacaattgaaccatttatatctttggatttgccacggtctattcttactaagaaagggaagaatgaggataaccgaaggaaagtaaacataatgcttctgaacgggcaaagactggaactgacctgtgataccaaaactatatgtaaagatgtgtttgatatggttgtggcacatattggcttagtagagcatcatttgtttgctttagctaccctcaaagataatgaatatttctttgttgatcctgacttaaaattaaccaaagtggccccagagggatggaaagaagaaccaaagaaaaagaccaaagccactgttaattttactttgtttttcagaattaaattttttatggatgatgttagtctaatacaacatactctgacgtgtcatcagtattaccttcagcttcgaaaagatattttggaggaaaggatgcactgtgatgatgagacttccttattgctggcatccttggctctccaggctgagtatggagattatcaaccagaggttcatggtgtgtcttactttagaatggagcactatttgcccgccagagtgatggagaaacttgatttatcctatatcaaagaagagttacccaaattgcataatacctatgtgggagcttctgaaaaagagacagagttagaatttttaaaggtctgccaaagactgacagaatatggagttcattttcaccgagtgcaccctgagaagaagtcacaaacaggaatattgcttggagtctgttctaaaggtgtccttgtgtttgaagttcacaatggagtgcgcacattggtccttcgctttccatggagggaaaccaagaaaatatctttttctaaaaagaaaatcacattgcaaaatacatcagatggaataaaacatggcttccagacagacaacagtaagatatgccagtacctgctgcacctctgctcttaccagcataagttccagctacagatgagagcaagacagagcaaccaagatgcccaagatattgatgtgctacacaaaagatggagcatagtatcttcaccagaaagggagatcaccttagtgaacctgaaaaaagatgcaaagtatggcttgggatttcaaattattggtggggagaagatgggaagactggacctaggcatatttatcagttcagttgcccctggaggaccagctgacttggatggatgcttgaagccaggagaccgtttgatatctgtgaatagtgtgagtctggagggagtcagccaccatgctgcaattgaaattttgcaaaatgcacctgaagatgtgacacttgttatctctcagccaaaagaaaagatatccaaagtgccttctactcctgtgcatctcaccaatgagatgaaaaactacatgaagaaatcttcctacatgcaagacagtgctatagattcttcttccaaggatcaccactggtcacgtggtaccctgaggcacatctcggagaactcctttgggccatctgggggcctgcgggaaggaagcctgagttctcaagattccaggactgagagtgccagcttgtctcaaagccaggtcaatggtttctttgccagccatttaggtgaccaaacctggcaggaatcacagcatggcagcccttccccatctgtaatatccaaagccaccgagaaagagactttcactgatagtaaccaaagcaaaactaaaaagccaggcatttctgatgtaactgattactcagaccgtggagattcagacatggatgaagccacttactccagcagtcaggatcatcaaacaccaaaacaggaatcttcctcttcagtgaatacatccaacaagatgaattttaaaactttttcttcatcacctcctaagcctggagatatctttgaggttgaactggctaaaaatgataacagcttggggataagtgtcacgggaggtgtgaatacgagtgtcagacatggtggcatttatgtgaaagctgttattccccagggagcagcagagtctgatggtagaattcacaaaggtgatcgcgtcctagctgtcaatggagttagtctagaaggagccacccataagcaagctgtggaaacactgagaaatacaggacaggtggttcatctgttattagaaaagggacaatctccaacatctaaagaacatgtcccggtaaccccacagtgtaccctttcagatcagaatgcccaaggtcaaggcccagaaaaagtgaagaaaacaactcaggtcaaagactacagctttgtcactgaagaaaatacatttgaggtaaaattatttaaaaatagctcaggtctaggattcagtttttctcgagaagataatcttataccggagcaaattaatgccagcatagtaagggttaaaaagctctttcctggacagccagcagcagaaagtggaaaaattgatgtaggagatgttatcttgaaagtgaatggagcctctttgaaaggactatctcagcaggaagtcatatctgctctcaggggaactgctccagaagtattcttgcttctctgcagacctccacctggtgtgctaccggaaattgatactgcgcttttgaccccacttcagtctccagcacaagtacttccaaacagcagtaaagactcttctcagccatcatgtgtggagcaaagcaccagctcagatgaaaatgaaatgtcagacaaaagcaaaaaacagtgcaagtccccatccagaagagacagttacagtgacagcagtgggagtggagaagatgacttagtgacagctccagcaaacatatcaaattcgacctggagttcagctttgcatcagactctaagcaacatggtatcacaggcacagagtcatcatgaagcacccaagagtcaagaagataccatttgtaccatgttttactatcctcagaaaattcccaataaaccagagtttgaggacagtaatccttcccctctaccaccggatatggctcctgggcagagttatcaaccccaatcagaatctgcttcctctagttcgatggataagtatcatatacatcacatttctgaaccaactagacaagaaaactggacacctttgaaaaatgacttggaaaatcaccttgaagactttgaactggaagtagaactcctcattaccctaattaaatcagaaaaaggaagcctgggttttacagtaaccaaaggcaatcagagaattggttgttatgttcatgatgtcatacaggatccagccaaaagtgatggaaggctaaaacctggggaccggctcataaaggttaatgatacagatgttactaatatgactcatacagatgcagttaatctgctccgggctgcatccaaaacagtcagattagttattggacgagttctagaattacccagaataccaatgttgcctcatttgctaccggacataacactaacgtgcaacaaagaggagttgggtttttccttatgtggaggtcatgacagcctttatcaagtggtatatattagtgatattaatccaaggtccgtcgcagccattgagggtaatctccagctattagatgtcatccattatgtgaacggagtcagcacacaaggaatgaccttggaggaagttaacagagcattagacatgtcacttccttcattggtattgaaagcaacaagaaatgatcttccagtggtccccagctcaaagaggtctgctgtttcagctccaaagtcaaccaaaggcaatggttcctacagtgtggggtcttgcagccagcctgccctcactcctaatgattcattctccacggttgctggggaagaaataaatgaaatatcgtaccccaaaggaaaatgttctacttatcagataaagggatcaccaaacttgactctgcccaaagaatcttatatacaagaagatgacatttatgatgattcccaagaagctgaagttatccagtctctgctggatgttgtggatgaggaagcccagaatcttttaaacgaaaataatgcagcaggatactcctgtggtccaggtacattaaagatgaatgggaagttatcagaagagagaacagaagatacagactgcgatggttcacctttacctgagtattttactgaggccaccaaaatgaatggctgtgaagaatattgtgaagaaaaagtaaaaagtgaaagcttaattcagaagccacaagaaaagaagactgatgatgatgaaataacatggggaaatgatgagttgccaatagagagaacaaaccatgaagattctgataaagatcattcctttctgacaaacgatgagctcgctgtactccctgtcgtcaaagtgcttccctctggtaaatacacgggtgccaacttaaaatcagtcattcgagtcctgcggggtttgctagatcaaggaattccttctaaggagctggagaatcttcaagaattaaaacctttggatcagtgtctaattgggcaaactaaggaaaacagaaggaagaacagatataaaaatatacttccctatgatgctacaagagtgcctcttggagatgaaggtggctatatcaatgccagcttcattaagataccagttgggaaagaagagttcgtttacattgcctgccaaggaccactgcctacaactgttggagacttctggcagatgatttgggagcaaaaatccacagtgatagccatgatgactcaagaagtagaaggagaaaaaatcaaatgccagcgctattggcccaacatcctaggcaaaacaacaatggtcagcaacagacttcgactggctcttgtgagaatgcagcagctgaagggctttgtggtgagggcaatgacccttgaagatattcagaccagagaggtgcgccatatttctcatctgaatttcactgcctggccagaccatgatacaccttctcaaccagatgatctgcttacttttatctcctacatgagacacatccacagatcaggcccaatcattacgcactgcagtgctggcattggacgttcagggaccctgatttgcatagatgtggttctgggattaatcagtcaggatcttgattttgacatctctgatttggtgcgctgcatgagactacaaagacacggaatggttcagacagaggatcaatatattttctgctatcaagtcatcctttatgtcctgacacgtcttcaagcagaagaagagcaaaaacagcagcctcagcttctgaagtgacatgaaaagagcctctggatgcatttccatttctctccttaacctccagcagactcctgctctctatccaaaataaagatcacagagcagcaagttcatacaacatgcatgttctcctctatcttagaggggtattcttcttgaaaataaaaaatattgaaatgctgtatttttacagctactttaacctatgataattatttacaaaattttaacactaaccaaacaatgcagatcttagggatgattaaaggcagcatttgatgatagcagacattgttacaaggacatggtgagtctatttttaatgcaccaatcttgtttatagcaaaaatgttttccaatattttaataaagtagttattttataggggatacttgaaaccagtatttaagctttaaatgacagtaatattggcatagaaaaaagtagcaaatgtttactgtatcaatttctaatgtttactatatagaatttcctgtaatatatttatatactttttcatgaaaatggagttatcagttatctgtttgttactgcatcatctgtttgtaatcattatctcactttgtaaataaaaacacaccttaaaacatgaacaagccaaaactgtgtgcagac

SEQ ID NO: 3208 - protein, 2294 aa, Homo sapiens; identical to SEQ ID NO: 314

SEQ ID NO: 3209 - DNA, 8192 bp, Homo sapiens
gagtagctccagcggccacgctgaggcgagggtgacacaccatgctcacggcccctggagaccgtcgtgctggcgagccgtgctccgtagctccccggtccgcctcggcagcggtcagagtcgcctacaggagttgagccgcccgcgccagaaggttttggcgaagctcttggagaggcgtcgagcacagtagggcggcgggggtgcgttgagcgctcgggggtcaggcagtcggccgggatcgccgctggggagcgtttccgaggcgaggaggaggaggaggagatgctgctcctcttctccccctccccaggctccttctacagctccttcagcccacgcccgcagccgcttgtgggagaagtggtggtggctctcggcgcccgcggcggctgccggcggcccgccccgacgccgcgtccctgcagccctcgcccggcgctccagtagcaggacccggtctcgggaccagccggtaatatgcacgtgtcactagctgaggccctggaggttcggggtggaccacttcaggaggaagaaatatgggctgtattaaatcaaagtgctgaaagtctccaagaattattcagaaaagtaagcctagctgatcctgctgcccttggcttcatcatttctccatggtctctgctgttgctgccatctggtagtgtgtcatttacagatgaaaatatttccaatcaggatcttcgagcattcactgcaccagaggttcttcaaaatcagtcactaacttctctctcagatgttgaaaagatccacatttattctcttggaatgacactgtattggggggctgattatgaagtgcctcagagccaacctattaagcttggagatcatctcaacagcatactgcttggaatgtgtgaggatgttatttacgctcgagtttctgttcggactgtgctggatgcttgcagtgcccacattaggaatagcaattgtgcaccctcattttcctacgtgaaacacttggtaaaactggttctgggaaatctttctgggacagatcagctttcctgtaacagtgaacaaaagcctgatcgaagccaggctattcgagatcgattgcgaggaaaaggattaccaacaggaagaagctctacttctgatgtactagacatacaaaagcctccactctctcatcagacctttcttaacaaagggcttagtaaatctatgggatttctgtccatcaaagatacacaagatgagaattatttcaaggacattttatcagataattctggacgtgaagattctgaaaatacattctccccttaccagttcaaaactagtggcccagaaaaaaaacccatccctggcattgatgtgctttctaagaagaagatctgggcttcatccatggacttgctttgtacagctgacagagacttctcttcaggagagactgccacatatcgtcgttgtcaccctgaggcagtaacagtgcggacttcaactactcctagaaaaaaggaggcaagatactcagatggaagtatagccttggatatctttggccctcagaaaatggatccaatatatcacactcgagaattgcccacctcctcagcaatatcaagtgctttggaccgaatccgagagagacaaaagaaacttcaggttctgagggaagccatgaatgtagaagaaccagttcgaagatacaaaacttatcatggtgatgtctttagtacctccagtgaaagtccatctattatttcctctgaatcagatttcagacaagtgagaagaagtgaagcctcaaagaggtttgaatccagcagtggtctcccaggggtagatgaaaccttaagtcaaggccagtcacagagaccgagcagacaatatgaaacaccctttgaaggcaacttaattaatcaagagatcatgctaaaacggcaagaggaagaactgatgcagctacaagccaaaatggcccttagacagtctcggttgagcctatatccaggagacacaatcaaagcgtccatgcttgacatcaccagggatccgttaagagaaattgccctagaaacagccatgactcaaagaaaactgaggaatttctttggccctgagtttgtgaaaatgacaattgaaccatttatatctttggatttgccacggtctattcttactaagaaagggaagaatgaggataaccgaaggaaagtaaacataatgcttctgaacgggcaaagactggaactgacctgtgataccaaaactatatgtaaagatgtgtttgatatggttgtggcacatattggcttagtagagcatcatttgtttgctttagctaccctcaaagataatgaatatttctttgttgatcctgacttaaaattaaccaaagtggccccagagggatggaaagaagaaccaaagaaaaagaccaaagccactgttaattttactttgtttttcagaattaaattttttatggatgatgttagtctaatacaacatactctgacgtgtcatcagtattaccttcagcttcgaaaagatattttggaggaaaggatgcactgtgatgatgagacttccttattgctggcatccttggctctccaggctgagtatggagattatcaaccagaggttcatggtgtgtcttactttagaatggagcactatttgcccgccagagtgatggagaaacttgatttatcctatatcaaagaagagttacccaaattgcataatacctatgtgggagcttctgaaaaagagacagagttagaatttttaaaggtctgccaaagactgacagaatatggagttcattttcaccgagtgcaccctgagaagaagtcacaaacaggaatattgcttggagtctgttctaaaggtgtccttgtgtttgaagttcacaatggagtgcgcacattggtccttcgctttccatggagggaaaccaagaaaatatctttttctaaaaagaaaatcacattgcaaaatacatcagatggaataaaacatggcttccagacagacaacagtaagatatgccagtacctgctgcacctctgctcttaccagcataagttccagctacagatgagagcaagacagagcaaccaagatgcccaagatattgagagagcttcgtttaggagcctgaatctccaagcagagtctgttagaggatttaatatgggacgagcaatcagcactggcagtctggccagcagcaccctcaacaaacttgctgttcgacctttatcagttcaagctgagattctgaagaggctatcctgctcagagctgtcgctttaccagccattgcaaaacagttcaaaagagaagaatgacaaagcttcatgggaggaaaagcctagagagatgagtaaatcataccatgatctcagtcaggcctctctctatccacatcggaaaaatgtcattgttaacatggaacccccaccacaaaccgttgcagagttggtgggaaaaccttctcaccagatgtcaagatctgatgcagaatctttggcaggagtgacaaaacttaataattcaaagtctgttgcgagtttaaatagaagtcctgaaaggaggaaacatgaatcagactcctcatccattgaagaccctgggcaagcatatgttctagatgtgctacacaaaagatggagcatagtatcttcaccagaaagggagatcaccttagtgaacctgaaaaaagatgcaaagtatggcttgggatttcaaattattggtggggagaagatgggaagactggacctaggcatatttatcagttcagttgcccctggaggaccagctgacttggatggatgcttgaagccaggagaccgtttgatatctgtgaatagtgtgagtctggagggagtcagccaccatgctgcaattgaaattttgcaaaatgcacctgaagatgtgacacttgttatctctcagccaaaagaaaagatatccaaagtgccttctactcctgtgcatctcaccaatgagatgaaaaactacatgaagaaatcttcctacatgcaagacagtgctatagattcttcttccaaggatcaccactggtcacgtggtaccctgaggcacatctcggagaactcctttgggccatctgggggcctgcgggaaggaagcctgagttctcaagattccaggactgagagtgccagcttgtctcaaagccaggtcaatggtttctttgccagccatttaggtgaccaaacctggcaggaatcacagcatggcagcccttccccatctgtaatatccaaagccaccgagaaagagactttcactgatagtaaccaaagcaaaactaaaaagccaggcatttctgatgtaactgattactcagaccgtggagattcagacatggatgaagccacttactccagcagtcaggatcatcaaacaccaaaacaggaatcttcctcttcagtgaatacatccaacaagatgaattttaaaactttttcttcatcacctcctaagcctggagatatctttgaggttgaactggctaaaaatgataacagcttggggataagtgtcacgggaggtgtgaatacgagtgtcagacatggtggcatttatgtgaaagctgttattccccagggagcagcagagtctgatggtagaattcacaaaggtgatcgcgtcctagctgtcaatggagttagtctagaaggagccacccataagcaagctgtggaaacactgagaaatacaggacaggtggttcatctgttattagaaaagggacaatctccaacatctaaagaacatgtcccggtaaccccacagtgtaccctttcagatcagaatgcccaaggtcaaggcccagaaaaagtgaagaaaacaactcaggtcaaagactacagctttgtcactgaagaaaatacatttgaggtaaaattatttaaaaatagctcaggtctaggattcagtttttctcgagaagataatcttataccggagcaaattaatgccagcatagtaagggttaaaaagctctttcctggacagccagcagcagaaagtggaaaaattgatgtaggagatgttatcttgaaagtgaatggagcctctttgaaaggactatctcagcaggaagtcatatctgctctcaggggaactgctccagaagtattcttgcttctctgcagacctccacctggtgtgctaccggaaattgatactgcgcttttgaccccacttcagtctccagcacaagtacttccaaacagcagtaaagactcttctcagccatcatgtgtggagcaaagcaccagctcagatgaaaatgaaatgtcagacaaaagcaaaaaacagtgcaagtccccatccagaagagacagttacagtgacagcagtgggagtggagaagatgacttagtgacagctccagcaaacatatcaaattcgacctggagttcagctttgcatcagactctaagcaacatggtatcacaggcacagagtcatcatgaagcacccaagagtcaagaagataccatttgtaccatgttttactatcctcagaaaattcccaataaaccagagtttgaggacagtaatccttcccctctaccaccggatatggctcctgggcagagttatcaaccccaatcagaatctgcttcctctagttcgatggataagtatcatatacatcacatttctgaaccaactagacaagaaaactggacacctttgaaaaatgacttggaaaatcaccttgaagactttgaactggaagtagaactcctcattaccctaattaaatcagaaaaaggaagcctgggttttacagtaaccaaaggcaatcagagaattggttgttatgttcatgatgtcatacaggatccagccaaaagtgatggaaggctaaaacctggggaccggctcataaaggttaatgatacagatgttactaatatgactcatacagatgcagttaatctgctccgggctgcatccaaaacagtcagattagttattggacgagttctagaattacccagaataccaatgttgcctcatttgctaccggacataacactaacgtgcaacaaagaggagttgggtttttccttatgtggaggtcatgacagcctttatcaagtggtatatattagtgatattaatccaaggtccgtcgcagccattgagggtaatctccagctattagatgtcatccattatgtgaacggagtcagcacacaaggaatgaccttggaggaagttaacagagcattagacatgtcacttccttcattggtattgaaagcaacaagaaatgatcttccagtggtccccagctcaaagaggtctgctgtttcagctccaaagtcaaccaaaggcaatggttcctacagtgtggggtcttgcagccagcctgccctcactcctaatgattcattctccacggttgctggggaagaaataaatgaaatatcgtaccccaaaggaaaatgttctacttatcagataaagggatcaccaaacttgactctgcccaaagaatcttatatacaagaagatgacatttatgatgattcccaagaagctgaagttatccagtctctgctggatgttgtggatgaggaagcccagaatcttttaaacgaaaataatgcagcaggatactcctgtggtccaggtacattaaagatgaatgggaagttatcagaagagagaacagaagatacagactgcgatggttcacctttacctgagtattttactgaggccaccaaaatgaatggctgtgaagaatattgtgaagaaaaagtaaaaagtgaaagcttaattcagaagccacaagaaaagaagactgatgatgatgaaataacatggggaaatgatgagttgccaatagagagaacaaaccatgaagattctgataaagatcattcctttctgacaaacgatgagctcgctgtactccctgtcgtcaaagtgcttccctctggtaaatacacgggtgccaacttaaaatcagtcattcgagtcctgcggggtttgctagatcaaggaattccttctaaggagctggagaatcttcaagaattaaaacctttggatcagtgtctaattgggcaaactaaggaaaacagaaggaagaacagatataaaaatatacttccctatgatgctacaagagtgcctcttggagatgaaggtggctatatcaatgccagcttcattaagataccagttgggaaagaagagttcgtttacattgcctgccaaggaccactgcctacaactgttggagacttctggcagatgatttgggagcaaaaatccacagtgatagccatgatgactcaagaagtagaaggagaaaaaatcaaatgccagcgctattggcccaacatcctaggcaaaacaacaatggtcagcaacagacttcgactggctcttgtgagaatgcagcagctgaagggctttgtggtgagggcaatgacccttgaagatattcagaccagagaggtgcgccatatttctcatctgaatttcactgcctggccagaccatgatacaccttctcaaccagatgatctgcttacttttatctcctacatgagacacatccacagatcaggcccaatcattacgcactgcagtgctggcattggacgttcagggaccctgatttgcatagatgtggttctgggattaatcagtcaggatcttgattttgacatctctgatttggtgcgctgcatgagactacaaagacacggaatggttcagacagaggatcaatatattttctgctatcaagtcatcctttatgtcctgacacgtcttcaagcagaagaagagcaaaaacagcagcctcagcttctgaagtgacatgaaaagagcctctggatgcatttccatttctctccttaacctccagcagactcctgctctctatccaaaataaagatcacagagcagcaagttcatacaacatgcatgttctcctctatcttagaggggtattcttcttgaaaataaaaaatattgaaatgctgtatttttacagctactttaacctatgataattatttacaaaattttaacactaaccaaacaatgcagatcttagggatgattaaaggcagcatttgatgatagcagacattgttacaaggacatggtgagtctatttttaatgc

SEQ ID NO: 3210 - protein, 2466 aa, Homo sapiens; identical to SEQ ID NO: 310

SEQ ID NO: 3211 - DNA, 757 bp, Homo sapiens
ttgcttttattagataagagacgatgaactatgaaaagttatgcaaacatagtatctctttcctcttccactatgaccatcatcaccatcccatttcacctctgatcttccatttggagcatttaggaaattgccaccactttcattgtcaatagtggattacatttccatttattttctaaaaattgtgtgcatacatgatagattcttatcattccaggaagaagctctacttctgatgtactagacatacaaaagcctccactctctcatcagacctttcttaacaaagggcttagtaaatctatgggatttctgtccatcaaagatacacaagatgagaattatttcaaggacattttatcagataattctggacgtgaagattctgaaaatacattctccccttaccagttcaaaactagtggcccagaaaaaaaacccatccctggcattgatgtgctttctaagaagaagatctgggcttcatccatggacttgctttgtacagctgacagagacttctcttcaggagagactgccacatatcgtcgttgtcaccctgaggcagtaacagtgcggacttcaactactcctcttttaagaaggtacgatttttcctccttgccagtctactcgtcccacatgtgttcttttttccatctcctgtttccttcaaaacattttttttaatcagtttttcccactaccatttgcaacttcagtctctcccactcaacgggcttattatccacca

SEQ ID NO: 3212 - protein, 128 aa, Homo sapiens
MGFLSIKDTQDENYFKDILSDNSGREDSENTFSPYQFKTSGPEKKPIPGIDVLSKKKIWASSMDLLCTADRDFSSGETATYRRCHPEAVTVRTSTTPLLRRYDFSSLPVYSSHMCSFFHLLFPSKHFF

SEQ ID NO: 3213 - DNA, 538 bp, Homo sapiens
cttcctcttcagtgaatacatccaacaagatgaattttaaaactttttcttcatcacctcctaagcctggagatatctttgaggttgaactggctaaaaatgataacagcttggggataagtgtcacgggaggtgtgaatacgagtgtcagacatggtggcatttatgtgaaagctgttattccccagggagcagcagagtctgatggtagaattcacaaaggtgatcgcgtcctagctgtcaatggagttagtctagaaggagccacccataagcaagctgtggaaacactgagaaatacaggacaggtggttcatctgttattagaaaagggacaatctccaacatctaaagaacatgtcccggtaaccccacagtgtaccctttcagatcagaatgcccaaggtcaaggcccagaaaaagtgaagaaaacaactcaggtcaaagactacagctttgtcactgaaggaagtcatatctgctctcaggggaactgctccagaagtattcttgcttctctgcagacctccacctggtg

SEQ ID NO: 3214 - protein, 168 aa, Homo sapiens
MNFKTFSSSPPKPGDIFEVELAKNDNSLGISVTGGVNTSVRHGGIYVKAVIPQGAAESDGRIHKGDRVLAVNGVSLEGATHKQAVETLRNTGQVVHLLLEKGQSPTSKEHVPVTPQCTLSDQNAQGQGPEKVKKTTQVKDYSFVTEGSHICSQGNCSRSILASLQTST

SEQ ID NO: 3215 - DNA, 3810 bp, Homo sapiens
tggataataaagtcatgcatgattatggtcttttaaaaatgctttaaattgttgtaaaattcaaaatagaatttggtaagtgaaaaaataaagaaaaacaaatgctgagatgccttcaaacccatgggaaaccttgacccttagatttttgtatttctatttaatttaattttaagaactgtgaatcaaactctgggcagatattcacatagtagtgcccagaaagtggtctttgttacaaactatgctagcctttggacagatcactaattggtagtaagaaaattaagaatgacagtggctttccagtaccctttaagattctgtcttcttaagaggtttatatttcctttactttataaatgatggtgatggtgtacagtcattgttttattttacacaaacgttagcaactctgaatcagtccccaaaataatgagaaaaaataacacagactatattattttttcctgaatatgaaaataaaattaatgtactcattttatcatactgctctttattctttatttcttccatctttttttttttttttttttgaaacagagtctcgttctgttgcccaggctggagtacagtggcgcaatcttggctcactgcaacctccgcccctgggttcaagctattctcctgcctcagcttcctgagtagctgagattataggcacacactgccacatgcggctaatttttgtatttttagtacagacggggtttcaccatgttggccaaactggtcttgaactcctgacctcaggtgatccgccctcctcagcctcccaaaatgctgggattacaggtgtgagccaccacacccagccccatcattctttctttaaatagattttttttttaaacacccaagccaaccatgagcaaagactttaaatgtattttttaattattttctggttattgttcttttaatttatttagctgataagaaatttattgaaatattgcaatttatctgagttaaattacacctccccagaacattacaatttcaatttatttccacataacctcctctaacatttattttgttcttcttttcatctttctcacgctgtatacctgagtttctcccatacctgtccttctgtggagtttcccctttttttgtctgttatcgtactctgttttgttttgtttttgtagagattggatctcactgtattgcccaggctggtctcaaactcctgggttcaagcaaccctcctacttcggcctcccaaagtactggggtttataggcatgagccactgtgcctgaccatagtgtcttttaaaacacacaagtttgatgcataattccattttcagaatcctactttcagaactctccttcctaatcaaacagcttagttcatgcagttagttgataagatttcttaatgatggaaatagactgtaagatacagcttcagtataccattggagtgcagtaagtacatacagagctataaatacgggaaaatgggcttttaaaatgtgtctagaagtatatatgtttgtatgttcctatgtaaacacagcatgttaataatatctaaattttttttatatctttttctccagaaaatacatttgaggtaaaattatttaaaaatagctcaggtctaggattcagtttttctcgagaagataatcttataccggagcaaattaatgccagcatagtaagggttaaaaagctctttcctggacagccagcagcagaaagtggaaaaattgatgtaggagatgttatcttgaaagtgaatggagcctctttgaaaggactatctcagcaggaagtcatatctgctctcaggggaactgctccagaagtattcttgcttctctgcagacctccacctggtgtgctaccggaaattgatactgcgcttttgaccccacttcagtctccagcacaagtacttccaaacagcagtaaagactcttctcagccatcatgtgtggagcaaagcaccagctcagatgaaaatgaaatgtcagacaaaagcaaaaaacagtgcaagtccccatccagaagagacagttacagtgacagcagtgggagtggagaagatgacttagtgacagctccagcaaacatatcaaattcgacctggagttcagctttgcatcagactctaagcaacatggtatcacaggcacagagtcatcatgaagcacccaagagtcaagaagataccatttgtaccatgttttactatcctcagaaaattcccaataaaccagagtttgaggacagtaatccttcccctctaccaccggatatggctcctgggcagagttatcaaccccaatcagaatctgcttcctctagttcgatggataagtatcatatacatcacatttctgaaccaactagacaagaaaactggacacctttgaaaaatgacttggaaaatcaccttgaagactttgaactggaagtagaactcctcattaccctaattaaatcagaaaaaggaagcctgggttttacagtaaccaaaggcaatcagagaattggttgttatgttcatgatgtcatacaggatccagccaaaagtgatggaaggctaaaacctggggaccggctcataaaggttaatgatacagatgttactaatatgactcatacagatgcagttaatctgctccgggctgcatccaaaacagtcagattagttattggacgagttctagaattacccagaataccaatgttgcctcatttgctaccggacataacactaacgtgcaacaaagaggagttgggtttttccttatgtggaggtcatgacagcctttatcaagtggtatatattagtgatattaatccaaggtccgtcgcagccattgagggtaatctccagctattagatgtcatccattatgtgaacggagtcagcacacaaggaatgaccttggaggaagttaacagagcattagacatgtcacttccttcattggtattgaaagcaacaagaaatgatcttccagtggtccccagctcaaagaggtctgctgtttcagctccaaagtcaaccaaaggcaatggttcctacagtgtggggtcttgcagccagcctgccctcactcctaatgattcattctccacggttgctggggaagaaataaatgaaatatcgtaccccaaaggaaaatgttctacttatcagataaagggatcaccaaacttgactctgcccaaagaatcttatatacaagaagatgacatttatgatgattcccaagaagctgaagttatccagtctctgctggatgttgtggatgaggaagcccagaatcttttaaacgaaaataatgcagcaggatactcctgtggtccaggtacattaaagatgaatgggaagttatcagaagagagaacagaagatacagactgcgatggttcacctttacctgagtattttactgaggccaccaaaatgaatggctgtgaagaatattgtgaagaaaaagtaaaaagtgaaagcttaattcagaagccacaagaaaagaagactgatgatgatgaaataacatggggaaatgatgagttgccaatagagagaacaaaccatgaagattctgataaagatcattcctttctgacaaacgatgagctcgctgtactccctgtcgtcaaagtgcttccctctggtaaatacacgggtgccaacttaaaatcagtcattcgagtcctgcggggtttgctagatcaaggaattccttctaaggagctggagaatcttcaagaattaaaacctttggatcagtgtctaattgggcaaact

SEQ ID NO: 3216 - protein, 599 aa, Homo sapiens
MSDKSKKQCKSPSRRDSYSDSSGSGEDDLVTAPANISNSTWSSALHQTLSNMVSQAQSHHEAPKSQEDTICTMFYYPQKIPNKPEFEDSNPSPLPPDMAPGQSYQPQSESASSSSMDKYHIHHISEPTRQENWTPLKNDLENHLEDFELEVELLITLIKSEKGSLGFTVTKGNQRIGCYVHDVIQDPAKSDGRLKPGDRLIKVNDTDVTNMTHTDAVNLLRAASKTVRLVIGRVLELPRIPMLPHLLPDITLTCNKEELGFSLCGGHDSLYQVVYISDINPRSVAAIEGNLQLLDVIHYVNGVSTQGMTLEEVNRALDMSLPSLVLKATRNDLPVVPSSKRSAVSAPKSTKGNGSYSVGSCSQPALTPNDSFSTVAGEEINEISYPKGKCSTYQIKGSPNLTLPKESYIQEDDIYDDSQEAEVIQSLLDVVDEEAQNLLNENNAAGYSCGPGTLKMNGKLSEERTEDTDCDGSPLPEYFTEATKMNGCEEYCEEKVKSESLIQKPQEKKTDDDEITWGNDELPIERTNHEDSDKDHSFLTNDELAVLPVVKVLPSGKYTGANLKSVIRVLRGLLDQGIPSKELENLQELKPLDQCLIGQ

SEQ ID NO: 3217 - DNA, 743 bp, Homo sapiens
cagaatcctactttcagaactctccttcctaatcaaacagcttagttcatgcagttagttgataagatttcttaatgatggaaatagactgtaagatacagcttcagtataccattggagtgcagtaagtacatacagagctataaatacgggaaaatgggcttttaaaatgtgtctagaagtatatatgtttgtatgttcctatgtaaacacagcatgttaataatatctaaattttttttatatctttttctccagaaaatacatttgaggtaaaattatttaaaaatagctcaggtctaggattcagtttttctcgagaagataatcttataccggagcaaattaatgccagcatagtaagggttaaaaagctctttcctggacagccagcagcagaaagtggaaaaattgatgtaggagatgttatcttgaaagtgaatggagcctctttgaaaggactatctcagcaggtgagcccctagcatgtggagtatagcatttttaatgatgagatggattggcctttcagaatggtttcataatgctggtttaactgtaccttcatttgtcattcatggtacccccaggaagtcatatctgctctcaggggaactgctccagaagtattcttgcttctctgcagacctccacctggtgtgctaccggaaattgatactgcgcttttgaccccacttcagtctccagcacaagtacttccaaacagcagtaaagactcttct

SEQ ID NO: 3218 - protein, 67 aa, Homo sapiens
MWSIAFLMMRWIGLSEWFHNAGLTVPSFVIHGTPRKSYLLSGELLQKYSCFSADLHLVCYRKLILRF

SEQ ID NO: 3219 - DNA, 702 bp, Homo sapiens
gaggaagttaacagagcattagacatgtcacttccttcattggtattgaaagcaacaagcagcctcagcttctgaagtgacatgaaaagagcctctggatgcatttccatttctctccttaacctccagcagactcctgctctctatccaaaataaagatcacagagcagcaagttcatacaacatgcatgttctcctctatcttagaggggtattcttcttgaaaataaaaaatattgaaatgctgtatttttacagctactttaacctatgataattatttacaaaattttaacactaaccaaacaatgcagatcttagggatgattaaaggcagcatttgatgatagcagacattgttacaaggacatggtgagtctatttttaatgcaccaatcttgtttatagcaaaaatgttttccaatattttaataaagtagttattttataggggatacttgaaaccagtatttaagctttaaatgacagtaatattggcatagaaaaaagtagcaaatgtttactgtatcaatttctaatgtttactatatagaatttcctgtaatatatttatatactttttcatgaaaatggagttatcagttatctgtttgttactgcatcatctgtttgtaatcattatctcactttgtaaataaaaacacaccttaaaacatgaacaagccaaaactgtgtgcagac

SEQ ID NO: 3220 - DNA, 1134 bp, Homo sapiens; identical to SEQ ID NO: 317

SEQ ID NO: 3221 - protein, 377 aa, Homo sapiens; identical to SEQ ID NO: 318

SEQ ID NO: 3222 - DNA, 883 bp, Homo sapiens
ggaggcgtgtgcctgcggcgcggccccgaggcgtgtgcgcggccatgtgcgcttagcgcagcgcgctcttacctcagtaccccggccgcgaccctccgagcccctggagcccgggtaaccaggccgccggcgccggctcgcggggacccgccaccctggaagccccgcgcacacagcgcattcctggcgagtcggaggcagggtggggcccaggtaaagtgaacagagttatctgtgacattccatcaggcacctatgtaacgaaatcataccgtaataactcaccatggcgtatggagtgccaagaaagaacacagtgaaaaccattttgcggggcagttgttataatgtacaggaaccttgggatattgcattgcttgcaaagacctggtccacaaacctagccaatatcaagttgcctttcttggaagaaatttcatttggtggttctgtgcagctcacaaaatgtaccaccattaaagatggactgctcccttctgcagaatctatcaaactcgaaagggagtatgaagtgaagcgtctttgtaaactgaagtgtcaagaaaatacatctaaggaaattcagcttctcctgagggaaaggccagccggtttgagaagacctcttccatctaaatgacacctgaagcgcggattgtagatgaagaaactcagcagcgccggcgggaactgcttctcctgggccgcccaggacccgctcccggccccggccgtcgctgcgctgcagccatcctggcccggcccccacctcaggaagcctcccacggcccgcccagagaccgagaaaatctcttaatttcagtggaactcagtttgtttctctttttaaacattgccagttataaatgtattttattttata

SEQ ID NO: 3223 - protein, 117 aa, Homo sapiens
MAYGVPRKNTVKTILRGSCYNVQEPWDIALLAKTWSTNLANIKLPFLEEISFGGSVQLTKCTTIKDGLLPSAESIKLEREYEVKRLCKLKCQENTSKEIQLLLRERPAGLRRPLPSK

SEQ ID NO: 3224 - DNA, 826 bp, Homo sapiens
ggaggcgtgtgcctgcggcgcggccccgaggcgtgtgcgcggccatgtgcgcttagcgcagcgcgctcttacctcagtaccccggccgcgaccctccgagcccctggagcccgggtaaccaggccgccggcgccggctcgcggggacccgccaccctggaagccccgcgcacacagcgcattcctggcgagtcggaggcagggtggggcccaggtaaagtgaacagagttatctgtgacattccatcaggcacctatgtaacgaaatcataccgtaataactcaccatggcgtatggagtgccaagaaagaacacagtgaaaaccattttgcggggcagttgttataatgtacaggaaccttgggatattgcattgcttgcaaagacctggtccacaaacctagccaatatcaagttgcctttcttggaagaaatttcatttggtggttctgtgcagctcacaaaatgtaccaccattaaagatggactgctcccttctgcagaatctatcaaactcgaaagggagtatgaagtgaagcgtctttgtaaactgaagtgtcaagaaaatacatctaaggaaattcagcttctcctgagggaaaggccagccggtttgagaagacctcttccatctaaatgacacctgaagcgcggattgtagatgaagaaactcagcagcgccggcgggaactgcttctcctgggccgcccaggacccgctcccggccccggccgtcgctgcgctgcagccatcctggcccggcccccacctcaggaagcctcccacggcccgcccagagaccgagaaaatctcttaatttcagtgg

SEQ ID NO: 3225 - protein, 117 aa, Homo sapiens; identical to SEQ ID NO: 3223

SEQ ID NO: 3226 - DNA, 2306 bp, Homo sapiens
actttacggcgagattaagctcagggtcaagttctgagcaaaaagtgtcaaggagcctttttgcaacctcctataatattgaaacagattctgtgccctttaaaggagataataactaacatctggggagcgctttacaatttagaaaaggcctttcacacacaggcctgtttcatcttcacaacaatcttataaaacagatatattgttcccatttcccaaataatgaaacggaagcgccgaaaatatctcctatagggctcttcaaactgtggtcaacttagtaaatgatgttgacagtggaagtgtgatcattttattttcctgcctttggaattgaagattgtaattttgcaaaaattttgttgaagatgatgtagctttggttcagagagctggagtacaatggcaccatctcagctcgccgcaacctccacctcctgggttcaagcgattctcctgcctcagcctcccgagtagctgggattacaggttccaagtctcttcttcggcctctcaaacatggtaccatccctaatgaagtcaacgggtccagcatgacaggatggaagtacaagtgtcagcacctatgtaaagtgaacagagttatctgtgacattccatcaggcacctatgtaacgaaatcataccgtaataactcaccatggcgtatggagtgccaagaaagaacacagtgaaaaccattttgcggggcagttgttataatgtacaggaaccttgggatattgcattgcttgcaaagacctggtccacaaacctagccaatatcaagttgcctttcttggaagaaatttcatttggtggttctgtgcagctcacaaaatgtaccaccattaaagatggactgctcccttctgcagaatctatcaaactcgaaagggagtatgaagtgaagcgtctttgtaaactgaagtgtcaagaaaatacatctaaggaaattcagcttctcctgagggaaaggccagccggtttgagaagacctcttccatctaaatgacagtcagttcatgattgaatctgtactctgtgtcttgcatccaaagggcatgaaggtctctggacctttcactatgtatagttcagggcagatatttgaatgcccactggtggatgggccactgcccacagctgtgggttagtacccagttctgacagatcttctgagtccctgacatactcttgttccttgtgtcacaaacgacagcactgtaagtagatgaaaatgcatttggagttgagtcgtttgtgctattcattttaatttttgtaaaattgcactaaaagaagaggaaatttcttcagctgcattgttttcaaaagacatcttaaatatgcatctttgagatcccaaggagggaccaaaagaaggcaagagagaaattctcttaaaaatgataaactgaaacatttcatttggttaagaaaaataatagacttcatttttagtacctccctagtttccaattttcttttttttaaatatatatattttttattgtactttaagttctagggtacatgtgcacaacgtgcaggtttgttacatatgtatacatgggccatgttggtgtgctgcatccagtaactcatcatttacattaggtatatctcctaatgctatccctcccccatacccccaccccacaacaggcccccgtgtgtgatgttccccttcctgtgtccaagtgttctcatttttcaattctcacctatgagtgagaacatgcggtgtttggttttttgtccttgtgatagtttgctgagaatgatggtttccagcttcacccatgtccctacaaaggacatgaactcattattttttatggctgcatagtattccatggtgcatttgtgccacattttcttaatccagtctatcattgttggacatttgggttggttccaagtctttgctattgtgagtagtgccacaataaacatacgtgtgcatgtgtctttatagcagcatgatttatattcctttgggtatatacctagtaatgggatggctgggtcaaatggtatttctagttctagatccctgaggaattgccacactgtcttccacaatggttgaactagtttacagtcccaccaacagtgtaaaagtgttcctatttctccacatcctccccagcacctgttgtttcctgactttttaatgatcctcattctaactggtgtgagatgatatctcattgtggttttgatttgcatttctctgatggccagtgatgatgcacattttttcatgtgcctgttggctgcataaatgtcttcttttg

SEQ ID NO: 3227 - protein, 117 aa, Homo sapiens; identical to SEQ ID NO: 3223

SEQ ID NO: 3228 - DNA, 1609 bp, Homo sapiens
cgcggcgagcgggaaggaggcgtgtgcctgcggcgcggccccgaggcgtgtgcgcggccatgtgcgcttagcgcagcgcgctcttacctcagtaccccggccgcgaccctccgagcccctggagcccgggtaaagtgaacagagttatctgtgacattccatcaggcacctatgtaacgaaatcataccgtaataactcaccatggcgtatggagtgccaagaaagaacacagtgaaaaccattttgcggggcagttgttataatgtgctggaatgttgtgcacctcctgggcttgagtgatcctcccatctcagcctcctgagtagctgggaccacaggcacacaccactgtgcccgacaggaaccttgggatattgcattgcttgcaaagacctggtccacaaacctagccaatatcaagttgcctttcttggaagaaatttcatttggtggttctgtgcagctcacaaaatgtaccaccattaaagatggactgctcccttctgcagaatctatcaaactcgaaagggagtatgaagtgaagcgtctttgtaaactgaagtgtcaagaaaatacatctaaggaaattcagcttctcctgagggaaaggccagccggtttgagaagacctcttccatctaaatgacagtcagttcatgattgaatctgtactctgtgtcttgcatccaaagggcatgaaggtctctggacctttcactatgtatagttcagggcagatatttgaatgcccactggtggatgggccactgcccacagctgtgggttagtacccagttctgacagatcttctgagtccctgacatactcttgttccttgtgtcacaaacgacagcactgtaagtagatgaaaatgcatttggagttgagtcgtttgtgctattcattttaatttttgtaaaattgcactaaaagaagaggaaatttcttcagctgcattgttttcaaaagacatcttaaatatgcatctttgagatcccaaggagggaccaaaagaaggcaagagagaaattctcttaaaaatgataaactgaaacatttcatttggttaagaaaaataatagacttcatttttagtacctccctagtttccaattttcttttttttaaatatatatattttttattgtactttaagttctagggtacatgtgcacaacgtgcaggtttgttacatatgtatacatgggccatgttggtgtgctgcatccagtaactcatcatttacattaggtatatctcctaatgctatccctcccccatacccccaccccacaacaggcccccgtgtgtgatgttccccttcctgtgtccaagtgttctcatttttcaattctcacctatgagtgagaacatgcggtgtttggttttttgtccttgtgatagtttgctgagaatgatggtttccagcttcacccatgtccctacaaaggacatgaactcattattttttatggctgcatagtattccatggtgcatttgtgccacattttcttaatccagtctatcattgttggacatttgggttggttccaagtctttgctattgtgagtagtgccacaataaacatacgtgtgcatgtgtcttt

SEQ ID NO: 3229 - protein, 32 aa, Homo sapiens
MAYGVPRKNTVKTILRGSCYNVLECCAPPGLE

SEQ ID NO: 3230 - DNA, 466 bp, Homo sapiens
tagatggcattcgatgacctcctaacaaataatctgctacaaccaatagaggagctgtaacactcaccatgaaggtctgcagcttcactcctgaagccagcgagaccacgaacctactggaaggaatgaacaattccagatgcgctgcttttaagagctgtgacattcaccataagggtctgtggcttcattcagcgagaccaagaaccgactgattacggggacactgggtctacaggtgtgcaccaccacacccagctaatttttatattttttagtagatagggggtttcatcatgttgtccaggatggtctcgatctcttgacctcgtgatccaccggcctcggcctcccaaagtgctaggattacaggcgtgagccaagccaccgggcctggccacttacaacatttttataaacaatattttaaagcaataaatctccctttcctcatggaagaaatgtg

SEQ ID NO: 3231 - protein, 48 aa, Homo sapiens
MKVCSFTPEASETTNLLEGMNNSRCAAFKSCDIHHKGLWLHSARPRTD

SEQ ID NO: 3232 - DNA, 1516 bp, Homo sapiens
atgtgctgcaagaagacaaaggagtaatattaagtattgtgaaacaaacctagagcttagaatttcatatttaaaattctaaataaattatcattcaaattgttatagtttgggggccaggtgtggtggctcatgcctataatcccagcactttgggagactaaggcgggcagatcacttgagctcaggagtttgagacgagcctggcaaacacggcaaaaccccatctcaaaatacaaaaattagctagatgtggtggtgcatgcccataatcctagctacttgggaggctgaggcacgagaattgcttgaacttgggaggcggaggttgcagtgagccaagatcgtgccattgcactccagcctgggcgacagagtgagactcggtctcatatatatatgagactgacaaattgatacagtttggatatatgtccctgccccagtctcatgttgaactgtaatctgcaatgttggaggtggggcctggtgggaggtggttggatcatgggggcagatttccatgaatggtttaacaccatcttcctggtttgtcctcatgacagtgagtgagttcttgagagaactcatcatttaaaaatgtgtggcacttcctctctttctctcttgctcctgctctgggtatgtgacgtgcctgctccccctttgcctactgccataattcagagtttcctgaggcctcccaagaagataagccgatgccagcaccatgcttcctgtaagctggcagaaccatgagtaaattaaacctcttttttaaataagttacccaatctcaggtattttttatagcaatgtgagaatgtgctagcacacaaatatgttaccacttaaattatcattcaaatataaaagcatagtaaagctgacattaagcctcaagcatacaagttcacagaaaatttgtcacacaaggacccacattataagagaagcagaaattcatactgctttaagagatatcagaggctgggtgtggtggcccatgcctataatgccagcactttgggaagccaaggcaggaggatcgtttgagcccaggagttcaagaccagcctgggcaacatagtgagcccttgtctctataaaaaataaaaaaattagccatggcctgcacccagcaggaaaaatttaatataaaggttactaactaataaaacatggttaactattaagacagataaaggataactctaaagaataccagaacctgggcacaagggctcatgcctgtaattccagcactttaggaggccaaggtaggaggatcacttgagcccaggtgttcaagaacagcttaggcaacatagtgagaccccatctctacaaaaaattaaaaaacagccaggcatagtggtacatacctgtagtctcagctcctcaggaggctgaggttagaggatagtttgaacctaggaggttgaggctgcagtgaatcatgattgtatcactgcactccagcttgggtaacagagtgagaccgtttctaaaaatt

SEQ ID NO: 3233 - protein, 82 aa, Homo sapiens [sequence omitted]

SEQ ID NO: 3234 - DNA, 513 bp, Homo sapiens
cttcctctctttctctcttgctcctgctctgggtatgtgacgtgcctgctccccctttgcctactgccataattcagagtttcctgaggcctcccaagaagataagccgatgccagcaccatgcttcctgtaagctggcagaaccatgagtaaattaaacctcttttttaaataagttacccaatctcaggtattttttatagcaatgtgagaatgtgctagcacacaaatatgttaccacttaaattatcattcaaatataaaagcatagtaaagctgacattaagcctcaagcatacaagttcacagaaaatttgtcacacaaggacccacattataagagaagcagaaattcatactgctttaagagatatcagaggctgggtgtggtggcccatgcctataatgccagcaatggtgaaaccccatctgtactaaaaatacaaaaaattagccaggtgtgccgatgcacgtctgtaatcccagctacttgtgaggctgagggaggagaat

SEQ ID NO: 3235 - protein, 68 aa, Homo sapiens
MLPLKLSFKYKSIVKLTLSLKHTSSQKICHTRTHIIREAEIHTALRDIRGWVWWPMPIMPAMVKPHLY

SEQ ID NO: 3236 - DNA, 664 bp, Homo sapiens
gggtcaagttctgagcaaaaagtgtcaaggagcctttttgcaacctcctataatattgaaacagattctgtgccctttaaaggagataataactaacatctggggagcgctttacaatttagaaaaggcctttcacacacaggcctgtttcatcttcacaacaatcttataaaacagatatattgttcccatttcccaaataatgaaacggaagcgccgaaaatatctcctatagggctcttcaaactgtggtcaacttagtaaatgatgttgacagtggaagtgtgatcattttattttcctgcctttggaattgaagattgtaattttgcaaaaattttgttgaagatgatgtagctttggttcagagagctggagtacaatggcaccatctcagctcgccgcaacctccacctcctgggttcaagcgattctcctgcctcagcctcccgagtagctgggattacaggttccaagtctcttcttcggcctctcaaacatggtaccatccctaatgaagtcaacgggtccagcatgacaggatggaagtacaagtgtcagcacctatagtttcctgaggcctcccaagaagataagccgatgccagcaccatgcttcctgtaagctggcagaaccatgagtaaattaaacctcttttttaaat

SEQ ID NO: 3237 - protein, 62 aa, Homo sapiens
FCKNFVEDDVALVQRAGVQWHHLSSPQPPPPGFKRFSCLSLPSSWDYRFQVSSSASQTWYHP

SEQ ID NO: 3238 - DNA, 485 bp, Homo sapiens
cagagactggttcaagggagattcggacacatctccacctccaaagccaagtgccttcccgggatgatctgcataacaatttgcgggtgctggtggtggagaagctccgggaagagaaaactagccggacggtatcgaaccgcccgcaggcccgtcgcagctccattaatgcaactaccattacactaaggttccaagtctcttcttcggcctctcaaacatggtaccatccctaatgaagtcaacgggtccagcatgacaggatggaagtacaagtgtcagcacctatgtgagtcccaagaggggaaattagaaacaaaaaggaagaagaggacataggccaggcacggcggctcacgcctgtaatcccaacactttgggaggccaagagtttcctgaggcctcccaagaagataagccgatgccagcaccatgcttcctgtaagctggcagaaccatgagtaaattaaacctcttttttaaat

SEQ ID NO: 3239 - protein, 41 aa, Homo sapiens
MICITICGCWWWRSSGKRKLAGRYRTARRPVAAPLMQLPLH

SEQ ID NO: 3240 - DNA, 1072 bp, Homo sapiens
ccgggattggtgggaggatcgtgggggagcggcagctcaggacggaatacggcaatgaccgccccggtcgcgagggtgaccctgccccgggctgctgtgggggcgcaagaaccctttcactttacggcgagattaagctcagggtcaagttctgagcaaaaagtgtcaaggagcctttttgcaacctcctataatattgaaacagattctgtgccctttaaaggagataataactaacatctggggagcgctttacaatttagaaaaggcctttcacacacaggcctgtttcatcttcacaacaatcttataaaacagatatattgttcccatttcccaaataatgaaacggaagcgccgaaaatatctcctatagggctcttcaaactgtggtcaacttagtaaatgatgttgacagtggaagtgtgatcattttattttcctgcctttggaattgaagattgtaattttgcaaaaattttgttgaagatgatgtagctttggttcagagagttccaagtctcttcttcggcctctcaaacatggtaccatccctaatgaagtcaacgggtccagcatgacaggatggaagtacaagtgtcagcacctatgtgagtcccaagaggggaaattagaaacaaaaaggaagaagaggacataggccaggcacggcggctcacgcctgtaatcccaacactttgggaggccaaggtgggcagatcacctgaggtcaggagttcaagaccagcctggtcaacatggcaaaagcccatctctactaaaaaatacaaaaaattagccaggcgtggtggtgggagcctgtaatcccacctactcgggaggctgaggcaggagaattgcttcaatctgggaggcagaggttgcagtgagctgagatcgtgccattgcactccagcctgggcgacagagtaagactctgtctcagaaaaaaaaaaaaaaaaaggaaaaaaaaagatgatatagtcaaagaaataacattaaatttcttataatttaagatgaatgatttcagattgaaaagtttataaaggtgccaaagagaaaaggaaag

SEQ ID NO: 3241 - protein, 60 aa, Homo sapiens [sequence omitted]

SEQ ID NO: 3242 - DNA, 900 bp, Homo sapiens
aacagagactggttcaagggagattcggacacatctccacctccaaagccaagtgccttcccgggatgatctgcataacaatttgcgggtgctggtggtggagaagctccgggaagagaaaactagccggacggtatcgaaccgcccgcaggcccgtcgcagctccattaatgcaactaccattacactaagtatctcctatagggctcttcaaactgtggtcaacttagtaaatgatgttgacagtggaagtgtgatcattttattttcctgcctttggaattgaagattgtaattttgcaaaaattttgttgaagatgatgtagctttggttcagagagctggagtacaatggcaccatctcagctcgccgcaacctccacctcctgggttcaagcgattctcctgcctcagcctcccgagtagctgggattacaggttccaagtctcttcttcggcctctcaaacatggtaccatccctaatgaagtcaacgggtccagcatgacaggatggaagtacaagtgtcagcacctatgtgagtcccaagaggggaaattagaaacaaaaaggaagaagaggacataggccaggcacggcggctcacgcctgtaatcccaacactttgggaggccaaggtgggcagatcacctgaggtcaggagttcaagaccagcctggtcaacatggcaaaagcccatctctactaaaaaatacaaaaaattagccaggcgtggtggtgggagcctgtaatcccacctactcgggaggctgaggcaggagaattgcttcaatctgggaggcagaggttgcagtgagctgagatcgtgccattgcactccagcctgggcgacagagtaagactctgtctcagaaaaaaaaaaaaaaaaaggaaaaaaaaa

SEQ ID NO: 3243 - protein, 41 aa, Homo sapiens; identical to SEQ ID NO: 3239

SEQ ID NO: 3244 - DNA, 758 bp, Homo sapiens
acggcgagattaagctcagggtcaagttctgagcaaaaagtgtcaaggagcctttttgcaacctcctataatattgaaacagattctgtgccctttaaaggagataataactaacatctggggagcgctttacaatttagaaaaggcctttcacacacaggcctgtttcatcttcacaacaatcttataaaacagatatattgttcccatttcccaaataatgaaacggaagcgccgaaaatatctcctatagggctcttcaaactgtggtcaacttagtaaatgatgttgacagtggaagtgtgatcattttattttcctgcctttggaattgaagattgtaattttgcaaaaattttgttgaagatgatgtagctttggttcagagagctggagtacaatggcaccatctcagctcgccgcaacctccacctcctgggttcaagcgattctcctgcctcagcctcccgagtagctgggattacaggttccaagtctcttcttcggcctctcaaacatggtaccatccctaatgaagtcaacgggtccagcatgacaggatggaagtacaagtgtcagcacctatgtgagtcccaagaggggaaattagaaacaaaaaggaagaagaggacataggccaggcacggcggctcacgcctgtaatcccaacactttgggaggccaaggtgggcagatcacctgaggtcaggagttcaagaccagcctggtcaacatggcaaaagcccatctctactaaa

SEQ ID NO: 3245 - protein, 62 aa, Homo sapiens; identical to SEQ ID NO: 3237

SEQ ID NO: 3246 - DNA, 540 bp, Homo sapiens
aacagagactggttcaagggagattcggacacatctccacctccaaagccaagtgccttcccgggatgatctgcataacaatttgcgggtgctggtggtggagaagctccgggaagagaaaactagccggacggtatcgaaccgcccgcaggcccgtcgcagctccattaatgcaactaccattacactaaggctggagtacaatggcaccatctcagctcgccgcaacctccacctcctgggttcaagcgattctcctgcctcagcctcccgagtagctgggattacaggttccaagtctcttcttcggcctctcaaacatggtaccatccctaatgaagtcaacgggtccagcatgacaggatggaagtacaagtgtcagcacctatgtgagtcccaagaggggaaattagaaacaaaaaggaagaagaggacataggccaggcacggcggctcacgcctgtaatcccaacactttgggaggccaaggtgggcagatcacctgaggtcaggagttcaagaccagcctggtcaacatgg

SEQ ID NO: 3247 - protein, 41 aa, Homo sapiens; identical to SEQ ID NO: 3239

SEQ ID NO: 3248 - DNA, 448 bp, Homo sapiens
cttcacaacaatcttataaaacagatatattgttcccatttcccaaataatgaaacggaagcgccgaaaatatctcctatagggctcttcaaactgtggtcaacttagtaaatgatgttgacagtggaagtgtgatcattttattttcctgcctttggaattgaagattgtaattttgcaaaaattttgttgaagatgatgtagctttggttcagagagtaagtcattccatttatatcaatattcttaaggcaatgtgctaggtgacgagccatattgatgacaaagacagagctcctattttcatgacattccagtgtggtggcagaaacaagcaagtaaataattccagtacacacttctgttgatttatttcgtgaatggtgactggctatttaaaaagactaaatcaaattaattttctgataatgaataaaaaaggatagcc

SEQ ID NO: 3249 - protein, 36 aa, Homo sapiens
NGSAENISYRALQTVVNLVNDVDSGSVIILFSCLWN

SEQ ID NO: 3250 - DNA, 953 bp, Homo sapiens
cgctccccagatgttagttattatctcctttaaagggcacagaatctgtttcaatattataggaggttgcaaaaaggctccttgacactttttgctcagaacttgaccctgagcttaatctcgccgtaaagtgaaagggttcttgcgcccccacagcagcccggggcagggtcaccctcgcgaccggggcggtcattgccgtattccgtcctgagctgccgctcccccacgatcctcccaccaatcccgggagggccgcgacgtcccttgccgcttgggtggcgccagctagagggcgcgggccggggcggaacccggtaccgcagctcgggaggtgggggtgggggcggggcctcgcgcggagggcgtggcctcggggcgtcccgggcagccggcgtgctgagcttgccagccagctagcgagcgacgggcgcgcgcggcccctgcgcactcggccgccgcctgcgcgcgttgcggccgcagctgcacctttgcctccgcggttccgcagccgagccccgggaggaggcgctcccctgcgtcgtccgcacttgcgccctttcccaccgcaacaggtcaggggagggcggaggtgacgagggcgcccgacccgggactagaggacggaagggtctggaagatgaacagactagccactttgcattgactggaaacaatggcatttacagaaagagtcaacagcagtggcaacagatacttattgaagatctgctgtcagatgatgccttaaaatctgatagatcaaagatgacctatgggagagaatacgagaatagaaaaatgggagtccctgttctgtttaacctggcagataagcacacagccagattgtgaaacaatgtgataaacgctctagcagaagagcaaataaagtgttaaaggatcatagaaaacagcaaagtgtcacggatgaaatctttctaatgagaacc

SEQ ID NO: 3251 - protein, 153 aa, Homo sapiens
KGSCAPTAARGRVTLATGAVIAVFRPELPLPHDPPTNPGRAATSLAAWVAPARGRGPGRNPVPQLGRWGWGRGLARRAWPRGVPGSRRAELASQLASDGRARPLRTRPPPARVAAAAAPLPPRFRSRAPGGGAPLRRPHLRPFPPQQVRGGRR

SEQ ID NO: 3252 - DNA, 1895 bp, Homo sapiens
cgctccccagatgttagttattatctcctttaaagggcacagaatctgtttcaatattataggaggttgcaaaaaggctccttgacactttttgctcagaacttgaccctgagcttaatctcgccgtaaagtgaaagggttcttgcgcccccacagcagcccggggcagggtcaccctcgcgaccggggcggtcattgccgtattccgtcctgagctgccgctcccccacgatcctcccaccaatcccgggagggccgcgacgtcccttgccgcttgggtggcgccagctagagggcgcgggccggggcggaacccggtaccgcagctcgggaggtgggggtgggggcggggcctcgcgcggagggcgtggcctcggggcgtcccgggcagccggcgtgctgagcttgccagccagctagcgagcgacgggcgcgcgcggcccctgcgcactcggccgccgcctgcgcgcgttgcggccgcagctgcacctttgcctccgcggttccgcagccgagccccgggaggaggcgctcccctgcgtcgtccgcacttgcgccctttcccaccgcaacaggtcaggggagggcggaggtgacgagggcgcccgacccgggactagaggacggaagggtctggaagatgaacagactagccactttgcattgactggaaacaatggcatttacagaaagagtcaacagcagtggcaacagtttgtacaatgacgacagaaacctgcttcgaattagagagaaggaaagacgcaaccaggaagcccaccaagagaaagaggcatttcctgaaaagattcccctttttggagagccctacaagacagcaaaaggtgatgagctgtctagtcgaatacagaacatgttgggaaactacgaagaagtgaaggagttccttagtactaagtctcacactcatcgcctggatgcttctgaaaataggttgggaaagccgaaatatcctttaattcctgacaaagggagcagcattccatccagctccttccacactagtgtccaccaccagtccattcacactcctgcgtctggaccactttctgttggcaacattagccacaatccaaagatggcgcagccaagaactgaaccaatgccaagtctccatgccaaaagctgcggcccaccggacagccagcacctgacccaggatcgccttggtcaggaggggttcggctctagtcatcacaagaaaggtgaccgaagagctgacggagaccactgtgcttcggtgacagattcggctccagagagggagctttctcccttaatctctttgccttccccagttccccctttgtcacctatacattccaaccagcaaactcttccccggacgcaaggaagcagcaaggttcatggcagcagcaataacagtaaaggctattgcccagccaaatctcccaaggacctagcagtgaaagtccatgataaagagacccctcaagacagtttggtggcccctgcccagccgccttctcagacatttccacctccctccctcccctcaaaaagtgttgcaatgcagcagaagcccacggcttatgtccggcccatggatggtcaagatcaggcccctagtgaatcccctgaactgaaaccactgccggaggactatcgacagcagacctttgaaaaaacagacttgaaagtgcctgccaaagccaagctcaccaaactgaagatgccttctcagtcagttgagcagacctactccaatgaagtccattgtgttgaagagattctgaaggaaatgacccattcatggccgcctcctttgacagcaatacatacgcctagtacagctgagccatccaagtttcctttccctacaaaggactctcagcatgtcagttctgtaaccc

SEQ ID NO: 3253 - protein, 405 aa, Homo sapiens
MAFTERVNSSGNSLYNDDRNLLRIREKERRNQEAHQEKEAFPEKIPLFGEPYKTAKGDELSSRIQNMLGNYEEVKEFLSTKSHTHRLDASENRLGKPKYPLIPDKGSSIPSSSFHTSVHHQSIHTPASGPLSVGNISHNPKMAQPRTEPMPSLHAKSCGPPDSQHLTQDRLGQEGFGSSHHKKGDRRADGDHCASVTDSAPERELSPLISLPSPVPPLSPIHSNQQTLPRTQGSSKVHGSSNNSKGYCPAKSPKDLAVKVHDKETPQDSLVAPAQPPSQTFPPPSLPSKSVAMQQKPTAYVRPMDGQDQAPSESPELKPLPEDYRQQTFEKTDLKVPAKAKLTKLKMPSQSVEQTYSNEVHCVEEILKEMTHSWPPPLTAIHTPSTAEPSKFPFPTKDSQHVSSV

SEQ ID NO: 3254 - DNA, 646 bp, Homo sapiens
cctcgggatgagacatgggcagcatctgccttgtccggtgctggcccaagtcccatccctgccctgctccctttcagaactgcacctactactggggcttcgccgcgtggatggcctattacatcaatcaccctctctacactccccctacctacggagctcagcaggtgaaactggcgctcgccatctttgtgatctgccagctcggcaacttctccatccacatggccctgcgggacctgcggcccgctgggtccaagacgcggaagatcccataccccaccaagaaccccttcacgtggctcttcctgctggtgtcctgccccaactacacctacgaggtggggtcctggatcggtttcgccatcatgacgcagtgtctcccagtggccctgttctccctggtgggcttcacccagatgaccatctgggccaagggcaagcaccgcagctacctgaaggagttccgggactacccgcccctgcgcatgcccatcatccccttcctgctctgagcgctcacccctgctgaggctcagcccctcaacccggtggcattctgggggaggagtggggcccacagctctccagcacccggaataaagcccgcctgccccagtcgggaaaaaaaaaaaaaaaaaaataa

SEQ ID NO: 3255 - protein, 174 aa, Homo sapiens
MRHGQHLPCPVLAQVPSLPCSLSELHLLLGLRRVDGLLHQSPSLHSPYLRSSAGETGARHLCDLPARQLLHPHGPAGPAARWVQDAEDPIPHQEPLHVALPAGVLPQLHLRGGVLDRFRHHDAVSPSGPVLPGGLHPDDHLGQGQAPQLPEGVPGLPAPAHAHHPLPALSAHPC

SEQ ID NO: 3256 - DNA, 515 bp, Homo sapiens
agaactgcacctactactggggcttcgccgcgtggatggcctattacatcaatcaccctctctacactccccctacctacggagctcagcaggtgaaactggcgctcgccatctttgtgatctgccagctcggcaacttctccatccacatggccctgcgggacctgcggcccgctgggtccaagacgcggaagatcccataccccaccaagaaccccttcacgtggctcttcctgctggtgtcctgccccaactacacctacgagtggccctgttctccctggtgggcttcacccagatgaccatctgggccaagggcaagcaccgcagctacctgaaggagttccgggactacccgcccctgcgcatgcccatcatccccttcctgctctgagcgctcacccctgctgaggctcagcccctcaacccggtggcattctgggggaggagtggggcccacagctctccagcacccggaataaagcccgcctgccccagtcgggaaaaaaaaaaaa

SEQ ID NO: 3257 - protein, 88 aa, Homo sapiens
MAYYINHPLYTPPTYGAQQVKLALAIFVICQLGNFSIHMALRDLRPAGSKTRKIPYPTKNPFTWLFLLVSCPNYTYEWPCSPWWASPR

SEQ ID NO: 3258 - DNA, 1782 bp, Homo sapiens
gggaacattatcatatttggaagaaagtcatctttatgtgaattcccaagtgacagtgtagggacccattaagttgttaagcgttttaaggcatgaagctggccagctttgaggtgtcagtgacttgtaagggcactaacaagtctgtcagttgggagcatagttcccagctgcaagttctcaccttgacaaagttataattgtattagcaagggaagacccctcctttctgagaacgtaggaaatactgtaaacctgaaaaactctgttgctataacttctgtaattttcttaaatgaattcttaaacatgatgtataaaatgacaagatttaatcagctcaataacatataaatccttgatcgtgaaaatatgtataattggttattaatcagctttttgttctctagattaattgtaatttcaagacatgtaggatttagaaaatggagtagccctttctttgagtgagtaagttcttagaagacaaagattttttaaaaaacatgctttcctatagggttgcatgagctttagacgtaataaatgctcaataaatgttgatttgatttagttttaatcttcctgttttacatgtgacctaggtaggaaacagagtccacagccaagaagcctcaaataaaactcccctaactttttggaaggcagcctcagtcctcagatggaaggtaaaatccatacctccaattaggttttgcttggattcaaacatttgctaggaataaaaacagcacatttacgacaggctaggtatcacagaaagtgccagtagttgatgtaacctcttttatgtgtgaggagaccagatcttagtataactaataagctgcaatttactgatcattgtggcttgcctatatatgtagtttttttctcccacaaatgaggaaaacatccctgcagagattgaggaatatctcctatcttccagttcttaaatccttcccctttcctgatatgtgttcaggaaaatttagggatagtttcaagggcaggaaaagcccataactcatagatgactatgccacaatactgttcagagactgtttcaaactgaataatggtagtaattgtggacacttgtctttgagagtttatggaactcctaaatgtcatagattttatagtactgtgcttctcagagttcaatgagtatatgaatcacctttgaattttgttaaaatgcagattatgagccaccacgcttggcctgaactggtggctttataagaggaagagacctgcagtagcatgtttgcatgctcagctccctcaccatgtcactttgggactctagagtccccaccagcaagaaggctttcaccaggtgtggccccttaactgtggacttcccagcctccataactgtaaggaataaattcctttttaaaataaattacccagtttcaggtattctgctataggcagcaggaaatggattaaggcacatgcattctaaatatttaaaaatgcatacttgggctgggcgcagtggctcatgcctgtaatcccagcactttgggaggccgaggcaggtggatcacaaggtcaggagatcgagaccatcctggccaacacggtgaaaccccatctctactaaaaatacaaaaaattagccgagtgtggtgacgggcgcctgtagtcccagctacttgggaggctgaggcaggaaaatggtgtgaaccttgggggcagagcttgcagtgagccaagattgtgccactgcgcttcagcctgggcaacagatcgagactccatctc

SEQ ID NO: 3259 - protein, 54 aa, Homo sapiens
MLSSLTMSLWDSRVPTSKKAFTRCGPLTVDFPASITVRNKFLFKINYPVSGILL

SEQ ID NO: 3260 - DNA, 8192 bp, Homo sapiens
ggcaatttcttttcctttctaactgtggcccgcgttgtgctgttgctgggcaggcgttgggcgccggcggtcttcgagcgtgggggcccgctggctttcccttctcagaaactgcgccgggggcgctcgcttgccccggattcggacgcggcgctccccgggctcgtctgaagtgcagatcgccgcagaggccccagtgcccggatgtccatcaggattagcgcgagccaatacgggccgagcccggggctgcgccgaggacgcccggggctcgagagcaggtagtcccgtaacatcggggcgccgcgccgggacgcgtccccgcccggctccgccaaatggtgagcgcggcgctggcagcagggcccgcggggtgaaggcgctcatggacggaagacccctggctctataagctgaattatggcagcccagtcaagtttgtacaatgacgacagaaacctgcttcgaattagagagaaggaaagacgcaaccaggaagcccaccaagagaaagaggcatttcctgaaaagattcccctttttggagagccctacaagacagcaaaaggtgatgagctgtctagtcgaatacagaacatgttgggaaactacgaagaagtgaaggagttccttagtactaagtctcacactcatcgcctggatgcttctgaaaataggttgggaaagccgaaatatcctttaattcctgacaaagggagcagcattccatccagctccttccacactagtgtccaccaccagtccattcacactcctgcgtctggaccactttctgttggcaacattagccacaatccaaagatggcgcagccaagaactgaaccaatgccaagtctccatgccaaaagctgcggcccaccggacagccagcacctgacccaggatcgccttggtcaggaggggttcggctctagtcatcacaagaaaggtgaccgaagagctgacggagaccactgtgcttcggtgacagattcggctccagagagggagctttctcccttaatctctttgccttccccagttccccctttgtcacctatacattccaaccagcaaactcttccccggacgcaaggaagcagcaaggttcatggcagcagcaataacagtaaaggctattgcccagccaaatctcccaaggacctagcagtgaaagtccatgataaagagacccctcaagacagtttggtggcccctgcccagccgccttctcagacatttccacctccctccctcccctcaaaaagtgttgcaatgcagcagaagcccacggcttatgtccggcccatggatggtcaagatcaggcccctagtgaatcccctgaactgaaaccactgccggaggactatcgacagcagacctttgaaaaaacagacttgaaagtgcctgccaaagccaagctcaccaaactgaagatgccttctcagtcagttgagcagacctactccaatgaagtccattgtgttgaagagattctgaaggaaatgacccattcatggccgcctcctttgacagcaatacatacgcctagtacagctgagccatccaagtttcctttccctacaaaggactctcagcatgtcagttctgtaacccaaaaccaaaaacaatatgatacatcttcaaaaactcactcaaattctcagcaaggaacgtcatccatgctcgaagacgaccttcagctcagtgacagtgaggacagtgacagtgaacaaaccccagagaagcctccctcctcatctgcacctccaagtgctccacagtcccttccagaaccagtggcatcagcacattccagcagtgcagagtcagaaagcaccagtgactcagacagttcctcagactcagagagcgagagcagttcaagtgacagcgaagaaaatgagcccctagaaaccccagctccggagcctgagcctccaacaacaaacaaatggcagctggacaactggctgaccaaagtcagccagccagctgcgccaccagagggccccaggagcacagagcccccacggcggcacccagagagtaagggcagcagcgacagtgccacgagtcaggagcattctgaatccaaagatcctccccctaaaagctccagcaaagccccccgggccccacccgaagccccccaccccggaaagaggagctgtcagaagtctccggcacagcaggagcccccacaaaggcaaaccgttggaaccaaacaacccaaaaaacctgtcaaggcctctgcccgggcaggttcacggaccagcctgcagggggaaagggagccagggcttcttccctatggctcccgagaccagacttccaaagacaagcccaaggtgaagacgaaaggacggccccgggccgcagcaagcaacgaacccaagccagcagtgcccccctccagtgagaagaagaagcacaagagctccctccctgccccctctaaggctctctcaggcccagaacccgcgaaggacaatgtggaggacaggacccctgagcactttgctcttgttcccctgactgagagccagggcccaccccacagtggcagcggcagcaggactagtggctgccgccaagccgtggtggtccaggaggacagccgcaaagacagactcccattgcctttgagagacaccaagctgctctcaccgctcagggacactcctcccccacaaagcttgatggtgaagatcaccctagacctgctctctcggataccccagcctcccgggaaggggagccgccagaggaaagcagaagataaacagccgcccgcagggaagaagcacagctctgagaagaggagctcagacagctcaagcaagttggccaaaaagagaaagggtgaagcagaaagagactgtgataacaagaaaatcagactggagaaggaaatcaaatcacagtcatcttcatcttcatcctcccacaaagaatcttctaaaacaaagccctccaggccctcctcacagtcctcaaagaaggaaatgctccccccgccacccgtgtcctcgtcctcccagaagccagccaagcctgcacttaagaggtcaaggcgggaagcagacacctgtggccaggaccctcccaaaagtgccagcagtaccaagagcaaccacaaagactcttccattcccaagcagagaagagtagaggggaagggctccagaagctcctcggagcacaagggttcttccggagatactgcaaatccttttccagtgccttctttgccaaatggtaactctaaaccagggaagcctcaagtgaagtttgacaaacaacaagcagaccttcacatgagggaggcaaaaaagatgaagcagaaagcagagttaatgacggacagggttggaaaggcttttaagtacctggaagccgtcttgtccttcattgagtgcggaattgccacagagtctgaaagccagtcatccaagtcagcttactctgtctactcagaaactgtagatctcattaaattcataatgtcattaaaatccttctcagatgccacagcgccaacacaagagaaaatatttgctgttttatgcatgcgttgccagtccattttgaacatggcgatgtttcgttgtaaaaaagacatagcaataaagtattctcgtactcttaataaacacttcgagagttcttccaaagtcgcccaggcaccttctccatgcattgcaagaagcacaggcacaccatcccctctttccccaatgccttctcctgccagctccgtagggtcccagtcaagtgctggcagtgtggggagcagtggggtggctgccactatcagcaccccagtcaccatccagaatatgacatcttcctatgtcaccatcacatcccatgttcttaccgcctttgacctttgggaacaggccgaggccctcacgaggaagaataaagaattctttgctcggctcagcacaaatgtgtgcaccttggccctcaacagcagtttggtggacctggtgcactatacacgacagggttttcagcagctacaagaattaaccaaaacaccttaatggagccccaggttgattcaatgccttgggaactatttttgcacattggaagcctcaaaaacagtccagacatttgtttcatcaggacaccaaactctaaaaaagaagcaccacgagatggccaggacatttgtccacttaaactctcaacaacagtgtgatcattggttggacactgtggttatgcagaagcagagatgaggaggctggccccagagatgatcttgcccttcctaactaaaggacagaagtgcaatttagcttaaatgggtgtatgaatggtctagaaacatttctattttttttttaaaccagcaggatacaagttgcaaatgaaatgaggagaaacagtttcaactctgaaagtgaatttcacgtcatctcagtagccacgctagtccattcccagaaggaaatttttttttttaacaatgacttttggtaaagggttttgtggatgattttttttcttttgagttttgggagaaatatttgtttagtaacttctaatggccatctgtaaaccataagtaatgaaggactccactgtgccccactttctgccaatgaacagtggcttgataataccaagtattgttgtaatttataaaattgaaggcaacccccgctcctgccgcccccaatctccccattgcctagagcgctgcacattgaccccagctctgacttctcattactgtgctgaaagtcagcccacgtcggagcggtgaggaggagccacagcacatggggtgccacctcgaggtctgcacaggaggacttggcgctgccatttcctacccctgccatttcccacccctgcttcagcgaaagggactctctaacagggcagtcactgttgactctattctgaatttcctcccttggggaagaagggaaccaacatttatacctgaccagatggctaaagtgcttttaaagttttgtttaagtagagctggaatttgaggtgctgatctgtggtctacagttatgtggtaactcatgttgtccagccaactcagagtttcgtcagtgaacaagaaacatgaaatctgcttcttagagaggctatatttttctgctacaaatattttatatttatagcaaaactagactttcagagtccttgattgtctaggggaagttaactccctgagaggatgtagagatttggggtggttgattagacttttgaaaaactcatcaccacatgccttcactccagagtgttctcagctagatttgatttggttgaggaggaactgtggccctccgtaagttattgccatagtgtatgcattaaaccaagtccattttgaatgacctaaaatgaagtaacacaatcagaaatcccatgtgcccataagcacagatttttctttttcattgaaactttaaaggttattattggaaacattactttgagtgcagtgtttttaaaagccaattcttttttatcccttttagaagtagaatttgcacacttactacaattgaggagtgtcatctctataactttttctccgcctttgtcccattctgcccctgtacatgtttcctaccaagcatgtttcacattttcctattagtggaggagggagaaccatatttatttataatgaagacatctaagatccctatgatgaatgcaggaactctcttggtagtttgtaaatacacaaagggatgtgtcgagggatgggagcgatgcttatctctcacagtgtgagtggtctgtgtgaggctgttccttcagtttcttctccagactgttctttggttgtcactaagtcagaggtctggtccctcatgtttaggtgaaagccagagaatgacagctgtagtcatatctgagcataagaccttgatgtgtgattcctgatgaccggtttcatttattcatgttataaagcaaagccctggtcctttttaaactactagttttaaaaacctgtgttaaatgaacagtaattgcctggtaggtttggtgtgtgtgtagcattgtgtgtccatctgttatatgtaaaggacaaggcaccagaatcaggctttatttcgatattgaagatgttatttaacatctttcttttttccttactcccttagccatcccctccccttttgtcctatcattccctagaacaagccacctgtcaattgtgaagggttgtgttctttatggcaggttctatgcagattgtgccagagcatgtgcgtgttctgttggcaagccacagtgctcccttgactgaagacatttccaggtagatttctcagccagctctaaaacagattgctttttcagtggccttactctttgtgggtttttttttttttctctgaacttgatataaagattttatttgtcccttgaaaaagtaacaaatgtgcatagatcaatttgtactactttggtcattggatatttctgatccttattgcattgtacctaaaggagagtaactaatggtaacctttttaatagagtatgtgaaaggtagtggctgatgaatccttaacgttcatagggtctttttgctgttacggttgtatatagaggtctgaaggatttttaaaatgatttgcactttttcactgcatgcttacaattcccaaaggcaaaatctgtactgaggtagatcatttgaaagggctagattataaaattaagccttagagtatggaaagttcttataacaataatagtacacacttcagagtaagacaaatgcaaagcatcttaaggagtgaaaatagagtgtaaatcttgcctttggcactacaaggtgtgtgtgtgtgtgtgtgtgtgtgtgtgtgtctttagtaggaaatggaagaacactgttttattttttaaagtgtttaatgtttctgtcctttctgtgaattattgaatttaagagccctgctaaataatgaaaaaacactttactaaaatttatcaaattatactgggttcggattgtgaaaacattggccacctagtagcagtggtgaggagtgggagggcccagcaagcatttatcagaaatagaatcacaataggaggagaatttgactgtctgatattatgatttgattacaatactgaatgggaaaagtatctaatattttgtaacaaaaagaccttcatattatctgttttgaccaaaatatgtagctatttcccttacacagattggaccgcacttatctcccttgtcctgtatcctttaatttcaggtctcaggatgtttagaaagctaaaaccccctacccctttctggctgaaaacttgccttatttggtatcttacacattaatgttactagcatcaggagcttactgttttattatgattcatcttcagtaatttttagaagcaagaagaaagccattgtgtcctctacaattaacaaaacttatctctgatatacaaagggatataaatatatacacttaaatagagaaaaagaggttgattgaattgtgcctttgagtgaacccagtttttaaataccgctgtgtttgtttcgccatggcttcagggatgctacatggctcttgcaccttttactcctctgctttatgaagtttgagttgtatttgtgcatcttaaagtaggttgaggcttgaggctgggctttcgggtttttttgttttttgttttgttttgttttgttttgttttcttgtacttaaacctgcttgcttcctaccacagattctttattttcccaaacactacaaaaaaacttttaaaactttgccatttcatctgtttacactctttgccactgattagcagtatttaaatcttgcaagaatattttgtgctttctttagaaacacaagagtatagatttttctcactgaaaagtgagagttacgcattgcagccatgaagggatgctaggatcaattatggcagtaccttttttcccctcctgttcttgagccagttgtctcttttgttttgggtcccacttaggattaatggatgtaaggtattttcctgtgcctttattttgtgtcattctattggaaggaggtgtaacggcagaatagcatcgtgttgggggttttccttcaaacactgcaagtgatattgccaccatgtgaacctcaaatatgcaatccagttgtgttggtttc

SEQ ID NO: 3261 - protein, 1211 aa, Homo sapiens
MAAQSSLYNDDRNLLRIREKERRNQEAHQEKEAFPEKIPLFGEPYKTAKGDELSSRIQNMLGNYEEVKEFLSTKSHTHRLDASENRLGKPKYPLIPDKGSSIPSSSFHTSVHHQSIHTPASGPLSVGNISHNPKMAQPRTEPMPSLHAKSCGPPDSQHLTQDRLGQEGFGSSHHKKGDRRADGDHCASVTDSAPERELSPLISLPSPVPPLSPIHSNQQTLPRTQGSSKVHGSSNNSKGYCPAKSPKDLAVKVHDKETPQDSLVAPAQPPSQTFPPPSLPSKSVAMQQKPTAYVRPMDGQDQAPSESPELKPLPEDYRQQTFEKTDLKVPAKAKLTKLKMPSQSVEQTYSNEVHCVEEILKEMTHSWPPPLTAIHTPSTAEPSKFPFPTKDSQHVSSVTQNQKQYDTSSKTHSNSQQGTSSMLEDDLQLSDSEDSDSEQTPEKPPSSSAPPSAPQSLPEPVASAHSSSAESESTSDSDSSSDSESESSSSDSEENEPLETPAPEPEPPTTNKWQLDNWLTKVSQPAAPPEGPRSTEPPRRHPESKGSSDSATSQEHSESKDPPPKSSSKAPRAPPEAPHPGKRSCQKSPAQQEPPQRQTVGTKQPKKPVKASARAGSRTSLQGEREPGLLPYGSRDQTSKDKPKVKTKGRPRAAASNEPKPAVPPSSEKKKHKSSLPAPSKALSGPEPAKDNVEDRTPEHFALVPLTESQGPPHSGSGSRTSGCRQAVVVQEDSRKDRLPLPLRDTKLLSPLRDTPPPQSLMVKITLDLLSRIPQPPGKGSRQRKAEDKQPPAGKKHSSEKRSSDSSSKLAKKRKGEAERDCDNKKIRLEKEIKSQSSSSSSSHKESSKTKPSRPSSQSSKKEMLPPPPVSSSSQKPAKPALKRSRREADTCGQDPPKSASSTKSNHKDSSIPKQRRVEGKGSRSSSEHKGSSGDTANPFPVPSLPNGNSKPGKPQVKFDKQQADLHMREAKKMKQKAELMTDRVGKAFKYLEAVLSFIECGIATESESQSSKSAYSVYSETVDLIKFIMSLKSFSDATAPTQEKIFAVLCMRCQSILNMAMFRCKKDIAIKYSRTLNKHFESSSKVAQAPSPCIARSTGTPSPLSPMPSPASSVGSQSSAGSVGSSGVAATISTPVTIQNMTSSYVTITSHVLTAFDLWEQAEALTRKNKEFFARLSTNVCTLALNSSLVDLVHYTRQGFQQLQELTKTP

SEQ ID NO: 3262 - DNA, 465 bp, Homo sapiens
gaaaaaatgtgatcacaataaactactgtaggaactgaaagtttttgtcctttgtgtatcacagctatatttaattacataaagttgcttcaaagatctgcattcattatcacctcatctcttttgtacttctcttcacagttattttcaaatgaatgtattgagttatagacctttgtggcataatgattgcttttatgaatgtttcacgaccatgtaagaaagaacgtatttgctttattttcagagtccagagataaatgtggttttgtatcttatttctgtattcttattttgtctgtttgatctgccatggactaagagatgaataaaagcctcatatgagtacactgctatcttaagtttctttgcaaatgttgatgccatgtttttgttttgttttgttttgtttcagatggagtcttgcttctggcctgggcgtgacacagcgagactccatctcaa

SEQ ID NO: 3263 - protein, 34 aa, Homo sapiens
MFHDHVRKNVFALFSESRDKCGFVSYFCILILSV

SEQ ID NO: 3264 - DNA, 1315 bp, Homo sapiens
tcacatgtaagtatgcctgacaaaacttggagactgataaattttattgttttcattcttttgtggcatctgaaacagtttgtacaatgacgacagaaacctgcttcgaattagagagaaggaaagacgcaaccaggaagcccaccaagagaaagaggcatttcctgaaaagattcccctttttggagagccctacaagacagcaaaaggtgatgagctgtctagtcgaatacagaacatgttgggaaactacgaagaagtgaaggagttccttagtactaagtctcacactcatcgcctggatgcttctgaaaataggttgggaaagccgaaatatcctttaattcctgacaaagggagcagcattccatccagctccttccacactagtgtccaccaccagtccattcacactcctgcgtctggaccactttctgttggcaacattagccacaatccaaagatggcgcagccaagaactgaaccaatgccaagtctccatgccaaaagctgcggcccaccggacagccagcacctgacccaggatcgccttggtcaggaggggttcggctctagtcatcacaagaaaggtgaccgaagagctgacggagaccactgtgcttcggtgacagattcggctccagagagggagctttctcccttaatctctttgccttccccagttccccctttgtcacctatacattccaaccagcaaactcttccccggacgcaaggaagcagcaaggttcatggcagcagcaataacagtaaaggctattgcccagccaaatctcccaaggacctagcagtgaaagtccatgataaagagacccctcaagacagtttggtggcccctgcccagccgccttctcagacatttccacctccctccctcccctcaaaaagtgttgcaatgcagcagaagcccacggcttatgtccggcccatggatggtcaagatcaggcccctagtgaatcccctgaactgaaaccactgccggaggactatcgacagcagacctttgaaaaaacagacttgaaagtgcctgccaaagccaagctcaccaaactgaagatgccttctcagtcagttgaggtgtgtggaatttcttatcttggggaattccaattcgaagacggatttgagatgaaaatgtccggaggatgtggggcaaggtggggaggttagtccatggcttttgggtagggggaattctttttggctttaggatcttgttaataacccgcgaaaaactcagatctgagatggacgactgattatagatattgaaatgcagtttgcagaaaggtt

SEQ ID NO: 3265 - protein, 58 aa, Homo sapiens
MTTETCFELERRKDATRKPTKRKRHFLKRFPFLESPTRQQKVMSCLVEYRTCWETTKK

SEQ ID NO: 3266 - DNA, 1171 bp, Homo sapiens
agcctgagcctccaacaacaaacaaatggcagctggacaactggctgaccaaagtcagccagccagctgcgccaccagagggccccaggagcacagagcccccacggcggcacccagagagtaagggcagcagcgacagtgccacgagtcaggagcattctgaatccaaagatcctccccctaaaagctccagcaaagccccccgggccccacccgaagccccccaccccggaaagaggagctgtcagaagtctccggcacagcaggagcccccacaaaggcaaaccgttggaaccaaacaacccaaaaaacctgtcaaggcctctgcccgggcaggttcacggaccagcctgcagggggaaagggagccagggcttcttccctatggctcccgagaccagacttccaaagacaagcccaaggtgaagacgaaaggacggccccgggccgcagcaagcaacgaacccaagccagcagtgcccccctccagtgagaagaagaagcacaagagctccctccctgccccctctaaggctctctcaggcccagaacccgcgaaggacaatgtggaggacaggacccctgagcactttgctcttgttcccctgactgagagccagggcccaccccacagtggcagcggcagcaggactagtggctgccgccaagccgtggtggtccaggaggacagccgcaaagacagactcccattgcctttgagagacaccaagctgctctcaccgctcagggacactcctcccccacaaagcttgatggtgaagatcaccctagacctgctctctcggataccccagcctcccgggaaggggagccgccagaggaaagcagaagataaacagccgcccgcagggaagaagcacagctctgagaagaggagctcagacagctcaagcaagttggccaaaaagagaaagggtgaagcagaaagagactgtgataacaagaaaatcagactggagaaggaaatcaaatcacagtcatcttcatcttcatcctcccacaaagaatcttctaaaacaaagtgagtatagagattagcaaccacctaatctacggtgatcaacacttcttgggtcttgacatagcaaagaaatttttcttctgcactagaatcagtggattaataaactcaagctcatttggacaatgt

SEQ ID NO: 3267 - protein, 90 aa, Homo sapiens
MVKITLDLLSRIPQPPGKGSRQRKAEDKQPPAGKKHSSEKRSSDSSSKLAKKRKGEAERDCDNKKIRLEKEIKSQSSSSSSSHKESSKTK

SEQ ID NO: 3268 - DNA, 731 bp, Homo sapiens
caacaaacaaatggcagctggacaactggctgaccaaagtcagccagccagctgcgccaccagagggccccaggagcacagagcccccacggcggcacccagagagtaagggcagcagcgacagtgccacgagtcaggagcattctgaatccaaagatcctccccctaaaagctccagcaaagccccccgggccccacccgaagccccccaccccggaaagaggagctgtcagaagtctccggcacagcaggagcccccacaaaggcaaaccgttggaaccaaacaacccaaaaaacctgtcaaggcctctgcccgggcaggttcacggaccagcctgggcaactctgtgagacactgtctctgaaaaaaaaaaattaggcacagtagcgcatgcctgaggtcccagctactcgggaagctgtggtgggaggatcacttgagcccaggagttaaaggttgcagggagctgtgattgagtcactgcactccagcatgggcaacagagtaagaccctgtctctaaaaaaagaaaaataaacacgtaacgtgcatagagctacatgtgtgagccttgcattgttctaggagctcatagagataattcctcacttcattcagtcatcttacagattcctttcaaatgaaggatagtctgtcttaattgtcatttagatgaataactgaataaggaggtgcattcattcaaatcttttttactttttctaaataat

SEQ ID NO: 3269 - protein, 32 aa, Homo sapiens
MAAGQLADQSQPASCATRGPQEHRAPTAAPRE

SEQ ID NO: 3270 - DNA, 5661 bp, Homo sapiens
aaattcgagccctcgtgcaccaaccgaaactccacagctgagagggcttggggcccggacagcaggagatccagcccctgagcaaccttccacggcttttgtcgcccccattggcgggaggagcagggttatgctcccggctcccgtaggggagctccagcctctggctctgtcagcctccccggcagctccttgactccttcctcccagtctttcgaagaggggcccaggcagtcacagcaaactgtacaatggcagttgagtgggttttgaaaaacgtctgaattgtagtgtctacatctaccttctgccttctctctaccctttgaaaaaaaataaatggcatgtttgagaagagagctctattaaaagaggaatattgcaaatggcttcagattctatgagtagtaaacaagctaggaatcacattacaaaggggaaaaggcaacaacagcaccagcaaataaagaacagatcctcaattagtgatggtgatggagaagattcctttatttttgaagcaaatgaagcttggaaagattttcatggttctcttcttcgattttatgaaaatggagaactctgtgatgtcacactcaaggttggctcaaagctaatctcttgtcacaagctggtattggcttgtgttattccctactttagagccatgtttctttctgaaatggctgaagccaagcaaacgctgattgagattagagattttgatggtgatgcaatagaagacttggtaaagtttgtctattcttcacggctcactttgactgttgacaatgtccagcctctcttatatgcagcctgtattctgcaggttgaactggtggctagagcttgttgtgaatacatgaagttacattttcatccctccaattgcctggcagtaagagcctttgcagaaagtcacaatcgaatagacttaatggacatggcggatcagtatgcctgtgaccattttactgaagtagtggagtgtgaagactttgtaagtgtatcaccgcagcacctccataagcttttgtcctccagtgatctaaatattgaaaatgaaaagcaggtctataatgctgccatcaagtggcttcttgccaatcctcagcatcattccaaatggttggatgaaacacttgcacaggttcgcctgccattgttgccggttgattttcttatgggtgttgtggcaaaagaacagattgtcaagcaaaatctaaaatgtagagatttactggatgaagcaagaaattaccaccttcacttgagtagcagagcagtacctgactttgaatactccattcggactaccccaaggaagcatactgctggtgtgctgttttgtgtaggtggtcgaggtggatctggtgacccctttcgcagtattgaatgctattctatcaacaaaaacagttggttctttggaccagaaatgaatagtcgaaggcgacatgtgggtgtaatctctgtggaaggtaaagtgtatgcagtaggtggacatgatggaaatgaacatttagggagtatggagatgtttgatcctctcactaataaatggatgatgaaggcatcaatgaacacaaagaggcgaggaattgccttggcttccttaggaggcccaatttatgcaattggagggttagatgacaatacttgcttcaatgatgtggagagatatgacatagaatctgatcagtggagtacagtggcaccaatgaatactccccgtggaggagttggctctgttgctctagtaaaccatgtttatgcagtaggtggcaatgatggaatggcttctttatctagcgtggagagatatgatccacatctggataagtggatagaagttaaagaaatgggtcagcgaagagcaggcaatggagttagcaagcttcatggttgcttatacgtagttggtggttttgatgataattctcctctgagttcagttgagcggtatgacccccgaagcaacaagtgggattatgtggcagcacttactactcccagaggtggagtgggaatcgcaacagtgatgggcaaaatctttgcagttggtggtcataatggcaatgcatacttaaatacagtagaagcgtttgatccagtgctgaataggtgggagcttgttggatctgtgtctcactgcagagctggagcaggagtagctgtgtgttcctgtttaactagccaaattcgagatgtaggtcatggatccaataatgtggttgactgtatgtgatttgagttctggccaccaacaatttagtcatatctgataggtacaaaagaaaaccaagattttgatatgaccacctttcaacactttttactgcaactagagtcttatttaaatgttaactgttgtattgtgactaagtacaacttttggaatgatacctgaagaattattagtaatagagttaaatttgatacttcctgcttttgcaaataatggagtagggaagaagatagtcgaacttaaaatcatacctaccctgaaaaatgcttaaagtagtgccaaaaatcttgaaatctctctctctctctctatttggatgaatcaaaatgtaatttgttgagttttgccttttcttttgcctaaagatgttaacgtcaggcagtgggtttttcctagaggagagattagtacctattcattaacacaaggatacataagagacttgccccttttgaagatcatttctacttggtgctgatgaatttatgcctagctttttttttctaggtggtgatttttcaatttcttttatatttacggaagtagaaaaaatgttctgtctttttgaatgccacttagctgcattttcagaagcttataggctataagaagcctttaatttcagtttgaattgctaggacaccaaaagacctagctgggctaactccatccaaatgattttacagttttattttttcatcttttgcaaaaagtatttgttacataatcaaaaggtgaaccagaggaaatattgaacaaggttttagatctgatgttattctggtgcccaattgagagaccttgagaaagaatgatgcagattacatgactctaatgtgggcagtctgaaaatatctttaactgtcttctttgatcatttgattttggatccaagatttatcatctctctattttgctatttgccaccatcctggtttttctgactgtacagaatcaatctgcatttatttattatcagaaatgaatgcatttttacaaaaacctttttgtagactgtagtttattgattagttcaagcccatcacgaactaattaaacatattgttggtaaaaacagagattgaaattactgtttttatcatatttaaatccctctggtgtatttattgaaatttaattaaaaatatttctacatattgatttgaagccaggatattgatggacctacagatttaacagctcttcaaagttttaactagcattataaaatggcctattcattatatgtatatttttttataaatatttatcaagaacatgaaaatattttattttgtatttgcagtgcagtttggcacctctcttccaggccttcctaagtttttgttagttgtgtcttcgaatttattgtagttcaccgctggtcagtaatctggttcataaggaagctggggcagtgaaaaacacttcgttgatccatccagccctaaagttcattgactaatagctcatgcatcttattaaatgggattctggacttctacaatagtgtggaaagccacatcacaaaaaaagccacatcacaaaaaaaagccagtgcctattgagtatatcaaaccaaaaaagaaaaaaaaaagttttaagaggggtcaggctggcagataaaagtctcttatgaagcagatataaatccagtaagctatttttttctacctatgggcaagttcataagtcattgctggatctgaaccagtgttcttttgtgtaagtacaaccatatttcagtcagtccagaggcagttaaccctgtagcacttactagactggtgacaactggctggatgtggagaataagtgtcaaaacctggcttcaatgtctatttcttatgtctaatggagttcttatattacagtgtttgtttagctatggttactaatatgtttgttatatttattttcggggagaggatcttgttattgtttcctgagattatttaaaatgttttttctttgatgtatttctgtctttcttatatgtaaggagttataagggttattatattttcatttctggtttttactatacaatggttatctaacatactaagttggtaccctacctacccgtaaaatatgaaatactcagaagtaaagtgtgtgggcaatcagaagcatagccttgaaggacctgacagcagtatgaaaagataaataggccaggcatggtggctcacgcctgtgatcccagcactttgggaggccgaggtgggtggaccacctgagatcaggtgttcaagaccagcctgaccaacatggtgaaaccctgtctctactaaaagtacaaaaattagccaggcgtggtggcgcatacctgtaattccagctactcaggaggctgaggcaggagaattgcttgaacccaggaggtggaggttgcaatgagccgaggttgagccatcgcactccagcggtgaaacaagagtgaaactccatctcaaaaaaaaaaaaaaaaaaaagataaaaaagcagaatcaatatgtgcacagttctctttatcaggcaaaaacacgtttattgagacatgaaatgagaatcaggctgaaggaatcatgcagctgaaagatgattatattcatagaaatgaagagatgaaatattcaaagaagatggctactttattgtgagacttaccactttaacctcatatgttaacagcacctaccaaaaaatgatatgagatagagctaaaatactgaaattgcaaatggacaaaataaatcatgaaaatttgtttattatttcttcaataaatatttctaggtgctttgtgattctttcatttagtcattaaagccattgctttactatattgcgttgccactttaaaaacaagttacttgacattgtttttgacagatttcactatatacttatgtaattaattgattatttctaaaatgtttgaataaactttgtactccctctaaggagtattttattcattcttttaattcccaaatgaactttgaacttacagtgctgttgaatgccttggtaaggacttcttgaaattgcataaactattcttgtaaatggtaaacttgagaattttctttgtttcttttttctctatgtcttaaagaatgcctttagaatctaattcatgttgtatcagttaagaatgtttctgtggtttctcgtatcagatgtgtaaagaaattattactgggatgccattggctatgtctctttccccttcatgtaaaattccaagtgtcagtaaaacttctctataatattttcttaaaaccatttataaatttgtgttataatactccagaaaatcaatgtaataagtggtcatatatatcaccaactatggatatcaaaaagttggggtcacatcagtgctatttatttaattaaaatacattgcatatttctattagcac

SEQ ID NO: 3271 - protein, 620 aa, Homo sapiens; identical to SEQ ID NO: 324

SEQ ID NO: 3272 - DNA, 5568 bp, Homo sapiens
ggggccgcgcaggagagcgcgcgtccgccgggtgctcgcgcggggttggtgaggttccgctgagggcggccggggctctgggagcgtggtaacgtggctgcaaccttagcgacatcaggaagaacagggtcgaggatcgagtcacagcaaactgtacaatggcagttgagtgggttttgaaaaacgtctgaattgtagtgtctacatctaccttctgccttctctctaccctttgaaaaaaaataaatggcatgtttgagaagagagctctattaaaagaggaatattgcaaatggcttcagattctatgagtagtaaacaagctaggaatcacattacaaaggggaaaaggcaacaacagcaccagcaaataaagaacagatcctcaattagtgatggtgatggagaagattcctttatttttgaagcaaatgaagcttggaaagattttcatggttctcttcttcgattttatgaaaatggagaactctgtgatgtcacactcaaggttggctcaaagctaatctcttgtcacaagctggtattggcttgtgttattccctactttagagccatgtttctttctgaaatggctgaagccaagcaaacgctgattgagattagagattttgatggtgatgcaatagaagacttggtaaagtttgtctattcttcacggctcactttgactgttgacaatgtccagcctctcttatatgcagcctgtattctgcaggttgaactggtggctagagcttgttgtgaatacatgaagttacattttcatccctccaattgcctggcagtaagagcctttgcagaaagtcacaatcgaatagacttaatggacatggcggatcagtatgcctgtgaccattttactgaagtagtggagtgtgaagactttgtaagtgtatcaccgcagcacctccataagcttttgtcctccagtgatctaaatattgaaaatgaaaagcaggtctataatgctgccatcaagtggcttcttgccaatcctcagcatcattccaaatggttggatgaaacacttgcacaggttcgcctgccattgttgccggttgattttcttatgggtgttgtggcaaaagaacagattgtcaagcaaaatctaaaatgtagagatttactggatgaagcaagaaattaccaccttcacttgagtagcagagcagtacctgactttgaatactccattcggactaccccaaggaagcatactgctggtgtgctgttttgtgtaggtggtcgaggtggatctggtgacccctttcgcagtattgaatgctattctatcaacaaaaacagttggttctttggaccagaaatgaatagtcgaaggcgacatgtgggtgtaatctctgtggaaggtaaagtgtatgcagtaggtggacatgatggaaatgaacatttagggagtatggagatgtttgatcctctcactaataaatggatgatgaaggcatcaatgaacacaaagaggcgaggaattgccttggcttccttaggaggcccaatttatgcaattggagggttagatgacaatacttgcttcaatgatgtggagagatatgacatagaatctgatcagtggagtacagtggcaccaatgaatactccccgtggaggagttggctctgttgctctagtaaaccatgtttatgcagtaggtggcaatgatggaatggcttctttatctagcgtggagagatatgatccacatctggataagtggatagaagttaaagaaatgggtcagcgaagagcaggcaatggagttagcaagcttcatggttgcttatacgtagttggtggttttgatgataattctcctctgagttcagttgagcggtatgacccccgaagcaacaagtgggattatgtggcagcacttactactcccagaggtggagtgggaatcgcaacagtgatgggcaaaatctttgcagttggtggtcataatggcaatgcatacttaaatacagtagaagcgtttgatccagtgctgaataggtgggagcttgttggatctgtgtctcactgcagagctggagcaggagtagctgtgtgttcctgtttaactagccaaattcgagatgtaggtcatggatccaataatgtggttgactgtatgtgatttgagttctggccaccaacaatttagtcatatctgataggtacaaaagaaaaccaagattttgatatgaccacctttcaacactttttactgcaactagagtcttatttaaatgttaactgttgtattgtgactaagtacaacttttggaatgatacctgaagaattattagtaatagagttaaatttgatacttcctgcttttgcaaataatggagtagggaagaagatagtcgaacttaaaatcatacctaccctgaaaaatgcttaaagtagtgccaaaaatcttgaaatctctctctctctctctatttggatgaatcaaaatgtaatttgttgagttttgccttttcttttgcctaaagatgttaacgtcaggcagtgggtttttcctagaggagagattagtacctattcattaacacaaggatacataagagacttgccccttttgaagatcatttctacttggtgctgatgaatttatgcctagctttttttttctaggtggtgatttttcaatttcttttatatttacggaagtagaaaaaatgttctgtctttttgaatgccacttagctgcattttcagaagcttataggctataagaagcctttaatttcagtttgaattgctaggacaccaaaagacctagctgggctaactccatccaaatgattttacagttttattttttcatcttttgcaaaaagtatttgttacataatcaaaaggtgaaccagaggaaatattgaacaaggttttagatctgatgttattctggtgcccaattgagagaccttgagaaagaatgatgcagattacatgactctaatgtgggcagtctgaaaatatctttaactgtcttctttgatcatttgattttggatccaagatttatcatctctctattttgctatttgccaccatcctggtttttctgactgtacagaatcaatctgcatttatttattatcagaaatgaatgcatttttacaaaaacctttttgtagactgtagtttattgattagttcaagcccatcacgaactaattaaacatattgttggtaaaaacagagattgaaattactgtttttatcatatttaaatccctctggtgtatttattgaaatttaattaaaaatatttctacatattgatttgaagccaggatattgatggacctacagatttaacagctcttcaaagttttaactagcattataaaatggcctattcattatatgtatatttttttataaatatttatcaagaacatgaaaatattttattttgtatttgcagtgcagtttggcacctctcttccaggccttcctaagtttttgttagttgtgtcttcgaatttattgtagttcaccgctggtcagtaatctggttcataaggaagctggggcagtgaaaaacacttcgttgatccatccagccctaaagttcattgactaatagctcatgcatcttattaaatgggattctggacttctacaatagtgtggaaagccacatcacaaaaaaagccacatcacaaaaaaaagccagtgcctattgagtatatcaaaccaaaaaagaaaaaaaaaagttttaagaggggtcaggctggcagataaaagtctcttatgaagcagatataaatccagtaagctatttttttctacctatgggcaagttcataagtcattgctggatctgaaccagtgttcttttgtgtaagtacaaccatatttcagtcagtccagaggcagttaaccctgtagcacttactagactggtgacaactggctggatgtggagaataagtgtcaaaacctggcttcaatgtctatttcttatgtctaatggagttcttatattacagtgtttgtttagctatggttactaatatgtttgttatatttattttcggggagaggatcttgttattgtttcctgagattatttaaaatgttttttctttgatgtatttctgtctttcttatatgtaaggagttataagggttattatattttcatttctggtttttactatacaatggttatctaacatactaagttggtaccctacctacccgtaaaatatgaaatactcagaagtaaagtgtgtgggcaatcagaagcatagccttgaaggacctgacagcagtatgaaaagataaataggccaggcatggtggctcacgcctgtgatcccagcactttgggaggccgaggtgggtggaccacctgagatcaggtgttcaagaccagcctgaccaacatggtgaaaccctgtctctactaaaagtacaaaaattagccaggcgtggtggcgcatacctgtaattccagctactcaggaggctgaggcaggagaattgcttgaacccaggaggtggaggttgcaatgagccgaggttgagccatcgcactccagcggtgaaacaagagtgaaactccatctcaaaaaaaaaaaaaaaaaaaagataaaaaagcagaatcaatatgtgcacagttctctttatcaggcaaaaacacgtttattgagacatgaaatgagaatcaggctgaaggaatcatgcagctgaaagatgattatattcatagaaatgaagagatgaaatattcaaagaagatggctactttattgtgagacttaccactttaacctcatatgttaacagcacctaccaaaaaatgatatgagatagagctaaaatactgaaattgcaaatggacaaaataaatcatgaaaatttgtttattatttcttcaataaatatttctaggtgctttgtgattctttcatttagtcattaaagccattgctttactatattgcgttgccactttaaaaacaagttacttgacattgtttttgacagatttcactatatacttatgtaattaattgattatttctaaaatgtttgaataaactttgtactccctctaaggagtattttattcattcttttaattcccaaatgaactttgaacttacagtgctgttgaatgccttggtaaggacttcttgaaattgcataaactattcttgtaaatggtaaacttgagaattttctttgtttcttttttctctatgtcttaaagaatgcctttagaatctaattcatgttgtatcagttaagaatgtttctgtggtttctcgtatcagatgtgtaaagaaattattactgggatgccattggctatgtctctttccccttcatgtaaaattccaagtgtcagtaaaacttctctataatattttcttaaaaccatttataaatttgtgttataatactccagaaaatcaatgtaataagtggtcatatatatcaccaactatggatatcaaaaagttggggtcacatcagtgctatttatttaattaaaatacattgcatatttctattagcac

SEQ ID NO: 3273 - protein, 620 aa, Homo sapiens; identical to SEQ ID NO: 324

SEQ ID NO: 3274 - DNA, 5340 bp, Homo sapiens
ggggccgcgcaggagagcgcgcgtccgccgggtgctcgcgcggggttggtgaggttccgctgagggcggccggggctctgggagcgtggtaacgtggctgcaaccttagcgacatcaggaagaacagggtcgaggatcgagtcacagcaaactgtacaatggcagttgagtgggttttgaaaaacgtctgaattgtagtgtctacatctaccttctgccttctctctaccctttgaaaaaaaataaatggcatgtttgagaagagagctctattaaaagaggaatattgcaaatggcttcagattctatgagtagtaaacaagctaggaatcacattacaaaggggaaaaggcaacaacagcaccagcaaataaagaacagatcctcaattagtgatggtgatggagaagattcctttatttttgaagcaaatgaagcttggaaagattttcatggttctcttcttcgattttatgaaaatggagaactctgtgatgtcacactcaaggttgaactggtggctagagcttgttgtgaatacatgaagttacattttcatccctccaattgcctggcagtaagagcctttgcagaaagtcacaatcgaatagacttaatggacatggcggatcagtatgcctgtgaccattttactgaagtagtggagtgtgaagactttgtaagtgtatcaccgcagcacctccataagcttttgtcctccagtgatctaaatattgaaaatgaaaagcaggtctataatgctgccatcaagtggcttcttgccaatcctcagcatcattccaaatggttggatgaaacacttgcacaggttcgcctgccattgttgccggttgattttcttatgggtgttgtggcaaaagaacagattgtcaagcaaaatctaaaatgtagagatttactggatgaagcaagaaattaccaccttcacttgagtagcagagcagtacctgactttgaatactccattcggactaccccaaggaagcatactgctggtgtgctgttttgtgtaggtggtcgaggtggatctggtgacccctttcgcagtattgaatgctattctatcaacaaaaacagttggttctttggaccagaaatgaatagtcgaaggcgacatgtgggtgtaatctctgtggaaggtaaagtgtatgcagtaggtggacatgatggaaatgaacatttagggagtatggagatgtttgatcctctcactaataaatggatgatgaaggcatcaatgaacacaaagaggcgaggaattgccttggcttccttaggaggcccaatttatgcaattggagggttagatgacaatacttgcttcaatgatgtggagagatatgacatagaatctgatcagtggagtacagtggcaccaatgaatactccccgtggaggagttggctctgttgctctagtaaaccatgtttatgcagtaggtggcaatgatggaatggcttctttatctagcgtggagagatatgatccacatctggataagtggatagaagttaaagaaatgggtcagcgaagagcaggcaatggagttagcaagcttcatggttgcttatacgtagttggtggttttgatgataattctcctctgagttcagttgagcggtatgacccccgaagcaacaagtgggattatgtggcagcacttactactcccagaggtggagtgggaatcgcaacagtgatgggcaaaatctttgcagttggtggtcataatggcaatgcatacttaaatacagtagaagcgtttgatccagtgctgaataggtgggagcttgttggatctgtgtctcactgcagagctggagcaggagtagctgtgtgttcctgtttaactagccaaattcgagatgtaggtcatggatccaataatgtggttgactgtatgtgatttgagttctggccaccaacaatttagtcatatctgataggtacaaaagaaaaccaagattttgatatgaccacctttcaacactttttactgcaactagagtcttatttaaatgttaactgttgtattgtgactaagtacaacttttggaatgatacctgaagaattattagtaatagagttaaatttgatacttcctgcttttgcaaataatggagtagggaagaagatagtcgaacttaaaatcatacctaccctgaaaaatgcttaaagtagtgccaaaaatcttgaaatctctctctctctctctatttggatgaatcaaaatgtaatttgttgagttttgccttttcttttgcctaaagatgttaacgtcaggcagtgggtttttcctagaggagagattagtacctattcattaacacaaggatacataagagacttgccccttttgaagatcatttctacttggtgctgatgaatttatgcctagctttttttttctaggtggtgatttttcaatttcttttatatttacggaagtagaaaaaatgttctgtctttttgaatgccacttagctgcattttcagaagcttataggctataagaagcctttaatttcagtttgaattgctaggacaccaaaagacctagctgggctaactccatccaaatgattttacagttttattttttcatcttttgcaaaaagtatttgttacataatcaaaaggtgaaccagaggaaatattgaacaaggttttagatctgatgttattctggtgcccaattgagagaccttgagaaagaatgatgcagattacatgactctaatgtgggcagtctgaaaatatctttaactgtcttctttgatcatttgattttggatccaagatttatcatctctctattttgctatttgccaccatcctggtttttctgactgtacagaatcaatctgcatttatttattatcagaaatgaatgcatttttacaaaaacctttttgtagactgtagtttattgattagttcaagcccatcacgaactaattaaacatattgttggtaaaaacagagattgaaattactgtttttatcatatttaaatccctctggtgtatttattgaaatttaattaaaaatatttctacatattgatttgaagccaggatattgatggacctacagatttaacagctcttcaaagttttaactagcattataaaatggcctattcattatatgtatatttttttataaatatttatcaagaacatgaaaatattttattttgtatttgcagtgcagtttggcacctctcttccaggccttcctaagtttttgttagttgtgtcttcgaatttattgtagttcaccgctggtcagtaatctggttcataaggaagctggggcagtgaaaaacacttcgttgatccatccagccctaaagttcattgactaatagctcatgcatcttattaaatgggattctggacttctacaatagtgtggaaagccacatcacaaaaaaagccacatcacaaaaaaaagccagtgcctattgagtatatcaaaccaaaaaagaaaaaaaaaagttttaagaggggtcaggctggcagataaaagtctcttatgaagcagatataaatccagtaagctatttttttctacctatgggcaagttcataagtcattgctggatctgaaccagtgttcttttgtgtaagtacaaccatatttcagtcagtccagaggcagttaaccctgtagcacttactagactggtgacaactggctggatgtggagaataagtgtcaaaacctggcttcaatgtctatttcttatgtctaatggagttcttatattacagtgtttgtttagctatggttactaatatgtttgttatatttattttcggggagaggatcttgttattgtttcctgagattatttaaaatgttttttctttgatgtatttctgtctttcttatatgtaaggagttataagggttattatattttcatttctggtttttactatacaatggttatctaacatactaagttggtaccctacctacccgtaaaatatgaaatactcagaagtaaagtgtgtgggcaatcagaagcatagccttgaaggacctgacagcagtatgaaaagataaataggccaggcatggtggctcacgcctgtgatcccagcactttgggaggccgaggtgggtggaccacctgagatcaggtgttcaagaccagcctgaccaacatggtgaaaccctgtctctactaaaagtacaaaaattagccaggcgtggtggcgcatacctgtaattccagctactcaggaggctgaggcaggagaattgcttgaacccaggaggtggaggttgcaatgagccgaggttgagccatcgcactccagcggtgaaacaagagtgaaactccatctcaaaaaaaaaaaaaaaaaaaagataaaaaagcagaatcaatatgtgcacagttctctttatcaggcaaaaacacgtttattgagacatgaaatgagaatcaggctgaaggaatcatgcagctgaaagatgattatattcatagaaatgaagagatgaaatattcaaagaagatggctactttattgtgagacttaccactttaacctcatatgttaacagcacctaccaaaaaatgatatgagatagagctaaaatactgaaattgcaaatggacaaaataaatcatgaaaatttgtttattatttcttcaataaatatttctaggtgctttgtgattctttcatttagtcattaaagccattgctttactatattgcgttgccactttaaaaacaagttacttgacattgtttttgacagatttcactatatacttatgtaattaattgattatttctaaaatgtttgaataaactttgtactccctctaaggagtattttattcattcttttaattcccaaatgaactttgaacttacagtgctgttgaatgccttggtaaggacttcttgaaattgcataaactattcttgtaaatggtaaacttgagaattttctttgtttcttttttctctatgtcttaaagaatgcctttagaatctaattcatgttgtatcagttaagaatgtttctgtggtttctcgtatcagatgtgtaaagaaattattactgggatgccattggctatgtctctttccccttcatgtaaaattccaagtgtcagtaaaacttctctataatattttcttaaaaccatttataaatttgtgttataatactccagaaaatcaatgtaataagtggtcatatatatcaccaactatggatatcaaaaagttggggtcacatcagtgctatttatttaattaaaatacattgcatatttctattagcac

SEQ ID NO: 3275 - protein, 544 aa, Homo sapiens
MASDSMSSKQARNHITKGKRQQQHQQIKNRSSISDGDGEDSFIFEANEAWKDFHGSLLRFYENGELCDVTLKVELVARACCEYMKLHFHPSNCLAVRAFAESHNRIDLMDMADQYACDHFTEVVECEDFVSVSPQHLHKLLSSSDLNIENEKQVYNAAIKWLLANPQHHSKWLDETLAQVRLPLLPVDFLMGVVAKEQIVKQNLKCRDLLDEARNYHLHLSSRAVPDFEYSIRTTPRKHTAGVLFCVGGRGGSGDPFRSIECYSINKNSWFFGPEMNSRRRHVGVISVEGKVYAVGGHDGNEHLGSMEMFDPLTNKWMMKASMNTKRRGIALASLGGPIYAIGGLDDNTCFNDVERYDIESDQWSTVAPMNTPRGGVGSVALVNHVYAVGGNDGMASLSSVERYDPHLDKWIEVKEMGQRRAGNGVSKLHGCLYVVGGFDDNSPLSSVERYDPRSNKWDYVAALTTPRGGVGIATVMGKIFAVGGHNGNAYLNTVEAFDPVLNRWELVGSVSHCRAGAGVAVCSCLTSQIRDVGHGSNNVVDCM

SEQ ID NO: 3276 - DNA, 5194 bp, Homo sapiens
aaattcgagccctcgtgcaccaaccgaaactccacagctgagagggcttggggcccggacagcaggagatccagcccctgagcaaccttccacggcttttgtcgcccccattggcgggaggagcagggttatgctcccggctcccgtaggggagctccagcctctggctctgtcagcctccccggcagctccttgactccttcctcccagtctttcgaagaggggcccaggcagtcacagcaaactgtacaatggcagttgagtgggttttgaaaaacgtctgaattgtagtgtctacatctaccttctgccttctctctaccctttgaaaaaaaataaatggcatgtttgagaagagagctctattaaaagaggaatattgcaaatggcttcagattctatgagtagtaaacaagctaggaatcacattacaaaggggaaaaggcaacaacagcaccagcaaataaagaacagatcctcaattagtgatggtgatggagaagattcctttatttttgaagcaaatgaagcttggaaagattttcatggttctcttcttcgattttatgaaaatggagaactctgtgatgtcacactcaaggttggctcaaagctaatctcttgtcacaagctggtattggcttgtgttattccctactttagagccatgtttctttctgaaatggctgaagccaagcaaacgctgattgagattagagattttgatggtgatgcaatagaagacttggtaaagtttgtctattcttcacggctcactttgactgttgacaatgtccagcctctcttatatgcagcctgtattctgcaggttgaactggtggctagagcttgttgtgaatacatgaagttacattttcatccctccaattgcctggcagtaagagcctttgcagaaagtcacaatcgaatagacttaatggacatggcggatcagtatgcctgtgaccattttactgaagtagtggagtgtgaagactttgtaagtgtatcaccgcagcacctccataagcttttgtcctccagtgatctaaatattgaaaatgaaaagcaggtctataatgctgccatcaagtggcttcttgccaatcctcagcatcattccaaatggttggatgaaacacttgcacaggttcgcctgccattgttgccggttgattttcttatgggtgttgtggcaaaagaacagattgtcaagcaaaatctaaaatgtagagatttactggatgaagcaagaaattaccaccttcacttgagtagcagagcagtacctgactttgaatactccattcggactaccccaaggaagcatactgctggtgtgctgttttgtgtaggtggtcgaggtggatctggtgacccctttcgcagtattgaatgctattctatcaacaaaaacagttggttctttggaccagaaatgaatagtcgaaggcgacatgtgggtgtaatctctgtggaaggtaaagtgtatgcagtaggtggacatgatggaaatgaacatttagggagtatggagatgtttgatcctctcactaataaatggatgatgaaggcatcaatgaacacaaagaggcgaggaattgccttggcttccttaggaggcccaatttatgcaattggagggttagatgacaatacttgcttcaatgatgtggagagatatgacatagaatctgatcagtggagtacagtggcaccaatgaatactccccgtggaggagttggctctgttgctctagtaaaccatgtttatgcagtaggtggcaatgatggaatggcttctttatctagcgtggagagatatgatccacatctggataagtggatagaagttaaagaaatgggtcagcgaagagcaggcaatggagttagcaagcttcatggttgcttatacgtagttggtggttttgatgataattctcctctgagttcagttgagcggtatgacccccgaagcaacaagtgggattatgtggcagcacttactactcccagaggtggagtgggaatcgcaacagtgatgggcaaaatctttgcagttggtggtcataatggcaatgcatacttaaatacagtagaagcgtttgatccagtgctgaataggtgggagcttgttggatctgtgtctcactgcagagctggagcaggagtagctgtgtgttcctgtttaactagccaaattcgagatgtaggtcatggatccaataatgtggttgactgtatgtgatttgagttctggccaccaacaatttagtcatatctgataggtacaaaagaaaaccaagattttgatatgaccacctttcaacactttttactgcaactagagtcttatttaaatgttaactgttgtattgtgactaagtacaacttttggaatgatacctgaagaattattagtaatagagttaaatttgatacttcctgcttttgcaaataatggagtagggaagaagatagtcgaacttaaaatcatacctaccctgaaaaatgcttaaagtagtgccaaaaatcttgaaatctctctctctctctctatttggatgaatcaaaatgtaatttgttgagttttgccttttcttttgcctaaagatgttaacgtcaggcagtgggtttttcctagaggagagattagtacctattcattaacacaaggatacataagagacttgccccttttgaagatcatttctacttggtgctgatgaatttatgcctagctttttttttctaggtggtgatttttcaatttcttttatatttacggaagtagaaaaaatgttctgtctttttgaatgccacttagctgcattttcagaagcttataggctataagaagcctttaatttcagtttgaattgctaggacaccaaaagacctagctgggctaactccatccaaatgattttacagttttattttttcatcttttgcaaaaagtatttgttacataatcaaaaggtgaaccagaggaaatattgaacaaggttttagatctgatgttattctggtgcccaattgagagaccttgagaaagaatgatgcagattacatgactctaatgtgggcagtctgaaaatatctttaactgtcttctttgatcatttgattttggatccaagatttatcatctctctattttgctatttgccaccatcctggtttttctgactgtacagaatcaatctgcatttatttattatcagaaatgaatgcatttttacaaaaacctttttgtagactgtagtttattgattagttcaagcccatcacgaactaattaaacatattgttggtaaaaacagagattgaaattactgtttttatcatatttaaatccctctggtgtatttattgaaatttaattaaaaatatttctacatattgatttgaagccaggatattgatggacctacagatttaacagctcttcaaagttttaactagcattataaaatggcctattcattatatgtatatttttttataaatatttatcaagaacatgaaaatattttattttgtatttgcagtgcagtttggcacctctcttccaggccttcctaagtttttgttagttgtgtcttcgaatttattgtagttcaccgctggtcagtaatctggttcataaggaagctggggcagtgaaaaacacttcgttgatccatccagccctaaagttcattgactaatagctcatgcatcttattaaatgggattctggacttctacaatagtgtggaaagccacatcacaaaaaaagccacatcacaaaaaaaagccagtgcctattgagtatatcaaaccaaaaaagaaaaaaaaaagttttaagaggggtcaggctggcagataaaagtctcttatgaagcagatataaatccagtaagctatttttttctacctatgggcaagttcataagtcattgctggatctgaaccagtgttcttttgtgtaagtacaaccatatttcagtcagtccagaggcagttaaccctgtagcacttactagactggtgacaactggctggatgtggagaataagtgtcaaaacctggcttcaatgtctatttcttatgtctaatggagttcttatattacagtgtttgtttagctatggttactaatatgtttgttatatttattttcggggagaggatcttgttattgtttcctgagattatttaaaatgttttttctttgatgtatttctgtctttcttatatgtaaggagttataagggttattatattttcatttctggtttttactatacaatggttatctaacatactaagttggtaccctacctacccgtaaaatatgaaatactcagaagtaaagtgtgtgggcaatcagaagcatagccttgaaggacctgacagcagtatgaaaagataaataggccaggcatggtggctcacgcctgtgatcccagcactttgggaggccgaggtgggtggaccacctgagatcaggtgttcaagaccagcctgaccaacatggtgaaaccctgtctctactaaaagtacaaaaattagccaggcgtggtggcgcatacctgtaattccagctactcaggaggctgaggcaggagaattgcttgaacccaggaggtggaggttgcaatgagccgaggttgagccatcgcactccagcggtgaaacaagagtgaaactccatctcaaaaaaaaaaaaaaaaaaaagataaaaaagcagaatcaatatgtgcacagttctctttatcaggcaaaaacacgtttattgagacatgaaatgagaatcaggctgaaggaatcatgcagctgaaagatgattatattcatagaaatgaagagatgaaatattcaaagaagatggctactttattgtgagacttaccactttaacctcatatgttaacagcacctaccaaaaaatgatatgagatagagctaaaatactgaaattgcaaatggacaaaataaatcatgaaaatttgtttattatttcttcaataaatatttctaggtgctttgtgattctttcatttagtcattaaagccattgctttactatattgcgttgccactttaaaaacaagttacttgacattgtttttgacagatttcactatatacttatgtaattaattgattatttctaaaatgtttgaataaactttgtactccctct

SEQ ID NO: 3277 - protein, 620 aa, Homo sapiens; identical to SEQ ID NO: 324

SEQ ID NO: 3278 - DNA, 5101 bp, Homo sapiens
ggggccgcgcaggagagcgcgcgtccgccgggtgctcgcgcggggttggtgaggttccgctgagggcggccggggctctgggagcgtggtaacgtggctgcaaccttagcgacatcaggaagaacagggtcgaggatcgagtcacagcaaactgtacaatggcagttgagtgggttttgaaaaacgtctgaattgtagtgtctacatctaccttctgccttctctctaccctttgaaaaaaaataaatggcatgtttgagaagagagctctattaaaagaggaatattgcaaatggcttcagattctatgagtagtaaacaagctaggaatcacattacaaaggggaaaaggcaacaacagcaccagcaaataaagaacagatcctcaattagtgatggtgatggagaagattcctttatttttgaagcaaatgaagcttggaaagattttcatggttctcttcttcgattttatgaaaatggagaactctgtgatgtcacactcaaggttggctcaaagctaatctcttgtcacaagctggtattggcttgtgttattccctactttagagccatgtttctttctgaaatggctgaagccaagcaaacgctgattgagattagagattttgatggtgatgcaatagaagacttggtaaagtttgtctattcttcacggctcactttgactgttgacaatgtccagcctctcttatatgcagcctgtattctgcaggttgaactggtggctagagcttgttgtgaatacatgaagttacattttcatccctccaattgcctggcagtaagagcctttgcagaaagtcacaatcgaatagacttaatggacatggcggatcagtatgcctgtgaccattttactgaagtagtggagtgtgaagactttgtaagtgtatcaccgcagcacctccataagcttttgtcctccagtgatctaaatattgaaaatgaaaagcaggtctataatgctgccatcaagtggcttcttgccaatcctcagcatcattccaaatggttggatgaaacacttgcacaggttcgcctgccattgttgccggttgattttcttatgggtgttgtggcaaaagaacagattgtcaagcaaaatctaaaatgtagagatttactggatgaagcaagaaattaccaccttcacttgagtagcagagcagtacctgactttgaatactccattcggactaccccaaggaagcatactgctggtgtgctgttttgtgtaggtggtcgaggtggatctggtgacccctttcgcagtattgaatgctattctatcaacaaaaacagttggttctttggaccagaaatgaatagtcgaaggcgacatgtgggtgtaatctctgtggaaggtaaagtgtatgcagtaggtggacatgatggaaatgaacatttagggagtatggagatgtttgatcctctcactaataaatggatgatgaaggcatcaatgaacacaaagaggcgaggaattgccttggcttccttaggaggcccaatttatgcaattggagggttagatgacaatacttgcttcaatgatgtggagagatatgacatagaatctgatcagtggagtacagtggcaccaatgaatactccccgtggaggagttggctctgttgctctagtaaaccatgtttatgcagtaggtggcaatgatggaatggcttctttatctagcgtggagagatatgatccacatctggataagtggatagaagttaaagaaatgggtcagcgaagagcaggcaatggagttagcaagcttcatggttgcttatacgtagttggtggttttgatgataattctcctctgagttcagttgagcggtatgacccccgaagcaacaagtgggattatgtggcagcacttactactcccagaggtggagtgggaatcgcaacagtgatgggcaaaatctttgcagttggtggtcataatggcaatgcatacttaaatacagtagaagcgtttgatccagtgctgaataggtgggagcttgttggatctgtgtctcactgcagagctggagcaggagtagctgtgtgttcctgtttaactagccaaattcgagatgtaggtcatggatccaataatgtggttgactgtatgtgatttgagttctggccaccaacaatttagtcatatctgataggtacaaaagaaaaccaagattttgatatgaccacctttcaacactttttactgcaactagagtcttatttaaatgttaactgttgtattgtgactaagtacaacttttggaatgatacctgaagaattattagtaatagagttaaatttgatacttcctgcttttgcaaataatggagtagggaagaagatagtcgaacttaaaatcatacctaccctgaaaaatgcttaaagtagtgccaaaaatcttgaaatctctctctctctctctatttggatgaatcaaaatgtaatttgttgagttttgccttttcttttgcctaaagatgttaacgtcaggcagtgggtttttcctagaggagagattagtacctattcattaacacaaggatacataagagacttgccccttttgaagatcatttctacttggtgctgatgaatttatgcctagctttttttttctaggtggtgatttttcaatttcttttatatttacggaagtagaaaaaatgttctgtctttttgaatgccacttagctgcattttcagaagcttataggctataagaagcctttaatttcagtttgaattgctaggacaccaaaagacctagctgggctaactccatccaaatgattttacagttttattttttcatcttttgcaaaaagtatttgttacataatcaaaaggtgaaccagaggaaatattgaacaaggttttagatctgatgttattctggtgcccaattgagagaccttgagaaagaatgatgcagattacatgactctaatgtgggcagtctgaaaatatctttaactgtcttctttgatcatttgattttggatccaagatttatcatctctctattttgctatttgccaccatcctggtttttctgactgtacagaatcaatctgcatttatttattatcagaaatgaatgcatttttacaaaaacctttttgtagactgtagtttattgattagttcaagcccatcacgaactaattaaacatattgttggtaaaaacagagattgaaattactgtttttatcatatttaaatccctctggtgtatttattgaaatttaattaaaaatatttctacatattgatttgaagccaggatattgatggacctacagatttaacagctcttcaaagttttaactagcattataaaatggcctattcattatatgtatatttttttataaatatttatcaagaacatgaaaatattttattttgtatttgcagtgcagtttggcacctctcttccaggccttcctaagtttttgttagttgtgtcttcgaatttattgtagttcaccgctggtcagtaatctggttcataaggaagctggggcagtgaaaaacacttcgttgatccatccagccctaaagttcattgactaatagctcatgcatcttattaaatgggattctggacttctacaatagtgtggaaagccacatcacaaaaaaagccacatcacaaaaaaaagccagtgcctattgagtatatcaaaccaaaaaagaaaaaaaaaagttttaagaggggtcaggctggcagataaaagtctcttatgaagcagatataaatccagtaagctatttttttctacctatgggcaagttcataagtcattgctggatctgaaccagtgttcttttgtgtaagtacaaccatatttcagtcagtccagaggcagttaaccctgtagcacttactagactggtgacaactggctggatgtggagaataagtgtcaaaacctggcttcaatgtctatttcttatgtctaatggagttcttatattacagtgtttgtttagctatggttactaatatgtttgttatatttattttcggggagaggatcttgttattgtttcctgagattatttaaaatgttttttctttgatgtatttctgtctttcttatatgtaaggagttataagggttattatattttcatttctggtttttactatacaatggttatctaacatactaagttggtaccctacctacccgtaaaatatgaaatactcagaagtaaagtgtgtgggcaatcagaagcatagccttgaaggacctgacagcagtatgaaaagataaataggccaggcatggtggctcacgcctgtgatcccagcactttgggaggccgaggtgggtggaccacctgagatcaggtgttcaagaccagcctgaccaacatggtgaaaccctgtctctactaaaagtacaaaaattagccaggcgtggtggcgcatacctgtaattccagctactcaggaggctgaggcaggagaattgcttgaacccaggaggtggaggttgcaatgagccgaggttgagccatcgcactccagcggtgaaacaagagtgaaactccatctcaaaaaaaaaaaaaaaaaaaagataaaaaagcagaatcaatatgtgcacagttctctttatcaggcaaaaacacgtttattgagacatgaaatgagaatcaggctgaaggaatcatgcagctgaaagatgattatattcatagaaatgaagagatgaaatattcaaagaagatggctactttattgtgagacttaccactttaacctcatatgttaacagcacctaccaaaaaatgatatgagatagagctaaaatactgaaattgcaaatggacaaaataaatcatgaaaatttgtttattatttcttcaataaatatttctaggtgctttgtgattctttcatttagtcattaaagccattgctttactatattgcgttgccactttaaaaacaagttacttgacattgtttttgacagatttcactatatacttatgtaattaattgattatttctaaaatgtttgaataaactttgtactccctct

SEQ ID NO: 3279 - protein, 620 aa, Homo sapiens; identical to SEQ ID NO: 324

SEQ ID NO: 3280 - DNA, 4133 bp, Homo sapiens
ggggccgcgcaggagagcgcgcgtccgccgggtgctcgcgcggggttggtgaggttccgctgagggcggccggggctctgggagcgtggtaacgtggctgcaaccttagcgacatcaggaagaacagggtcgaggatcgagtcacagcaaactgtacaatggcagttgagtgggttttgaaaaacgtctgaattgtagtgtctacatctaccttctgccttctctctaccctttgaaaaaaaataaatggcatgtttgagaagagagctctattaaaagaggaatattgcaaatggcttcagattctatgagtagtaaacaagctaggaatcacattacaaaggggaaaaggcaacaacagcaccagcaaataaagaacagatcctcaattagtgatggtgatggagaagattcctttatttttgaagcaaatgaagcttggaaagattttcatggttctcttcttcgattttatgaaaatggagaactctgtgatgtcacactcaaggttggctcaaagctaatctcttgtcacaagctggtattggcttgtgttattccctactttagagccatgtttctttctgaaatggctgaagccaagcaaacgctgattgagattagagattttgatggtgatgcaatagaagacttggtaaagtttgtctattcttcacggctcactttgactgttgacaatgtccagcctctcttatatgcagcctgtattctgcaggttgaactggtggctagagcttgttgtgaatacatgaagttacattttcatccctccaattgcctggcagtaagagcctttgcagaaagtcacaatcgaatagacttaatggacatggcggatcagtatgcctgtgaccattttactgaagtagtggagtgtgaagactttgtaagtgtatcaccgcagcacctccataagcttttgtcctccagtgatctaaatattgaaaatgaaaagcaggtctataatgctgccatcaagtggcttcttgccaatcctcagcatcattccaaatggttggatgaaacacttgcacaggttcgcctgccattgttgccggttgattttcttatgggtgttgtggcaaaagaacagattgtcaagcaaaatctaaaatgtagagatttactggatgaagcaagaaattaccaccttcacttgagtagcagagcagtacctgactttgaatactccattcggactaccccaaggaagcatactgctggtgtgctgttttgtgtaggtggtcgaggtggatctggtgacccctttcgcagtattgaatgctattctatcaacaaaaacagttggttctttggaccagaaatgaatagtcgaaggcgacatgtgggtgtaatctctgtggaaggtaaagtgtatgcagtaggtggacatgatggaaatgaacatttagggagtatggagatgtttgatcctctcactaataaatggatgatgaaggcatcaatgaacacaaagaggcgaggaattgccttggcttccttaggaggcccaatttatgcaattggagggttagatgacaatacttgcttcaatgatgtggagagatatgacatagaatctgatcagtggagtacagtggcaccaatgaatactccccgtggaggagttggctctgttgctctagtaaaccatgtttatgcagtaggtggcaatgatggaatggcttctttatctagcgtggagagatatgatccacatctggataagtggatagaagttaaagaaatgggtcagcgaagagcaggcaatggagttagcaagcttcatggttgcttatacgtagttggtggttttgatgataattctcctctgagttcagttgagcggtatgacccccgaagcaacaagtgggattatgtggcagcacttactactcccagaggtggagtgggaatcgcaacagtgatgggcaaaatctttgcagttggtggtcataatggcaatgcatacttaaatacagtagaagcgtttgatccagtgctgaataggtgggagcttgttggatctgtgtctcactgcagagctggagcaggagtagctgtgtgttcctgtttaactagccaaattcgagatgtaggtcatggatccaataatgtggttgactgtatgtgatttgagttctggccaccaacaatttagtcatatctgataggtacaaaagaaaaccaagattttgatatgaccacctttcaacactttttactgcaactagagtcttatttaaatgttaactgttgtattgtgactaagtacaacttttggaatgatacctgaagaattattagtaatagagttaaatttgatacttcctgcttttgcaaataatggagtagggaagaagatagtcgaacttaaaatcatacctaccctgaaaaatgcttaaagtagtgccaaaaatcttgaaatctctctctctctctctatttggatgaatcaaaatgtaatttgttgagttttgccttttcttttgcctaaagatgttaacgtcaggcagtgggtttttcctagaggagagattagtacctattcattaacacaaggatacataagagacttgccccttttgaagatcatttctacttggtgctgatgaatttatgcctagctttttttttctaggtggtgatttttcaatttcttttatatttacggaagtagaaaaaatgttctgtctttttgaatgccacttagctgcattttcagaagcttataggctataagaagcctttaatttcagtttgaattgctaggacaccaaaagacctagctgggctaactccatccaaatgattttacagttttattttttcatcttttgcaaaaagtatttgttacataatcaaaaggtgaaccagaggaaatattgaacaaggttttagatctgatgttattctggtgcccaattgagagaccttgagaaagaatgatgcagattacatgactctaatgtgggcagtctgaaaatatctttaactgtcttctttgatcatttgattttggatccaagatttatcatctctctattttgctatttgccaccatcctggtttttctgactgtacagaatcaatctgcatttatttattatcagaaatgaatgcatttttacaaaaacctttttgtagactgtagtttattgattagttcaagcccatcacgaactaattaaacatattgttggtaaaaacagagattgaaattactgtttttatcatatttaaatccctctggtgtatttattgaaatttaattaaaaatatttctacatattgatttgaagccaggatattgatggacctacagatttaacagctcttcaaagttttaactagcattataaaatggcctattcattatatgtatatttttttataaatatttatcaagaacatgaaaatattttattttgtatttgcagtgcagtttggcacctctcttccaggccttcctaagtttttgttagttgtgtcttcgaatttattgtagttcaccgctggtcagtaatctggttcataaggaagctggggcagtgaaaaacacttcgttgatccatccagccctaaagttcattgactaatagctcatgcatcttattaaatgggattctggacttctacaatagtgtggaaagccacatcacaaaaaaagccacatcacaaaaaaaagccagtgcctattgagtatatcaaaccaaaaaagaaaaaaaaaagttttaagaggggtcaggctggcagataaaagtctcttatgaagcagatataaatccagtaagctatttttttctacctatgggcaagttcataagtcattgctggatctgaaccagtgttcttttgtgtaagtacaaccatatttcagtcagtccagaggcagttaaccctgtagcacttactagactggtgacaactggctggatgtggagaataagtgtcaaaacctggcttcaatgtctatttcttatgtctaatggagttcttatattacagtgtttgtttagctatggttactaatatgtttgttatatttattttcggggagaggatcttgttattgtttcctgagattatttaaaatgttttttctttgatgt

SEQ ID NO: 3281 - protein, 620 aa, Homo sapiens; identical to SEQ ID NO: 324

SEQ ID NO: 3282 - DNA, 4222 bp, Homo sapiens
aaattcgagccctcgtgcaccaaccgaaactccacagctgagagggcttggggcccggacagcaggagatccagcccctgagcaaccttccacggcttttgtcgcccccattggcgggaggagcagggttatgctcccggctcccgtaggggagctccagcctctggctctgtcagcctccccggcagctccttgactccttcctcccagtctttcgaagaggggcccaggcagtcacagcaaactgtacaatggcagttgagtgggttttgaaaaacgtctgaattgtagtgtctacatctaccttctgccttctctctaccctttgaaaaaaaataaatggcatgtttgagaagagagctctattaaaagaggaatattgcaaatggcttcagattctatgagtagtaaacaagctaggaatcacattacaaaggggaaaaggcaacaacagcaccagcaaataaagaacagatcctcaattagtgatggtgatggagaagattcctttatttttgaagcaaatgaagcttggaaagattttcatggttctcttcttcgattttatgaaaatggagaactctgtgatgtcacactcaaggttggctcaaagctaatctcttgtcacaagctggtattggcttgtgttattccctactttagagccatgtttctttctgaaatggctgaagccaagcaaacgctgattgagattagagattttgatggtgatgcaatagaagacttggtaaagtttgtctattcttcacggctcactttgactgttgacaatgtccagcctctcttatatgcagcctgtattctgcaggttgaactggtggctagagcttgttgtgaatacatgaagttacattttcatccctccaattgcctggcagtaagagcctttgcagaaagtcacaatcgaatagacttaatggacatggcggatcagtatgcctgtgaccattttactgaagtagtggagtgtgaagactttgtaagtgtatcaccgcagcacctccataagcttttgtcctccagtgatctaaatattgaaaatgaaaagcaggtctataatgctgccatcaagtggcttcttgccaatcctcagcatcattccaaatggttggatgaaacacttgcacaggttcgcctgccattgttgccggttgattttcttatgggtgttgtggcaaaagaacagattgtcaagcaaaatctaaaatgtagagatttactggatgaagcaagaaattaccaccttcacttgagtagcagagcagtacctgactttgaatactccattcggactaccccaaggaagcatactgctggtgtgctgttttgtgtaggtggtcgaggtggatctggtgacccctttcgcagtattgaatgctattctatcaacaaaaacagttggttctttggaccagaaatgaatagtcgaaggcgacatgtgggtgtaatctctgtggaaggtaaagtgtatgcagtaggtggacatgatggaaatgaacatttagggagtatggagatgtttgatcctctcactaataaatggatgatgaaggcatcaatgaacacaaagaggcgaggaattgccttggcttccttaggaggcccaatttatgcaattggagggttagatgacaatacttgcttcaatgatgtggagagatatgacatagaatctgatcagtggagtacagtggcaccaatgaatactccccgtggaggagttggctctgttgctctagtaaaccatgtttatgcagtaggtggcaatgatggaatggcttctttatctagcgtggagagatatgatccacatctggataagtggatagaagttaaagaaatgggtcagcgaagagcaggcaatggagttagcaagcttcatggttgcttatacgtagttggtggttttgatgataattctcctctgagttcagttgagcggtatgacccccgaagcaacaagtgggattatgtggcagcacttactactcccagaggtggagtgggaatcgcaacagtgatgggcaaaatctttgcagttggtggtcataatggcaatgcatacttaaatacagtagaagcgtttgatccagtgctgaataggtgggagcttgttggatctgtgtctcactgcagagctggagcaggagtagctgtgtgttcctgtttaactagccaaattcgagatgtaggtcatggatccaataatgtggttgactgtatgtgatttgagttctggccaccaacaatttagtcatatctgataggtacaaaagaaaaccaagattttgatatgaccacctttcaacactttttactgcaactagagtcttatttaaatgttaactgttgtattgtgactaagtacaacttttggaatgatacctgaagaattattagtaatagagttaaatttgatacttcctgcttttgcaaataatggagtagggaagaagatagtcgaacttaaaatcatacctaccctgaaaaatgcttaaagtagtgccaaaaatcttgaaatctctctctctctctctatttggatgaatcaaaatgtaatttgttgagttttgccttttcttttgcctaaagatgttaacgtcaggcagtgggtttttcctagaggagagattagtacctattcattaacacaaggatacataagagacttgccccttttgaagatcatttctacttggtgctgatgaatttatgcctagctttttttttctaggtggtgatttttcaatttcttttatatttacggaagtagaaaaaatgttctgtctttttgaatgccacttagctgcattttcagaagcttataggctataagaagcctttaatttcagtttgaattgctaggacaccaaaagacctagctgggctaactccatccaaatgattttacagttttattttttcatcttttgcaaaaagtatttgttacataatcaaaaggtgaaccagaggaaatattgaacaaggttttagatctgatgttattctggtgcccaattgagagaccttgagaaagaatgatgcagattacatgactctaatgtgggcagtctgaaaatatctttaactgtcttctttgatcatttgattttggatccaagatttatcatctctctattttgctatttgccaccatcctggtttttctgactgtacagaatcaatctgcatttatttattatcagaaatgaatgcatttttacaaaaacctttttgtagactgtagtttattgattagttcaagcccatcacgaactaattaaacatattgttggtaaaaacagagattgaaattactgtttttatcatatttaaatccctctggtgtatttattgaaatttaattaaaaatatttctacatattgatttgaagccaggatattgatggacctacagatttaacagctcttcaaagttttaactagcattataaaatggcctattcattatatgtatatttttttataaatatttatcaagaacatgaaaatattttattttgtatttgcagtgcagtttggcacctctcttccaggccttcctaagtttttgttagttgtgtcttcgaatttattgtagttcaccgctggtcagtaatctggttcataaggaagctggggcagtgaaaaacacttcgttgatccatccagccctaaagttcattgactaatagctcatgcatcttattaaatgggattctggacttctacaatagtgtggaaagccacatcacaaaaaaagccacatcacaaaaaaaagccagtgcctattgagtatatcaaaccaaaaaagaaaaaaaaaagttttaagaggggtcaggctggcagataaaagtctcttatgaagcagatataaatccagtaagctatttttttctacctatgggcaagttcataagtcattgctggatctgaaccagtgttcttttgtgtaagtacaaccatatttcagtcagtccagaggcagttaaccctgtagcacttactagactggtgacaactggctggatgtggagaataagtgtcaaaacctggcttcaatgtctatttcttatgtctaatggagttcttatattacagtgtttgtttagctatggttactaatatgtttgttatatttattttcggggagaggatcttgttattgtttcctgagattatttaaaatgttttttctttg

SEQ ID NO: 3283 - protein, 620 aa, Homo sapiens; identical to SEQ ID NO: 324

SEQ ID NO: 3284 - DNA, 2489 bp, Homo sapiens
ggggccgcgcaggagagcgcgcgtccgccgggtgctcgcgcggggttggtgaggttccgctgagggcggccggggctctgggagcgtggtaacgtggctgcaaccttagcgacatcaggaagaacagggtcgaggatcgagtcacagcaaactgtacaatggcagttgagtgggttttgaaaaacgtctgaattgtagtgtctacatctaccttctgccttctctctaccctttgaaaaaaaataaatggcatgtttgagaagagagctctattaaaagaggaatattgcaaatggcttcagattctatgagtagtaaacaagctaggaatcacattacaaaggggaaaaggcaacaacagcaccagcaaataaagaacagatcctcaattagtgatggtgatggagaagattcctttatttttgaagcaaatgaagcttggaaagattttcatggttctcttcttcgattttatgaaaatggagaactctgtgatgtcacactcaaggtgtgctgttttgtgtaggtggtcgaggtggatctggtgacccctttcgcagtattgaatgctattctatcaacaaaaacagttggttctttggaccagaaatgaatagtcgaaggcgacatgtgggtgtaatctctgtggaaggtaaagtgtatgcagtaggtggacatgatggaaatgaacatttagggagtatggagatgtttgatcctctcactaataaatggatgatgaaggcatcaatgaacacaaagaggcgaggaattgccttggcttccttaggaggcccaatttatgcaattggagggttagatgacaatacttgcttcaatgatgtggagagatatgacatagaatctgatcagtggagtacagtggcaccaatgaatactccccgtggaggagttggctctgttgctctagtaaaccatgtttatgcagtaggtggcaatgatggaatggcttctttatctagcgtggagagatatgatccacatctggataagtggatagaagttaaagaaatgggtcagcgaagagcaggcaatggagttagcaagcttcatggttgcttatacgtagttggtggttttgatgataattctcctctgagttcagttgagcggtatgacccccgaagcaacaagtgggattatgtggcagcacttactactcccagaggtggagtgggaatcgcaacagtgatgggcaaaatctttgcagttggtggtcataatggcaatgcatacttaaatacagtagaagcgtttgatccagtgctgaataggtgggagcttgttggatctgtgtctcactgcagagctggagcaggagtagctgtgtgttcctgtttaactagccaaattcgagatgtaggtcatggatccaataatgtggttgactgtatgtgatttgagttctggccaccaacaatttagtcatatctgataggtacaaaagaaaaccaagattttgatatgaccacctttcaacactttttactgcaactagagtcttatttaaatgttaactgttgtattgtgactaagtacaacttttggaatgatacctgaagaattattagtaatagagttaaatttgatacttcctgcttttgcaaataatggagtagggaagaagatagtcgaacttaaaatcatacctaccctgaaaaatgcttaaagtagtgccaaaaatcttgaaatctctctctctctctctatttggatgaatcaaaatgtaatttgttgagttttgccttttcttttgcctaaagatgttaacgtcaggcagtgggtttttcctagaggagagattagtacctattcattaacacaaggatacataagagacttgccccttttgaagatcatttctacttggtgctgatgaatttatgcctagctttttttttctaggtggtgatttttcaatttcttttatatttacggaagtagaaaaaatgttctgtctttttgaatgccacttagctgcattttcagaagcttataggctataagaagcctttaatttcagtttgaattgctaggacaccaaaagacctagctgggctaactccatccaaatgattttacagttttattttttcatcttttgcaaaaagtatttgttacataatcaaaaggtgaaccagaggaaatattgaacaaggttttagatctgatgttattctggtgcccaattgagagaccttgagaaagaatgatgcagattacatgactctaatgtgggcagtctgaaaatatctttaactgtcttctttgatcatttgattttggatccaagatttatcatctctctattttgctatttgccaccatcctggtttttctgactgtacagaatcaatctgcatttatttattatcagaaatgaatgcatttttacaaaaacctttttgtagactgtagtttattgattagttcaagcccatcacgaactaattaaacatattgttggt

SEQ ID NO: 3285 - protein, 269 aa, Homo sapiens [sequence omitted]

SEQ ID NO: 3286 - DNA, 1924 bp, Homo sapiens
agatgctgtcattttcagaagaagctgatgtaaatgcctctacaacctaaagcccagacggagtcttgctctgtcgccaggctggagtgcaatggcacaatctcagctcactgcaacctccgactcccgggttcaagcaattctcctgcctcagccttgcgaatagctgggattggtggcacgcacaaccacgcccagctaatttttgtatttttagtacagacggagtttcaccatgttggccaggatggtctcgactcctgacctcgtgatgcgcccgcctcagcctcccaaagtgctgggattacaggcgtgagccaccgcgcatggccacttgcactgctttttagcagcgagctctcaggtcaatcaactgcttccttaggtttacaaactgtgggtgtgtatttataaacacagttgttttgtatatcctttgtagagcacgtggtgaaagtgacacaggaataaatgcaaacctttttttccccttcttttttcaaagacataaatcccaggaacactcacaaccgcagaaggggatttgatggacatacaaagaaactaaattttgtaccgccgcagaagtgaagcatggataagctcaaaggtatttaggcagtgttttatttcaagatttgttatggggacctccgccacgccctggtccgccttcaccaggccgggcaacactgcccagtccctgagacccggccgcccactagggagccgcgggggcgaggccgtgggggtggcctcggggaggaggtcccgagaaccacacttcccagagtgccgtgcgcagccccgcccagcccgccccgcccccagaggccgcggctcgcgggggctgaggcgagaggacgccaagcgcccgccggggctccgcggggccgcgcaggagagcgcgcgtccgccgggtgctcgcgcggggttggtgaggttccgctgagggcggccggggctctgggagcgtggtaacgtggctgcaaccttagcgacatcaggaagaacagggtcgaggatcgaggtaacgggacgctcgtctcccctcagtcccctcgtctcccctcagtcccctcttcctttgtgcggtgccgtccgctcgcgccgagccctccctcaccccagcccccaagtcgcaacaccgtcccgtcttgggtctccggtgtgcggaggaaattcgagccctcgtgcaccaaccgaaactccacagctgagagggcttggggcccggacagcaggagatccagcccctgagcaaccttccacggcttttgtcgcccccattggcgggaggagcagggttatgctcccggctcccgtaggggagctccagcctctggctctgtcagcctccccggcagctccttgactccttcctcccagtctttcgaagaggggcccaggcaggtgcttcgcggggtccaggaagagggcaggcgcggtgcggctggcgcgggttcggggccccgggagggcggccggacgccccctggagccgcggcctgcgggggcggggcgagtgggccacctccgggccacgccgcgcggggacgaggcgaggaaggcactgcctgtccccactcggggggcttgctggccgccctggaggtgccttcccgggagcggcggtgtagaccttgtggagagtgcctcctgatgtggaaccaggaaccgcagcctctttctagacgctcagccgcccggtggagttgttaccgccacgatgacagctctttacgccttccactccgtgctgggttcagttggcttgctgttttcttcagagagagcgatttggctacatagcttgaattttctacgtgtctcgtgctttactggacttgcactgtttttccctcttggcagtgtttaatcgggtgacttttcatagaaaacgttcagtattttcatctgtgtt

SEQ ID NO: 3287 - protein, 76 aa, Homo sapiens
MPLQPKAQTESCSVARLECNGTISAHCNLRLPGSSNSPASALRIAGIGGTHNHAQLIFVFLVQTEFHHVGQDGLDS

SEQ ID NO: 3288 - DNA, 258 bp, Homo sapiens
agatcatctgaaaggaaggagaatggtgaaggcagagagaagcatgaggaatcaggacattggacaaagccttcacatgattttagaggattaaactgcttcggcatctagtaaactcctcccagaaggaaaactagagacatgcttttccctaaatactacttcagagcccataataaaggtgcatattgaacaagtggatcttcatcaagaatgaaagctgtctgcttcaaagtaaaatctgtcacagtgtcatct

SEQ ID NO: 3289 - protein, 36 aa, Homo sapiens
RSSERKENGEGREKHEESGHWTKPSHDFRGLNCFGI

SEQ ID NO: 3290 - DNA, 2269 bp, Homo sapiens
gactacacaaggactgaaccagaaggaagaggacagagcaaagccatgaacatcatcctagaaatccttctgcttctgatcaccatcatctactcctacttggagtcgttggtgaagtttttcattcctcagaggagaaaatctgtggctggggagattgttctcattactggagctgggcatggaataggcaggcagactacttatgaatttgcaaaacgacagagcatattggttctgtgggatattaataaggtgaagaaagaagtgggtgatgtaacaatcgtggtgaataatgctgggacagtatatccagccgatcttctcagcaccaaggatgaagagattaccaagacatttgaggtcaacatcctaggacatttttggatcacaaaagcacttcttccatcgatgatggagagaaatcatggccacatcgtcacagtggcttcagtgtgcggccacgaagggattccttacctcatcccatattgttccagcaaatttgccgctgttggctttcacagaggtctgacatcagaacttcaggccttgggaaaaactggtatcaaaacctcatgtctctgcccagtttttgtgaatactgggttcaccaaaaatccaagcacaagattatggcctgtattggagacagatgaagtcgtaagaagtctgatagatggaatacttaccaataagaaaatgatttttgttccatcgtatatcaatatctttctgagactacagaagtttcttcctgaacgcgcctcagcgattttaaatcgtatgcagaatattcaatttgaagcagtggttggccacaaaatcaaaatgaaatgaataaataagctccagccagagatgtatgcatgataatgatatgaatagtttcgaatcaatgctgcaaagctttatttcacattttttcagtcctgataatattaaaaacattggtttggcactagcagcagtcaaacgaacaagattaattacctgtcttcctgtttctcaagaatatttacgtagtttttcataggtctgtttttcctttcatgcctcttaaaaacttctgtgcttacataaacatacttaaaaggttttctttaagatattttatttttccatttaaaggtggacaaaagctacctccctaaaagtaaatacaaagagaacttatttacacagggaaggtttaagactgttcaagtagcattccaatctgtagccatgccacagaatatcaacaagaacacagaatgagtgcacagctaagagatcaagtttcagcaggcagctttatctcaacctggacatattttaagattcagcatttgaaagatttccctagcctcttcctttttcattagcccaaaacggtgcaactctattctggactttattacttgattctgtcttctgtataactctgaagtccaccaaaagtggaccctctatatttcctccctttttatagtcttataagatacattatgaaaggtgaccgactctattttaaatctcagaattttaagttctagccccatgataacctttttctttgtaatttatgctttcatatatccttggtcccagagatgtttagacaattttaggctcaaaaattaaagctaacacaggaaaaggaactgtactggctattacataagaaacaatggacccaagagaagaaaaggaagaaagaaaggttttttggtttttgttttgttttgttttgttttttgtttttttgagatggagtctcactctttcgcccaggctggagtgcagtggtatgatctcagctcactgcaagctccacctcccgggttcacgccattctcctgcctcagcctcctgagtagctgggactacaggcgcccgccaccacacccggctaattttttgtattttttgtagagacggggtttcaccatgttagccaagatggtctcgatctcctgacctcgtgatccacctgcctcggcctcccaaagtgctgggattacgggtgtgagccaccgtgcccagcctttttttttttaatagaaaaaataatccgactcccactacatcaagactaatcttgttttgtgtgtttttcacatgtattatagaatgcttttgcatggactatcctcttgtttttattaaaaacaaatgatttttttaaaagtcacaaaaacaattcactaaaaataaatatgtcattgtgctttaaaaaaataacctcttgtagttataaaataaaacgtttgacttctaaactctg

SEQ ID NO: 3291 - protein, 264 aa, Homo sapiens
MNIILEILLLLITIIYSYLESLVKFFIPQRRKSVAGEIVLITGAGHGIGRQTTYEFAKRQSILVLWDINKVKKEVGDVTIVVNNAGTVYPADLLSTKDEEITKTFEVNILGHFWITKALLPSMMERNHGHIVTVASVCGHEGIPYLIPYCSSKFAAVGFHRGLTSELQALGKTGIKTSCLCPVFVNTGFTKNPSTRLWPVLETDEVVRSLIDGILTNKKMIFVPSYINIFLRLQKFLPERASAILNRMQNIQFEAVVGHKIKMK

SEQ ID NO: 3292 - DNA, 2397 bp, Homo sapiens
agacagtacctcctccctaggactacacaaggactgaaccagaaggaagaggacagagcaaagccatgaacatcatcctagaaatccttctgcttctgatcaccatcatctactcctacttggagtcgttggtgaagtttttcattcctcagaggagaaaatctgtggctggggagattgttctcattactggagctgggcatggaataggcaggcagactacttatgaatttgcaaaacgacagagcatattggttctgtgggatattaataagcgcggtgtggaggaaactgcagctgagtgccgaaaactaggcgtcactgcgcatgcgtatgtggtagactgcagcaacagagaagagatctatcgctctctaaatcaggtgaagaaagaagtgggtgatgtaacaatcgtggtgaataatgctgggacagtatatccagccgatcttctcagcaccaaggatgaagagattaccaagacatttgaggtcaacatcctaggacatttttggatcacaaaagcacttcttccatcgatgatggagagaaatcatggccacatcgtcacagtggcttcagtgtgcggccacgaagggattccttacctcatcccatattgttccagcaaatttgccgctgttggctttcacagaggtctgacatcagaacttcaggccttgggaaaaactggtatcaaaacctcatgtctctgcccagtttttgtgaatactgggttcaccaaaaatccaagcacaagattatggcctgtattggagacagatgaagtcgtaagaagtctgatagatggaatacttaccaataagaaaatgatttttgttccatcgtatatcaatatctttctgagactacagaagtttcttcctgaacgcgcctcagcgattttaaatcgtatgcagaatattcaatttgaagcagtggttggccacaaaatcaaaatgaaatgaataaataagctccagccagagatgtatgcatgataatgatatgaatagtttcgaatcaatgctgcaaagctttatttcacattttttcagtcctgataatattaaaaacattggtttggcactagcagcagtcaaacgaacaagattaattacctgtcttcctgtttctcaagaatatttacgtagtttttcataggtctgtttttcctttcatgcctcttaaaaacttctgtgcttacataaacatacttaaaaggttttctttaagatattttatttttccatttaaaggtggacaaaagctacctccctaaaagtaaatacaaagagaacttatttacacagggaaggtttaagactgttcaagtagcattccaatctgtagccatgccacagaatatcaacaagaacacagaatgagtgcacagctaagagatcaagtttcagcaggcagctttatctcaacctggacatattttaagattcagcatttgaaagatttccctagcctcttcctttttcattagcccaaaacggtgcaactctattctggactttattacttgattctgtcttctgtataactctgaagtccaccaaaagtggaccctctatatttcctccctttttatagtcttataagatacattatgaaaggtgaccgactctattttaaatctcagaattttaagttctagccccatgataacctttttctttgtaatttatgctttcatatatccttggtcccagagatgtttagacaattttaggctcaaaaattaaagctaacacaggaaaaggaactgtactggctattacataagaaacaatggacccaagagaagaaaaggaagaaagaaaggttttttggtttttgttttgttttgttttgttttttgtttttttgagatggagtctcactctttcgcccaggctggagtgcagtggtatgatctcagctcactgcaagctccacctcccgggttcacgccattctcctgcctcagcctcctgagtagctgggactacaggcgcccgccaccacacccggctaattttttgtattttttgtagagacggggtttcaccatgttagccaagatggtctcgatctcctgacctcgtgatccacctgcctcggcctcccaaagtgctgggattacgggtgtgagccaccgtgcccagcctttttttttttaatagaaaaaataatccgactcccactacatcaagactaatcttgttttgtgtgtttttcacatgtattatagaatgcttttgcatggactatcctcttgtttttattaaaaacaaatgatttttttaaaagtcacaaaaacaattcactaaaaataaatatgtcattgtgctttaaaaaaataacctcttgtagttataaaataaaacgtttgacttctaaactctg

SEQ ID NO: 3293 - protein, 300 aa, Homo sapiens
MNIILEILLLLITIIYSYLESLVKFFIPQRRKSVAGEIVLITGAGHGIGRQTTYEFAKRQSILVLWDINKRGVEETAAECRKLGVTAHAYVVDCSNREEIYRSLNQVKKEVGDVTIVVNNAGTVYPADLLSTKDEEITKTFEVNILGHFWITKALLPSMMERNHGHIVTVASVCGHEGIPYLIPYCSSKFAAVGFHRGLTSELQALGKTGIKTSCLCPVFVNTGFTKNPSTRLWPVLETDEVVRSLIDGILTNKKMIFVPSYINIFLRLQKFLPERASAILNRMQNIQFEAVVGHKIKMK

SEQ ID NO: 3294 - DNA, 1266 bp, Homo sapiens
aacctctgcctcccgggttcaagtgattctcctgcctcagcctccccagtagctgggattacagactacaaaggcatttcttcctgcaatgacgaagaataaccatggccatattgtcactgtggcttcggcagctggacatgtctcggtccccttcttactggcttactgttcaagcaagtttgctgctgttggatttcataaaactttgacagatgaactggctgccttacaaataactggagtcaaaacaacatgtctgtgtcctaatttcgtaaacactggcttcatcaaaaatccaagtacaagtttgggacccactctggaacctgaggaagtggtaaacaggctgatgcatgggattctgactgagcagaagatgatttttattccatcttctatagcttttttaacaacattggaaaggatccttcctgagcgtttcctggcagttttaaaacaaaaaatcagtgttaagtttgatgcagttattggatataaaatgaaagcgcaataagcacctagttttctgaaaactgatttaccaggtttaggttgatgtcatctaatagtgccagaattttaatgtttgaacttctgttttttctaattatccccatttcttcaatatcatttttgaggctttggcagtcttcatttactaccacttgttctttagccaaaagctgattacatatgatataaacagagaaatacctttagaggtgactttaaggaaaatgaagaaaaagaaccaaaatgactttattaaaataatttccaagattatttgtggctcacctgaaggctttgcaaaatttgtaccataaccgtttatttaacatatatttttatttttgattgcacttaaattttgtataatttgtgtttctttttctgttctacataaaatcagaaacttcaagctctctaaataaaatgaaggactatatctagtggtatttcacaatgaatatcatgaactctcaatgggtaggtttcatcctacccattgccactctgtttcctgagagatacctcacattccaatgccaaacatttctgcacagggaagctagaggtggatacacgtgttgcaagtataaaagcatcactgggatttaaggagaattgagagaatgtacccacaaatggcagcaataataaatggatcacacttaaacttttggtgtttccatctttttgtcttaaacagaacatgacaaccttcaaattaaaggaaaataaattgtgcaatcttttttt

SEQ ID NO: 3295 - protein, 142 aa, Homo sapiens
MTKNNHGHIVTVASAAGHVSVPFLLAYCSSKFAAVGFHKTLTDELAALQITGVKTTCLCPNFVNTGFIKNPSTSLGPTLEPEEVVNRLMHGILTEQKMIFIPSSIAFLTTLERILPERFLAVLKQKISVKFDAVIGYKMKAQ

SEQ ID NO: 3296 - DNA, 1256 bp, Homo sapiens
agataaagaaaggagttggggaccatccgagtcatcgtctgtgattttataaagactacaaaggcatttcttcctgcaatgacgaagaataaccatggccatattgtcactgtggcttcggcagctggacatgtctcggtccccttcttactggcttactgttcaagcaagtttgctgctgttggatttcataaaactttgacagatgaactggctgccttacaaataactggagtcaaaacaacatgtctgtgtcctaatttcgtaaacactggcttcatcaaaaatccaagtacaagtttgggacccactctggaacctgaggaagtggtaaacaggctgatgcatgggattctgactgagcagaagatgatttttattccatcttctatagcttttttaacaacattggaaaggatccttcctgagcgtttcctggcagttttaaaacaaaaaatcagtgttaagtttgatgcagttattggatataaaatgaaagcgcaataagcacctagttttctgaaaactgatttaccaggtttaggttgatgtcatctaatagtgccagaattttaatgtttgaacttctgttttttctaattatccccatttcttcaatatcatttttgaggctttggcagtcttcatttactaccacttgttctttagccaaaagctgattacatatgatataaacagagaaatacctttagaggtgactttaaggaaaatgaagaaaaagaaccaaaatgactttattaaaataatttccaagattatttgtggctcacctgaaggctttgcaaaatttgtaccataaccgtttatttaacatatatttttatttttgattgcacttaaattttgtataatttgtgtttctttttctgttctacataaaatcagaaacttcaagctctctaaataaaatgaaggactatatctagtggtatttcacaatgaatatcatgaactctcaatgggtaggtttcatcctacccattgccactctgtttcctgagagatacctcacattccaatgccaaacatttctgcacagggaagctagaggtggatacacgtgttgcaagtataaaagcatcactgggatttaaggagaattgagagaatgtacccacaaatggcagcaataataaatggatcacacttaaacttttggtgtttccatctttttgtcttaaacagaacatgacaaccttcaaattaaaggaaaataaattgtgcaatcttttttt

SEQ ID NO: 3297 - protein, 142 aa, Homo sapiens; identical to SEQ ID NO: 3295

SEQ ID NO: 3298 - DNA, 1834 bp, Homo sapiens
aaagaccaacaaagcccagcccagcggaaggaacggtttcggagttgtttttctttgatacgggagttcctccttgctctcgcccctactctttctggtgttagatcgagctaccctctaaaagcagtttagagtggtaaaaaaaaaaaaaaacacaccaaacgctcgcagccacaaaagggatgaaatttcttctggacatcctcctgcttctcccgttactgatcgtctgctccctagagtccttcgtgaagctttttattcctaagaggagaaaatcagtcaccggcgaaatcgtgctgattacaggagctgggcatggaattgggagactgactgcctatgaatttgctaaacttaaaagcaagctggttctctgggatataaataagcatggactggaggaaacagctgccaaatgcaagggactgggtgccaaggttcatacctttgtggtagactgcagcaaccgagaagatatttacagctctgcaaagaaggtgaaggcagaaattggagatgttagtattttagtaaataatgctggtgtagtctatacatcagatttgtttgctacacaagatcctcagattgaaaagacttttgaagttaatgtacttgcacatttctggactacaaaggcatttcttcctgcaatgacgaagaataaccatggccatattgtcactgtggcttcggcagctggacatgtctcggtccccttcttactggcttactgttcaagcaagtttgctgctgttggatttcataaaactttgacagatgaactggctgccttacaaataactggagtcaaaacaacatgtctgtgtcctaatttcgtaaacactggcttcatcaaaaatccaagtacaagtttgggacccactctggaacctgaggaagtggtaaacaggctgatgcatgggattctgactgagcagaagatgatttttattccatcttctatagcttttttaacaacattggaaaggatccttcctgagcgtttcctggcagttttaaaacaaaaaatcagtgttaagtttgatgcagttattggatataaaatgaaagcgcaataagcacctagttttctgaaaactgatttaccaggtttaggttgatgtcatctaatagtgccagaattttaatgtttgaacttctgttttttctaattatccccatttcttcaatatcatttttgaggctttggcagtcttcatttactaccacttgttctttagccaaaagctgattacatatgatataaacagagaaatacctttagaggtgactttaaggaaaatgaagaaaaagaaccaaaatgactttattaaaataatttccaagattatttgtggctcacctgaaggctttgcaaaatttgtaccataaccgtttatttaacatatatttttatttttgattgcacttaaattttgtataatttgtgtttctttttctgttctacataaaatcagaaacttcaagctctctaaataaaatgaaggactatatctagtggtatttcacaatgaatatcatgaactctcaatgggtaggtttcatcctacccattgccactctgtttcctgagagatacctcacattccaatgccaaacatttctgcacagggaagctagaggtggatacacgtgttgcaagtataaaagcatcactgggatttaaggagaattgagagaatgtacccacaaatggcagcaataataaatggatcacacttaaacttttggtgtttccatctttttgtcttaaacagaacatgacaaccttcaaattaaaggaaaataaattgtgcaatcttttttt

SEQ ID NO: 3299 - protein, 300 aa, Homo sapiens
MKFLLDILLLLPLLIVCSLESFVKLFIPKRRKSVTGEIVLITGAGHGIGRLTAYEFAKLKSKLVLWDINKHGLEETAAKCKGLGAKVHTFVVDCSNREDIYSSAKKVKAEIGDVSILVNNAGVVYTSDLFATQDPQIEKTFEVNVLAHFWTTKAFLPAMTKNNHGHIVTVASAAGHVSVPFLLAYCSSKFAAVGFHKTLTDELAALQITGVKTTCLCPNFVNTGFIKNPSTSLGPTLEPEEVVNRLMHGILTEQKMIFIPSSIAFLTTLERILPERFLAVLKQKISVKFDAVIGYKMKAQ

SEQ ID NO: 3300 - DNA, 1180 bp, Homo sapiens
aacctctgcctcccgggttcaagtgattctcctgcctcagcctccccagtagctgggattacagactacaaaggcatttcttcctgcaatgacgaagaataaccatggccatattgtcactgtggcttcggcagctggacatgtctcggtccccttcttactggcttactgttcaagcaagtttgctgctgttggatttcataaaactttgacagatgaactggctgccttacaaataactggagtcaaaacaacatgtctgtgtcctaatttcgtaaacactggcttcatcaaaaatccaagtacaagtttgggacccactctggaacctgaggaagtggtaaacaggctgatgcatgggattctgactgagcagaagatgatttttattccatcttctatagcttttttaacaacattggaaaggatccttcctgagcgtttcctggcagttttaaaacaaaaaatcagtgttaagtttgatgcagttattggatataaaatgaaagcgcaataagcacctagttttctgaaaactgatttaccaggtttaggttgatgtcatctaatagtgccagaattttaatgtttgaacttctgttttttctaattatccccatttcttcaatatcatttttgaggctttggcagtcttcatttactaccacttgttctttagccaaaagctgattacatatgatataaacagagaaatacctttagaggtgactttaaggaaaatgaagaaaaagaaccaaaatgactttattaaaataatttccaagattatttgtggctcacctgaaggctttgcaaaatttgtaccataaccgtttatttaacatatatttttatttttgattgcacttaaattttgtataatttgtgtttctttttctgttctacataaaatcagaaacttcaagctctctaaataaaatgaaggactatatctagtggtatttcacaatgaatatcatgaactctcaatgggtaggtttcatcctacccattgccactctgtttcctgagagatacctcacattccaatgccaaacatttctgcacagggaagctagaggtggatacacgtgttgcaagtataaaagcatcactgggatttaaggagaattgagagaatgtacccacaaatggcagcaataataaatggatcacactt

SEQ ID NO: 3301 - protein, 142 aa, Homo sapiens; identical to SEQ ID NO: 3295

SEQ ID NO: 3302 - DNA, 1170 bp, Homo sapiens
agataaagaaaggagttggggaccatccgagtcatcgtctgtgattttataaagactacaaaggcatttcttcctgcaatgacgaagaataaccatggccatattgtcactgtggcttcggcagctggacatgtctcggtccccttcttactggcttactgttcaagcaagtttgctgctgttggatttcataaaactttgacagatgaactggctgccttacaaataactggagtcaaaacaacatgtctgtgtcctaatttcgtaaacactggcttcatcaaaaatccaagtacaagtttgggacccactctggaacctgaggaagtggtaaacaggctgatgcatgggattctgactgagcagaagatgatttttattccatcttctatagcttttttaacaacattggaaaggatccttcctgagcgtttcctggcagttttaaaacaaaaaatcagtgttaagtttgatgcagttattggatataaaatgaaagcgcaataagcacctagttttctgaaaactgatttaccaggtttaggttgatgtcatctaatagtgccagaattttaatgtttgaacttctgttttttctaattatccccatttcttcaatatcatttttgaggctttggcagtcttcatttactaccacttgttctttagccaaaagctgattacatatgatataaacagagaaatacctttagaggtgactttaaggaaaatgaagaaaaagaaccaaaatgactttattaaaataatttccaagattatttgtggctcacctgaaggctttgcaaaatttgtaccataaccgtttatttaacatatatttttatttttgattgcacttaaattttgtataatttgtgtttctttttctgttctacataaaatcagaaacttcaagctctctaaataaaatgaaggactatatctagtggtatttcacaatgaatatcatgaactctcaatgggtaggtttcatcctacccattgccactctgtttcctgagagatacctcacattccaatgccaaacatttctgcacagggaagctagaggtggatacacgtgttgcaagtataaaagcatcactgggatttaaggagaattgagagaatgtacccacaaatggcagcaataataaatggatcacactt

SEQ ID NO: 3303 - protein, 142 aa, Homo sapiens; identical to SEQ ID NO: 3295

SEQ ID NO: 3304 - DNA, 1748 bp, Homo sapiens
aaagaccaacaaagcccagcccagcggaaggaacggtttcggagttgtttttctttgatacgggagttcctccttgctctcgcccctactctttctggtgttagatcgagctaccctctaaaagcagtttagagtggtaaaaaaaaaaaaaaacacaccaaacgctcgcagccacaaaagggatgaaatttcttctggacatcctcctgcttctcccgttactgatcgtctgctccctagagtccttcgtgaagctttttattcctaagaggagaaaatcagtcaccggcgaaatcgtgctgattacaggagctgggcatggaattgggagactgactgcctatgaatttgctaaacttaaaagcaagctggttctctgggatataaataagcatggactggaggaaacagctgccaaatgcaagggactgggtgccaaggttcatacctttgtggtagactgcagcaaccgagaagatatttacagctctgcaaagaaggtgaaggcagaaattggagatgttagtattttagtaaataatgctggtgtagtctatacatcagatttgtttgctacacaagatcctcagattgaaaagacttttgaagttaatgtacttgcacatttctggactacaaaggcatttcttcctgcaatgacgaagaataaccatggccatattgtcactgtggcttcggcagctggacatgtctcggtccccttcttactggcttactgttcaagcaagtttgctgctgttggatttcataaaactttgacagatgaactggctgccttacaaataactggagtcaaaacaacatgtctgtgtcctaatttcgtaaacactggcttcatcaaaaatccaagtacaagtttgggacccactctggaacctgaggaagtggtaaacaggctgatgcatgggattctgactgagcagaagatgatttttattccatcttctatagcttttttaacaacattggaaaggatccttcctgagcgtttcctggcagttttaaaacaaaaaatcagtgttaagtttgatgcagttattggatataaaatgaaagcgcaataagcacctagttttctgaaaactgatttaccaggtttaggttgatgtcatctaatagtgccagaattttaatgtttgaacttctgttttttctaattatccccatttcttcaatatcatttttgaggctttggcagtcttcatttactaccacttgttctttagccaaaagctgattacatatgatataaacagagaaatacctttagaggtgactttaaggaaaatgaagaaaaagaaccaaaatgactttattaaaataatttccaagattatttgtggctcacctgaaggctttgcaaaatttgtaccataaccgtttatttaacatatatttttatttttgattgcacttaaattttgtataatttgtgtttctttttctgttctacataaaatcagaaacttcaagctctctaaataaaatgaaggactatatctagtggtatttcacaatgaatatcatgaactctcaatgggtaggtttcatcctacccattgccactctgtttcctgagagatacctcacattccaatgccaaacatttctgcacagggaagctagaggtggatacacgtgttgcaagtataaaagcatcactgggatttaaggagaattgagagaatgtacccacaaatggcagcaataataaatggatcacactt

SEQ ID NO: 3305 - protein, 300 aa, Homo sapiens; identical to SEQ ID NO: 3299

SEQ ID NO: 3306 - DNA, 951 bp, Homo sapiens
aacctctgcctcccgggttcaagtgattctcctgcctcagcctccccagtagctgggattacagactacaaaggcatttcttcctgcaatgacgaagaataaccatggccatattgtcactgtggcttcggcagctggacatgtctcggtccccttcttactggcttactgttcaagcaagtttgctgctgttggatttcataaaactttgacagatgaactggctgccttacaaataactggagtcaaaacaacatgtctgtgtcctaatttcgtaaacactggcttcatcaaaaatccaagtacaagtttgggacccactctggaacctgaggaagtggtaaacaggctgatgcatgggattctgactgagcagaagatgatttttattccatcttctatagcttttttaacaacattggaaaggatccttcctgagcgtttcctggcagttttaaaacaaaaaatcagtgttaagtttgatgcagttattggatataaaatgaaagcgcaataagcacctagttttctgaaaactgatttaccaggtttaggttgatgtcatctaatagtgccagaattttaatgtttgaacttctgttttttctaattatccccatttcttcaatatcatttttgaggctttggcagtcttcatttactaccacttgttctttagccaaaagctgattacatatgatataaacagagaaatacctttagaggtgactttaaggaaaatgaagaaaaagaaccaaaatgactttattaaaataatttccaagattatttgtggctcacctgaaggctttgcaaaatttgtaccataaccgtttatttaacatatatttttatttttgattgcacttaaattttgtataatttgtgtttctttttctgttctacataaaatcagaaacttcaagctctctaaataaaatgaaggactat

SEQ ID NO: 3307 - protein, 142 aa, Homo sapiens; identical to SEQ ID NO: 3295

SEQ ID NO: 3308 - DNA, 941 bp, Homo sapiens
agataaagaaaggagttggggaccatccgagtcatcgtctgtgattttataaagactacaaaggcatttcttcctgcaatgacgaagaataaccatggccatattgtcactgtggcttcggcagctggacatgtctcggtccccttcttactggcttactgttcaagcaagtttgctgctgttggatttcataaaactttgacagatgaactggctgccttacaaataactggagtcaaaacaacatgtctgtgtcctaatttcgtaaacactggcttcatcaaaaatccaagtacaagtttgggacccactctggaacctgaggaagtggtaaacaggctgatgcatgggattctgactgagcagaagatgatttttattccatcttctatagcttttttaacaacattggaaaggatccttcctgagcgtttcctggcagttttaaaacaaaaaatcagtgttaagtttgatgcagttattggatataaaatgaaagcgcaataagcacctagttttctgaaaactgatttaccaggtttaggttgatgtcatctaatagtgccagaattttaatgtttgaacttctgttttttctaattatccccatttcttcaatatcatttttgaggctttggcagtcttcatttactaccacttgttctttagccaaaagctgattacatatgatataaacagagaaatacctttagaggtgactttaaggaaaatgaagaaaaagaaccaaaatgactttattaaaataatttccaagattatttgtggctcacctgaaggctttgcaaaatttgtaccataaccgtttatttaacatatatttttatttttgattgcacttaaattttgtataatttgtgtttctttttctgttctacataaaatcagaaacttcaagctctctaaataaaatgaaggactat

SEQ ID NO: 3309 - protein, 142 aa, Homo sapiens; identical to SEQ ID NO: 3295

SEQ ID NO: 3310 - DNA, 1519 bp, Homo sapiens
aaagaccaacaaagcccagcccagcggaaggaacggtttcggagttgtttttctttgatacgggagttcctccttgctctcgcccctactctttctggtgttagatcgagctaccctctaaaagcagtttagagtggtaaaaaaaaaaaaaaacacaccaaacgctcgcagccacaaaagggatgaaatttcttctggacatcctcctgcttctcccgttactgatcgtctgctccctagagtccttcgtgaagctttttattcctaagaggagaaaatcagtcaccggcgaaatcgtgctgattacaggagctgggcatggaattgggagactgactgcctatgaatttgctaaacttaaaagcaagctggttctctgggatataaataagcatggactggaggaaacagctgccaaatgcaagggactgggtgccaaggttcatacctttgtggtagactgcagcaaccgagaagatatttacagctctgcaaagaaggtgaaggcagaaattggagatgttagtattttagtaaataatgctggtgtagtctatacatcagatttgtttgctacacaagatcctcagattgaaaagacttttgaagttaatgtacttgcacatttctggactacaaaggcatttcttcctgcaatgacgaagaataaccatggccatattgtcactgtggcttcggcagctggacatgtctcggtccccttcttactggcttactgttcaagcaagtttgctgctgttggatttcataaaactttgacagatgaactggctgccttacaaataactggagtcaaaacaacatgtctgtgtcctaatttcgtaaacactggcttcatcaaaaatccaagtacaagtttgggacccactctggaacctgaggaagtggtaaacaggctgatgcatgggattctgactgagcagaagatgatttttattccatcttctatagcttttttaacaacattggaaaggatccttcctgagcgtttcctggcagttttaaaacaaaaaatcagtgttaagtttgatgcagttattggatataaaatgaaagcgcaataagcacctagttttctgaaaactgatttaccaggtttaggttgatgtcatctaatagtgccagaattttaatgtttgaacttctgttttttctaattatccccatttcttcaatatcatttttgaggctttggcagtcttcatttactaccacttgttctttagccaaaagctgattacatatgatataaacagagaaatacctttagaggtgactttaaggaaaatgaagaaaaagaaccaaaatgactttattaaaataatttccaagattatttgtggctcacctgaaggctttgcaaaatttgtaccataaccgtttatttaacatatatttttatttttgattgcacttaaattttgtataatttgtgtttctttttctgttctacataaaatcagaaacttcaagctctctaaataaaatgaaggactat

SEQ ID NO: 3311 - protein, 300 aa, Homo sapiens; identical to SEQ ID NO: 3299

SEQ ID NO: 3312 - DNA, 802 bp, Homo sapiens
aagaccaacaaagcccagcccagcggaaggaacggtttcggagttgtttttctttgatacgggagttcctccttgctctcgcccctactctttctggtgttagatcgagctaccctctaaaagcagtttagagtggtaaaaaaaaaaaaaaacacaccaaacgctcgcagccacaaaagggatgaaatttcttctggacatcctcctgcttctcccgttactgatcgtctgctccctagagtccttcgtgaagctttttattcctaagaggagaaaatcagtcaccggcgaaatcgtgctgattacaggagctgggcatggaattgggagactgactgcctatgaatttgctaaacttaaaagcaagctggttctctgggatataaataagcatggactggaggaaacagctgccaaatgcaagggactgggtgccaaggttcatacctttgtggtagactgcagcaaccgagaagatatttacagctctgcaaagaaggtgaaggcagaaattggagatgttagtattttagtaaataatgctggtgtagtctatacatcagatttgtttgctacacaagatcctcagattgaaaagacttttgaagttaatgtacttgcacatttctggactacaaaggcatttcttcctgcaatgacgaagaataaccatggccatattgtcactgtggcttcggcagctggacatgtctcggtccccttcttactggcttactggtgcagtggctcacacctgtatatcccaacactttgggaggccaagatgggtggatcacctgag

SEQ ID NO: 3313 - protein, 206 aa, Homo sapiens
MKFLLDILLLLPLLIVCSLESFVKLFIPKRRKSVTGEIVLITGAGHGIGRLTAYEFAKLKSKLVLWDINKHGLEETAAKCKGLGAKVHTFVVDCSNREDIYSSAKKVKAEIGDVSILVNNAGVVYTSDLFATQDPQIEKTFEVNVLAHFWTTKAFLPAMTKNNHGHIVTVASAAGHVSVPFLLAYWCSGSHLYIPTLWEAKMGGSP

SEQ ID NO: 3314 - DNA, 820 bp, Homo sapiens
tggtgtaaaagacaatcgcggccacacaccgcgtgggggctgcgcaaagcagaactaggaagctttgctccggtctggacttcgtccctcccagatctctgagctagcaagcactgcagcccgagccaattgcgaaagaccaacaaagcccagcccagcggaaggaacggtttcggagttgtttttctttgatacgggagttcctccttgctctcgcccctactctttctggtgttagatcgagctaccctctaaaagcagtttagagtggtaaaaaaaaaaaaaaacacaccaaacgctcgcagccacaaaagggatgaaatttcttctggacatcctcctgcttctcccgttactgatcgtctgctccctagagtccttcgtgaagctttttattcctaagaggagaaaatcagtcaccggcgaaatcgtgctgattacaggagctgggcatggaattgggagactgactgcctatgaatttgctaaacttaaaagcaagctggttctctgggatataaataagcatggactggaggaaacagctgccaaatgcaagggactgggtgccaaggttcatacctttgtggtagactgcagcaaccgagaagatatttacagctctgcaaagaaggtgaaggcagaaattggagatgttagtattttagtaaataatgctggtgtagtctatacatcagatttgtttgctacacaagatcctcaggcatttcttcctgcaatgacgaagaataaccatggccatattgtcactgtggcttcggcagctggacatgtctcggtccccttcttactggcttac

SEQ ID NO: 3315 - protein, 167 aa, Homo sapiens
MKFLLDILLLLPLLIVCSLESFVKLFIPKRRKSVTGEIVLITGAGHGIGRLTAYEFAKLKSKLVLWDINKHGLEETAAKCKGLGAKVHTFVVDCSNREDIYSSAKKVKAEIGDVSILVNNAGVVYTSDLFATQDPQAFLPAMTKNNHGHIVTVASAAGHVSVPFLLA

SEQ ID NO: 3316 - DNA, 371 bp, Homo sapiens
tctttgcagagctgtaaatatcttctcggttgctgcagtctaccacaaaggtatgaaccttggcacccagtcccttgcatttggcagcttttagcaaattcataggcagtcagtctcccaattccatgcccagctcctgtaatcagcacgatttcgccggtgactgattttctcctcttaggaataaaaagcttcacgaaggactctagggagcagacgatcagtaacgggagaagcaggaggatgtccagaagaaatttcatcccttttgtggctgcgagcgtttggtgtgtttttttttttttttaccactctaaactgcttttagagggtagctcgatctaacaccagaaagagtaggggcgagagca

SEQ ID NO: 3317 - protein, 33 aa, Homo sapiens
MSRRNFIPFVAASVWCVFFFFYHSKLLLEGSSI

SEQ ID NO: 3318 - DNA, 1701 bp, Homo sapiens
ccgtaaagcgccattacgcagagagaaagttacgaggttcgtggccgcggtttccccaggcagctggcgctggaggcttcggcgtcacgtgctggtctggatttttctcgatgcactggggaaagcggtggactcttatcgtgggagggctcttgatctgtgatttatagataggcacagctactcccgttcgggaacccaacggcagacaggtcctagtgcccatcagatacccgcggccgggactcggagctgtggggtgtggggaggcggaggcaccaactaagagcgacctagcatcgcaaagccgccctcggggcgctcatggcgggacgcctcctgggaaaggctttagccgcggtgtctctctctctggccttggcctctgtgactatcaggtcctcgcgctgccgcggcatccaggcgttcagaaactcgttttcatcttcttggtttcatcttaataccaacgtcatgtctggttctaatggttccaaagaaaattctcacaataaggctcggacgtctccttacccaggttcaaaagttgaacgaagccaggttcctaatgagaaagtgggctggcttgttgagtggcaagactataagcctgtggaatacactgcagtctctgtcttggctggacccaggtgggcagatcctcagatcagtgaaagtaatttttctcccaagtttaacgaaaaggatgggcatgttgagagaaagagcaagaatggcctgtatgagattgaaaatggaagaccgagaaatcctgcaggacggactggactggtgggccgggggcttttggggcgatggggcccaaatcacgctgcagatcccattataaccagatggaaaagggatagcagtggaaataaaatcatgcatcctgtttctgggaagcatatcttacaatttgttgcaataaaaaggaaagactgtggagaatgggcaatcccaggggggatggtggatccaggagagaagattagtgccacactgaaaagagaatttggtgaggaagctctcaactccttacagaaaaccagtgctgagaagagagaaatagaggaaaagttgcacaaactcttcagccaagaccacctagtgatatataagggatatgttgatgatcctcgaaacactgataatgcatggatggagacagaagctgtgaactaccatgacgaaacaggtgagataatggataatcttatgctagaagctggagatgatgctggaaaagtgaaatgggtggacatcaatgataaactgaagctttatgccagtcactctcaattcatcaaacttgtggctgagaaacgagatgcacactggagcgaggactctgaagctgactgccatgcgttgtagctgatggtctccgtgtaagccaaaggcccacagaggagcatatactgaaaagaaggcagtatcacagaatttatactataaaaagggcagggtaggccacttggcctatttactttcaaaacaatttgcatttagagtgtttcgcatcagaataacatgagtaagatgaactggaacacaaaattttcagctctttggtcaaaaggaatataagtaatcatattttgtatgtattcgatttaagcatggcttaaattaaatttaaacaactaatgctctttgaagaatcataatcagaataaagataaattcttgatcagctat

SEQ ID NO: 3319 - protein, 350 aa, Homo sapiens; identical to SEQ ID NO: 330

SEQ ID NO: 3320 - DNA, 2810 bp, Homo sapiens
ccgtaaagcgccattacgcagagagaaagttacgaggttcgtggccgcggtttccccaggcagctggcgctggaggcttcggcgtcacgtgctggtctggatttttctcgatgcactggggaaagcggtggactcttatcgtgggagggctcttgatctgtgatttatagataggcacagctactcccgttcgggaacccaacggcagacaggtcctagtgcccatcagatacccgcggccgggactcggagctgtggggtgtggggaggcggaggcaccaactaagagcgacctagcatcgcaaagccgccctcggggcgctcatggcgggacgcctcctgggaaaggctttagccgcggtgtctctctctctggccttggcctctgtgactatcaggtcctcgcgctgccgcggcatccaggcgttcagaaactcgttttcatcttcttggtttcatcttaataccaacgtcatgtctggttctaatggttccaaagaaaattctcacaataaggctcggacgtctccttacccaggttcaaaagttgaacgaagccaggttcctaatgagaaagtgggctggcttgttgagtggcaagactataagcctgtggaatacactgcagtctctgtcttggctggacccaggtgggcagatcctcagatcagtgaaagtaatttttctcccaagtttaacgaaaaggatgggcatgttgagagaaagagcaagaatggcctgtatgagattgaaaatggaagaccgagaaatcctgcaggacggactggactggtgggccgggggcttttggggcgatggggcccaaatcacgctgcagatcccattataaccagatggaaaagggatagcagtggaaataaaatcatgcatcctgtttctgggaagcatatcttacaatttgttgcaataaaaaggaaagactgtggagaatgggcaatcccaggggggatggtggatccaggagagaagattagtgccacactgaaaagagaatttggtgaggaagctctcaactccttacagaaaaccagtgctgagaagagagaaatagaggaaaagttgcacaaactcttcagccaagaccacctagtgatatataagggatatgttgatgatcctcgaaacactgataatgcatggatggagacagaagctgtgaactaccatgacgaaacaggtgagataatggataatcttatgctagaagctggagatgatgctggaaaagtgaaatgggtggacatcaatgataaactgaagctttatgccagtcactctcaattcatcaaacttgtggctgagaaacgagatgcacactggagcgaggactctgaagctgactgccatgcgttgtagctgatggtctccgtgtaagccaaaggcccacagaggagcatatactgaaaagaaggcagtatcacagaatttatactataaaaagggcagggtaggccacttggcctatttactttcaaaacaatttgcatttagagtgtttcgcatcagaataacatgagtaagatgaactggaacacaaaattttcagctctttggtcaaaaggaatataagtaatcatattttgtatgtattcgatttaagcatggcttaaattaaatttaaacaactaatgctctttgaagaatcataatcagaataaagataaattcttgatcagctataacttctgtttcatctagttcttgtttgtcaatgccttccctcccgctccccatcttctgaggcctgaaggatgttcctgccacatcaaactcctttaggcagagtaccgccactggatgtatagtttaatgtttcatctgatttttctttaaattatttccttcacattttgcttcacatgatcttgttgaagctaattttgaaaatggaaactatgttttcttgactttagaagcattagttttaagaggaaatttcagccactagtcaatagagatcaaaatcagtgaacaagagctgatactctcattttcaaaaattctgaattaaaaaaagtccaggaagttagtaatttaaatcagtatgttcatttcactctagtgaaactactatatgttgtaaattagttaaaaatggatgttcagaaaagaattgaaatcaggacaaaaaattacagatgctagtgaggttgtagagaaaaaggaatgcttatacgctgttagtgggagtgtaaattggtccaaccattgtggaagagagtgtagagagtcctcaaatatttaaagatatttgacccagtaatcccattactaggtatatacccgaaggaatataaattgttctattataaacacatactcacgtgtatgttcattgctgcactattcacaatagcgaagacatgaaatcaacctaaatgttcatcagtgatagactggataaagacaatgtggtatatgtacaccatggaatactatgcagccgtaaaaaagaataagatcatgtcctctgaaaagacatgggtggagctggaggccattatccttagcaaactaatgcaagaacagaaaaccaaacactgcatgttctcttataagtgagagctaaatggtgagaacacatggacatgggaacaacacattctggggtctattggagggtgggaggagggagaggatcaggaaaaataactaatgagtactaggcttaataccttggtgatgaaattatctgtacaacaaaccctcatgacacaagtttacctatgtaacaaacctgcacatgtacccctgtacttaacaacaaaataaacacaaaggaaaatgtt

SEQ ID NO: 3321 - protein, 350 aa, Homo sapiens; identical to SEQ ID NO: 330

SEQ ID NO: 3322 - DNA, 1363 bp, Homo sapiens
cgtaaagcgccattacgcagagagaaagttacgaggttcgtggccgcggtttccccaggcagctggcgctggaggcttcggcgtcacgtgctgaaactcgttttcatcttcttggtttcatcttaataccaacgtcatgtctggttctaatggttccaaagaaaattctcacaataaggctcggacgtctccttacccaggttcaaaagttgaacgaagccaggttcctaatgagaaagtgggctggcttgttgagtggcaagactataagcctgtggaatacactgcagtctctgtcttggctggacccaggtgggcagatcctcagatcagtgaaagtaatttttctcccaagtttaacgaaaaggatgggcatgttgagagaaagagcaagaatggcctgtatgagattgaaaatggaagaccgagaaatcctgcaggacggactggactggtgggccgggggcttttggggcgatggggcccaaatcacgctgcagatcccattataaccagatggaaaagggatagcagtggaaataaaatcatgcatcctgtttctgggaagcatatcttacaatttgttgcaataaaaaggaaagactgtggagaatgggcaatcccaggggggatggtggatccaggagagaagattagtgccacactgaaaagagaatttggtgaggaagctctcaactccttacagaaaaccagtgctgagaagagagaaatagaggaaaagttgcacaaactcttcagccaagaccacctagtgatatataagggatatgttgatgatcctcgaaacactgataatgcatggatggagacagaagctgtgaactaccatgacgaaacaggtgagataatggataatcttatgctagaagctggagatgatgctggaaaagtgaaatgggtggacatcaatgataaactgaagctttatgccagtcactctcaattcatcaaacttgtggctgagaaacgagatgcacactggagcgaggactctgaagctgactgccatgcgttgtagctgatggtctccgtgtaagccaaaggcccacagaggagcatatactgaaaagaaggcagtatcacagaatttatactataaaaagggcagggtaggccacttggcctatttactttcaaaacaatttgcatttagagtgtttcgcatcagaataacatgagtaagatgaactggaacacaaaattttcagctctttggtcaaaaggaatataagtaatcatattttgtatgtattcgatttaagcatggcttaaattaaatttaaacaactaatgctctttgaagaatcataatcagaataaagataaattcttgatcagctat

SEQ ID NO: 3323 - protein, 300 aa, Homo sapiens; identical to SEQ ID NO: 332

SEQ ID NO: 3324 - DNA, 2456 bp, Homo sapiens
gcagagagaaagttacgaggttcgtggccgcggtttccccaggcagctggcgctggaggcttcggcgtcacgtgctgaaactcgttttcatcttcttggtttcatcttaataccaacgtcatgtctggttctaatggttccaaagaaaattctcacaataaggctcggacgtctccttacccaggttcaaaagttgaacgaagccaggttcctaatgagaaagtgggctggcttgttgagtggcaagactataagcctgtggaatacactgcagtctctgtcttggctggacccaggtgggcagatcctcagatcagtgaaagtaatttttctcccaagtttaacgaaaaggatgggcatgttgagagaaagagcaagaatggcctgtatgagattgaaaatggaagaccgagaaatcctgcaggacggactggactggtgggccgggggcttttggggcgatggggcccaaatcacgctgcagatcccattataaccagatggaaaagggatagcagtggaaataaaatcatgcatcctgtttctgggaagcatatcttacaatttgttgcaataaaaaggaaagactgtggagaatgggcaatcccaggggggatggtggatccaggagagaagattagtgccacactgaaaagagaatttggtgaggaagctctcaactccttacagaaaaccagtgctgagaagagagaaatagaggaaaagttgcacaaactcttcagccaagaccacctagtgatatataagggatatgttgatgatcctcgaaacactgataatgcatggatggagacagaagctgtgaactaccatgacgaaacaggtgagataatggataatcttatgctagaagctggagatgatgctggaaaagtgaaatgggtggacatcaatgataaactgaagctttatgccagtcactctcaattcatcaaacttgtggctgagaaacgagatgcacactggagcgaggactctgaagctgactgccatgcgttgtagctgatggtctccgtgtaagccaaaggcccacagaggagcatatactgaaaagaaggcagtatcacagaatttatactataaaaagggcagggtaggccacttggcctatttactttcaaaacaatttgcatttagagtgtttcgcatcagaataacatgagtaagatgaactggaacacaaaattttcagctctttggtcaaaaggaatataagtaatcatattttgtatgtattcgatttaagcatggcttaaattaaatttaaacaactaatgctctttgaagaatcataatcagaataaagataaattcttgatcagctataacttctgtttcatctagttcttgtttgtcaatgccttccctcccgctccccatcttctgaggcctgaaggatgttcctgccacatcaaactcctttaggcagagtaccgccactggatgtatagtttaatgtttcatctgatttttctttaaattatttccttcacattttgcttcacatgatcttgttgaagctaattttgaaaatggaaactatgttttcttgactttagaagcattagttttaagaggaaatttcagccactagtcaatagagatcaaaatcagtgaacaagagctgatactctcattttcaaaaattctgaattaaaaaaagtccaggaagttagtaatttaaatcagtatgttcatttcactctagtgaaactactatatgttgtaaattagttaaaaatggatgttcagaaaagaattgaaatcaggacaaaaaattacagatgctagtgaggttgtagagaaaaaggaatgcttatacgctgttagtgggagtgtaaattggtccaaccattgtggaagagagtgtagagagtcctcaaatatttaaagatatttgacccagtaatcccattactaggtatatacccgaaggaatataaattgttctattataaacacatactcacgtgtatgttcattgctgcactattcacaatagcgaagacatgaaatcaacctaaatgttcatcagtgatagactggataaagacaatgtggtatatgtacaccatggaatactatgcagccgtaaaaaagaataagatcatgtcctctgaaaagacatgggtggagctggaggccattatccttagcaaactaatgcaagaacagaaaaccaaacactgcatgttctcttataagtgagagctaaatggtgagaacacatggacatgggaacaacacattctggggtctattggagggtgggaggagggagaggatcaggaaaaataactaatgagtactaggcttaataccttggtgatgaaattatctgtacaacaaaccctcatgacacaagtttacctatgtaacaaacctgcacatgtacccctgtacttaacaacaaaataaacacaaaggaaaatgtt

SEQ ID NO: 3325 - protein, 300 aa, Homo sapiens; identical to SEQ ID NO: 332

SEQ ID NO: 3326 - DNA, 603 bp, Homo sapiens
tattttccaacatagctagacttgtgaaaatatttttcggaaaattctccaggttactaagaacaggatgatgataaaccagtgtgaaaaaatagaaaagggttggataaaggggagtgagagggggagaatgagagagaaggggctctcactaaattcatagaagtgccgcattgattaacattttatgtttatgtttcttttttattttccagctttattgatatatgattgacaagtaactatatatatttaaggtgtacaatgtgatattttgacatacatatacattgtgaagtgattacaacaatcaagccatttaaaataatcttacatggttaccttttttgtgtgtgtagtgagaagagttgagatccactctcagcgagtttcaagtatacaatactgtattattactatttttgagactggtgctctctctctctgtcacccaggctggagtacagtgatgtgatcacagcttgctccaaccttgaactcctgggctcaggagagtcgcttgaatctgggtgttagaggttgcagtgaaccaagataatgctacagcattccagcctgggtgacagaacgagactccatctc

SEQ ID NO: 3327 - protein, 46 aa, Homo sapiens
MVTFFVCVVRRVEIHSQRVSSIQYCIITIFETGALSLCHPGWSTVM

SEQ ID NO: 3328 - DNA, 489 bp, Homo sapiens
aagtgcttatttagtaccttttaccatttcaaatacttagactatctgaggccaagtgggagagattaagctctatgctgtaaacagttaaggattcaatttatcagcatttaacagttccacattattttccacctccaacatacatgattataccaatattaacacatcagcaataaaataaccataaaatgggaggcatgggtgaagaaggaattgtggtgaaaatatcttcatataaattataactataatctgtattatctattttgacagaaataattctcccactactatgccagaagttacgtatgatggtgctggatatttacagttatcagaagagtatctacttctatcttaactatagttgatggtagttttataattttgcatactttgtgcatgttccagtgaaaactccaaaaaaccataaagaatgtatctagaccatgggctttagtcatactttaaataaacctttaatat

SEQ ID NO: 3329 - protein, 30 aa, Homo sapiens
GFNLSAFNSSTLFSTSNIHDYTNINTSAIK

SEQ ID NO: 3330 - DNA, 2777 bp, Homo sapiens
gagaacaagagcttgaggggaagactgttaaccccatccacgccaccagaattagctctttcccttttggtttgcaagcactgcctgtaaagccctcgcatgagaggccagcctgctagggaaatccaggaatctgcaacaaaaacgatgacagtctgaaatactctctggtgccaacctccaaattctcgtctgtcacttcagacccccactagttgacagagcagcagaatttcaactccagtagacttgaatatgcctctgggcaaagaagcagagctaacgaggaaagggatttaaagagtttttcttgggtgtttgtcaaacttttattccctgtctgtgtgcagaggggattcaacttcaatttttctgcagtggctctgggtccagccccttacttaaagatctggaaagcatgaagactgggctttttttcctatgtctcttgggaactgcagctgcaatcccgacaaatgcaagattattatctgatcattccaaaccaatatccacagaagacgattcccaccataaggctgaaaaatcatcagtactaaagtcaaaagaggaaagccatgaacagtcagcagaacagggcaagagttctagccaagagctgggattgaaggatcaagaggacagtgatggtcacttaagtgtgaatttggagtatgcaccaactgaaggtacattggacataaaagaagatatgagtgagcctcaggagaaaaaactctcagagaacactgattttttggctcctggtgttagttccttcacagattctaaccaacaagaaagtatcacaaagagagaggaaaaccaagaacaacctagaaattattcacatcatcagttgaacaggagcagtaaacatagccaaggcctaagggatcaaggaaaccaagagcaggatccaaatatttccaatggagaagaggaagaagaaaaagagccaggtgaagttggtacccacaatgataaccaagaaagaaagacagaattgcccagggagcatgctaacagcaagcaggaggaagacaatacccaatctgatgatattttggaagagtctgatcaaccaactcaagtaagcaagatgcaggaggatgaatttgatcagggtaaccaagaacaagaagataactccaatgcagaaatggaagaggaaaatgcatcgaacgtcaataagcacattcaagaaactgaatggcagagtcaagagggtaaaactggcctagaagctatcagcaaccacaaagagacagaagaaaagactgtttctgaggctctgctcatggaacctactgatgatggtaataccacgcccagaaatcatggagttgatgatgatggcgatgatgatggcgatgatggcggcactgatggccccaggcacagtgcaagtgatgactacttcatcccaagccaggcctttctggaggccgagagagctcaatccattgcctatcacctcaaaattgaggagcaaagagaaaaagtacatgaaaatgaaaatataggtaccactgagcctggagagcaccaagaggccaagaaagcagagaactcatcaaatgaggaggaaacgtcaagtgaaggcaacatgagggtgcatgctgtggattcttgcatgagcttccagtgtaaaagaggccacatctgtaaggcagaccaacagggaaaacctcactgtgtctgccaggatccagtgacttgtcctccaacaaaaccccttgatcaagtttgtggcactgacaatcagacctatgctagttcctgtcatctattcgctactaaatgcagactggaggggaccaaaaaggggcatcaactccagctggattattttggagcctgcaaatctattcctacttgtacggactttgaagtgattcagtttcctctacggatgagagactggctcaagaatatcctcatgcagctttatgaagccaactctgaacacgctggttatctaaatgagaagcagagaaataaagtcaagaaaatttacctggatgaaaagaggcttttggctggggaccatcccattgatcttctcttaagggactttaagaaaaactaccacatgtatgtgtatcctgtgcactggcagtttagtgaacttgaccaacaccctatggatagagtcttgacacattctgaacttgctcctctgcgagcatctctggtgcccatggaacactgcataacccgtttctttgaggagtgtgaccccaacaaggataagcacatcaccctgaaggagtggggccactgctttggaattaaagaagaggacatagatgaaaatctcttgttttgaacgaagattttaaagaactcaactttccagcatcctcctctgttctaaccacttcagaaatatatgcagctgtgatacttgtagatttatatttagcaaaatgttagcatgtatgacaagacaatgagagtaattgcttgacaacaacctatgcaccaggtatttaacattaactttggaaacaaaaatgtacaattaagtaaagtcaacatatgcaaaatactgtacattgtgaacagaagtttaattcatagtaatttcactctctgcattgacttatgagataattaatgattaaactattaatgataaaaataatgcatttgtattgttcataatatcatgtgcacttcaagaaaatggaatgctactcttttgtggtttacgtgtattattttcaatatcttaataccctaataaagagtccataaaaatccaaatgctt

SEQ ID NO: 3331 - protein, 637 aa, Homo sapiens
MKTGLFFLCLLGTAAAIPTNARLLSDHSKPISTEDDSHHKAEKSSVLKSKEESHEQSAEQGKSSSQELGLKDQEDSDGHLSVNLEYAPTEGTLDIKEDMSEPQEKKLSENTDFLAPGVSSFTDSNQQESITKREENQEQPRNYSHHQLNRSSKHSQGLRDQGNQEQDPNISNGEEEEEKEPGEVGTHNDNQERKTELPREHANSKQEEDNTQSDDILEESDQPTQVSKMQEDEFDQGNQEQEDNSNAEMEEENASNVNKHIQETEWQSQEGKTGLEAISNHKETEEKTVSEALLMEPTDDGNTTPRNHGVDDDGDDDGDDGGTDGPRHSASDDYFIPSQAFLEAERAQSIAYHLKIEEQREKVHENENIGTTEPGEHQEAKKAENSSNEEETSSEGNMRVHAVDSCMSFQCKRGHICKADQQGKPHCVCQDPVTCPPTKPLDQVCGTDNQTYASSCHLFATKCRLEGTKKGHQLQLDYFGACKSIPTCTDFEVIQFPLRMRDWLKNILMQLYEANSEHAGYLNEKQRNKVKKIYLDEKRLLAGDHPIDLLLRDFKKNYHMYVYPVHWQFSELDQHPMDRVLTHSELAPLRASLVPMEHCITRFFEECDPNKDKHITLKEWGHCFGIKEEDIDENLLF

SEQ ID NO: 3332 - DNA, 2861 bp, Homo sapiens
tctgagaacaagagcttgaggggaagactgttaaccccatccacgccaccagaattagctctttcccttttggtttgcaagcactgcctgtaaagccctcgcatgagaggccagcctgctagggaaatccaggaatctgcaacaaaaacgatgacagtctgaaatactctctggtgccaacctccaaattctcgtctgtcacttcagacccccactagttgacagagcagcagaatttcaactccagtagacttgaatatgcctctgggcaaagaagcagagctaacgaggaaagggatttaaagagtttttcttgggtgtttgtcaaacttttattccctgtctgtgtgcagaggggattcaacttcaatttttctgcagtggctctgggtccagccccttacttaaagatctggaaagcatgaagactgggctttttttcctatgtctcttgggaactgcagctgcaatcccgacaaatgcaagattattatctgatcattccaaaccaactgctgaaacggtagcacctgacaacactgcaatccccagtttaagggctgaagctgaagaaaatgaaaaagaaacagcagtatccacagaagacgattcccaccataaggctgaaaaatcatcagtactaaagtcaaaagaggaaagccatgaacagtcagcagaacagggcaagagttctagccaagagctgggattgaaggatcaagaggacagtgatggtcacttaagtgtgaatttggagtatgcaccaactgaaggtacattggacataaaagaagatatgagtgagcctcaggagaaaaaactctcagagaacactgattttttggctcctggtgttagttccttcacagattctaaccaacaagaaagtatcacaaagagagaggaaaaccaagaacaacctagaaattattcacatcatcagttgaacaggagcagtaaacatagccaaggcctaagggatcaaggaaaccaagagcaggatccaaatatttccaatggagaagaggaagaagaaaaagagccaggtgaagttggtacccacaatgataaccaagaaagaaagacagaattgcccagggagcatgctaacagcaagcaggaggaagacaatacccaatctgatgatattttggaagagtctgatcaaccaactcaagtaagcaagatgcaggaggatgaatttgatcagggtaaccaagaacaagaagataactccaatgcagaaatggaagaggaaaatgcatcgaacgtcaataagcacattcaagaaactgaatggcagagtcaagagggtaaaactggcctagaagctatcagcaaccacaaagagacagaagaaaagactgtttctgaggctctgctcatggaacctactgatgatggtaataccacgcccagaaatcatggagttgatgatgatggcgatgatgatggcgatgatggcggcactgatggccccaggcacagtgcaagtgatgactacttcatcccaagccaggcctttctggaggccgagagagctcaatccattgcctatcacctcaaaattgaggagcaaagagaaaaagtacatgaaaatgaaaatataggtaccactgagcctggagagcaccaagaggccaagaaagcagagaactcatcaaatgaggaggaaacgtcaagtgaaggcaacatgagggtgcatgctgtggattcttgcatgagcttccagtgtaaaagaggccacatctgtaaggcagaccaacagggaaaacctcactgtgtctgccaggatccagtgacttgtcctccaacaaaaccccttgatcaagtttgtggcactgacaatcagacctatgctagttcctgtcatctattcgctactaaatgcagactggaggggaccaaaaaggggcatcaactccagctggattattttggagcctgcaaatctattcctacttgtacggactttgaagtgattcagtttcctctacggatgagagactggctcaagaatatcctcatgcagctttatgaagccaactctgaacacgctggttatctaaatgagaagcagagaaataaagtcaagaaaatttacctggatgaaaagaggcttttggctggggaccatcccattgatcttctcttaagggactttaagaaaaactaccacatgtatgtgtatcctgtgcactggcagtttagtgaacttgaccaacaccctatggatagagtcttgacacattctgaacttgctcctctgcgagcatctctggtgcccatggaacactgcataacccgtttctttgaggagtgtgaccccaacaaggataagcacatcaccctgaaggagtggggccactgctttggaattaaagaagaggacatagatgaaaatctcttgttttgaacgaagattttaaagaactcaactttccagcatcctcctctgttctaaccacttcagaaatatatgcagctgtgatacttgtagatttatatttagcaaaatgttagcatgtatgacaagacaatgagagtaattgcttgacaacaacctatgcaccaggtatttaacattaactttggaaacaaaaatgtacaattaagtaaagtcaacatatgcaaaatactgtacattgtgaacagaagtttaattcatagtaatttcactctctgcattgacttatgagataattaatgattaaactattaatgataaaaataatgcatttgtattgttcataatatcatgtgcacttcaagaaaatggaatgctactcttttgtggtttacgtgtattattttcaatatcttaataccctaataaagagtccataaaaatccaaatgctt

SEQ ID NO: 3333 - protein, 664 aa, Homo sapiens
MKTGLFFLCLLGTAAAIPTNARLLSDHSKPTAETVAPDNTAIPSLRAEAEENEKETAVSTEDDSHHKAEKSSVLKSKEESHEQSAEQGKSSSQELGLKDQEDSDGHLSVNLEYAPTEGTLDIKEDMSEPQEKKLSENTDFLAPGVSSFTDSNQQESITKREENQEQPRNYSHHQLNRSSKHSQGLRDQGNQEQDPNISNGEEEEEKEPGEVGTHNDNQERKTELPREHANSKQEEDNTQSDDILEESDQPTQVSKMQEDEFDQGNQEQEDNSNAEMEEENASNVNKHIQETEWQSQEGKTGLEAISNHKETEEKTVSEALLMEPTDDGNTTPRNHGVDDDGDDDGDDGGTDGPRHSASDDYFIPSQAFLEAERAQSIAYHLKIEEQREKVHENENIGTTEPGEHQEAKKAENSSNEEETSSEGNMRVHAVDSCMSFQCKRGHICKADQQGKPHCVCQDPVTCPPTKPLDQVCGTDNQTYASSCHLFATKCRLEGTKKGHQLQLDYFGACKSIPTCTDFEVIQFPLRMRDWLKNILMQLYEANSEHAGYLNEKQRNKVKKIYLDEKRLLAGDHPIDLLLRDFKKNYHMYVYPVHWQFSELDQHPMDRVLTHSELAPLRASLVPMEHCITRFFEECDPNKDKHITLKEWGHCFGIKEEDIDENLLF

SEQ ID NO: 3334 - DNA, 1760 bp, Homo sapiens
gagaacaagagcttgaggggaagactgttaaccccatccacgccaccagaattagctctttcccttttggtttgcaagcactgcctgtaaagccctcgcatgagaggccagcctgctagggaaatccaggaatctgcaacaaaaacgatgacagtctgaaatactctctggtgccaacctccaaattctcgtctgtcacttcagacccccactagttgacagagcagcagaatttcaactccagtagacttgaatatgcctctgggcaaagaagcagagctaacgaggaaagggatttaaagagtttttcttgggtgtttgtcaaacttttattccctgtctgtgtgcagaggggattcaacttcaatttttctgcagtggctctgggtccagccccttacttaaaggccataagatgttttattgaaagaaactttcaatatcaagtaatccaaccaaccttctaagataagccttttccttcaacacaaagaagtgcattttgccaaatctggaaagcatgaagactgggctttttttcctatgtctcttgggaactgcagctgcaatcccgacaaatgcaagattattatctgatcattccaaaccaactgctgaaacggtagcacctgacaacactgcaatccccagtttaagggctgaagctgaagaaaatgaaaaagaaacagcagtatccacagaagacgattcccaccataaggctgaaaaatcatcagtactaaagtcaaaagaggaaagccatgaacagtcagcagaacagggcaagagttctagccaagagctgggattgaaggatcaagaggacagtgatggtcacttaagtgtgaatttggagtatgcaccaactgaaggtacattggacataaaagaagatatgagtgagcctcaggagaaaaaactctcagagaacactgattttttggctcctggtgttagttccttcacagattctaaccaacaagaaagtatcacaaagagagaggaaaaccaagaacaacctagaaattattcacatcatcagttgaacaggagcagtaaacatagccaaggcctaagggatcaaggaaaccaagagcaggatccaaatatttccaatggagaagaggaagaagaaaaagagccaggtgaagttggtacccacaatgataaccaagaaagaaagacagaattgcccagggagcatgctaacagcaagcaggaggaagacaatacccaatctgatgatattttggaagagtctgatcaaccaactcaagtaagcaagatgcaggaggatgaatttgatcagggtaaccaagaacaagaagataactccaatgcagaaatggaagaggaaaatgcatcgaacgtcaataagcacattcaagaaactgaatggcagagtcaagagggtaaaactggcctagaagctatcagcaaccacaaagagacagaagaaaagactgtttctgaggctctgctcatggaacctactgatgatggtaataccacgcccagaaatcatggagttgatgatgatggcgatgatgatggcgatgatggcggcactgatggccccaggcacagtgcaagtgatgactacttcatcccaagccaggcctttctggaggccgagagagctcaatccattgcctatcacctcaaaattgaggagcaaagagaaaaagtacatgaaaatgaaaatataggtaccactgagcctggagagcaccaagaggtaaaattattttaaatggtcc

SEQ ID NO: 3335 - protein, 410 aa, Homo sapiens
MKTGLFFLCLLGTAAAIPTNARLLSDHSKPTAETVAPDNTAIPSLRAEAEENEKETAVSTEDDSHHKAEKSSVLKSKEESHEQSAEQGKSSSQELGLKDQEDSDGHLSVNLEYAPTEGTLDIKEDMSEPQEKKLSENTDFLAPGVSSFTDSNQQESITKREENQEQPRNYSHHQLNRSSKHSQGLRDQGNQEQDPNISNGEEEEEKEPGEVGTHNDNQERKTELPREHANSKQEEDNTQSDDILEESDQPTQVSKMQEDEFDQGNQEQEDNSNAEMEEENASNVNKHIQETEWQSQEGKTGLEAISNHKETEEKTVSEALLMEPTDDGNTTPRNHGVDDDGDDDGDDGGTDGPRHSASDDYFIPSQAFLEAERAQSIAYHLKIEEQREKVHENENIGTTEPGEHQEVKLF

SEQ ID NO: 3336 - DNA, 1356 bp, Homo sapiens
gatgataatggaacatttacaggatgcaaagcactgtgctaggcaccaggagaatgcagaaagggcacatccccttccttcaaggagtttacagctttctcagaaatctggaaagcatgaagactgggctttttttcctatgtctcttgggaactgcagctgcaatcccgacaaatgcaagattattatctgatcattccaaaccaactgctgaaacggtagcacctgacaacactgcaatccccagtttaagggctgaagctgaagaaaatgaaaaagaaacagcagtatccacagaagacgattcccaccataaggctgaaaaatcatcagtactaaagtcaaaagaggaaagccatgaacagtcagcagaacagggcaagagttctagccaagagctgggattgaaggatcaagaggacagtgatggtcacttaagtgtgaatttggagtatgcaccaactgaaggtacattggacataaaagaagatatgagtgagcctcaggagaaaaaactctcagagaacactgattttttggctcctggtgttagttccttcacagattctaaccaacaagaaagtatcacaaagagagaggaaaaccaagaacaacctagaaattattcacatcatcagttgaacaggagcagtaaacatagccaaggcctaagggatcaaggaaaccaagagcaggatccaaatatttccaatggagaagaggaagaagaaaaagagccaggtgaagttggtacccacaatgataaccaagaaagaaagacagaattgcccagggagcatgctaacagcaagcaggaggaagacaatacccaatctgatgatattttggaagagtctgatcaaccaactcaagtaagcaagatgcaggaggatgaatttgatcagggtaaccaagaacaagaagataactccaatgcagaaatggaagaggaaaatgcatcgaacgtcaataagcacattcaagaaactgaatggcagagtcaagagggtaaaactggcctagaagctatcagcaaccacaaagagacagaagaaaagactgtttctgaggctctgctcatggaacctactgatgatggtaataccacgcccagaaatcatggagttgatgatgatggcgatgatgatggcgatgatggcggcactgatggccccaggcacagtgcaagtgatgactacttcatcccaagccaggcctttctggaggccgagagagctcaatccattgcctatcacctcaaaattgaggagcaaagagaaaaagtacatgaaaatgaaaatataggtaccactgagcctggagagcaccaagaggtaaaattattttaaatggtcc

SEQ ID NO: 3337 - protein, 441 aa, Homo sapiens
MQSTVLGTRRMQKGHIPFLQGVYSFLRNLESMKTGLFFLCLLGTAAAIPTNARLLSDHSKPTAETVAPDNTAIPSLRAEAEENEKETAVSTEDDSHHKAEKSSVLKSKEESHEQSAEQGKSSSQELGLKDQEDSDGHLSVNLEYAPTEGTLDIKEDMSEPQEKKLSENTDFLAPGVSSFTDSNQQESITKREENQEQPRNYSHHQLNRSSKHSQGLRDQGNQEQDPNISNGEEEEEKEPGEVGTHNDNQERKTELPREHANSKQEEDNTQSDDILEESDQPTQVSKMQEDEFDQGNQEQEDNSNAEMEEENASNVNKHIQETEWQSQEGKTGLEAISNHKETEEKTVSEALLMEPTDDGNTTPRNHGVDDDGDDDGDDGGTDGPRHSASDDYFIPSQAFLEAERAQSIAYHLKIEEQREKVHENENIGTTEPGEHQEVKLF

SEQ ID NO: 3338 - DNA, 700 bp, Homo sapiens
gctgaaaaatcatcagtactaaagtcaaaagaggaaagccatgaacagtcagcagaacagggcaagagttctagccaagagctgggattgaaggatcaagaggacagtgatggtcacttaagtgtgaatttggagtatgcaccaactgaaggtacattggacataaaagaagatatgagtgagcctcaggagaaaaaactctcagagaacactgattttttggctcctggtgttagttccttcacagattctaaccaagaacaagaagataactccaatgcagaaatggaagaggaaaatgcatcgaacgtcaataagcacattcaagaaactgaatggcagagtcaagagggtaaaactggcctagaagctatcagcaaccacaaagagacagaagaaaagactgtttctgaggctctgctcatggaacctactgatgatggtaataccacgcccagaaatcatggagttgatgatgatggcgatgatgatggcgatgatggcggcactgatggccccaggcacagtgcaagtgatgactacttcatcccaagccaggcctttctggaggccgagagagctcaatccattgcctatcacctcaaaattgaggagcaaagagaaaaagtacatgaaaatgaaaatataggtaccactgagcctggagagcaccaagaggtaaaattattttaaatggtcc

SEQ ID NO: 3339 - protein, 172 aa, Homo sapiens
MSEPQEKKLSENTDFLAPGVSSFTDSNQEQEDNSNAEMEEENASNVNKHIQETEWQSQEGKTGLEAISNHKETEEKTVSEALLMEPTDDGNTTPRNHGVDDDGDDDGDDGGTDGPRHSASDDYFIPSQAFLEAERAQSIAYHLKIEEQREKVHENENIGTTEPGEHQEVKLF

SEQ ID NO: 3340 - DNA, 1031 bp, Homo sapiens
tctgagaacaagagcttgaggggaagactgttaaccccatccacgccaccagaattagctctttcccttttggtttgcaagcactgcctgtaaagccctcgcatgagaggccagcctgctagggaaatccaggaatctgcaacaaaaacgatgacagtctgaaatactctctggtgccaacctccaaattctcgtctgtcacttcagacccccactagttgacagagcagcagaatttcaactccagtagacttgaatatgcctctgggcaaagaagcagagctaacgaggaaagggatttaaagagtttttcttgggtgtttgtcaaacttttattccctgtctgtgtgcagaggggattcaacttcaatttttctgcagtggctctgggtccagccccttacttaaagatctggaaagcatgaagactgggctttttttcctatgtctcttgggaactgcagctgcaatcccgacaaatgcaagattattatctgatcattccaaaccaactgctgaaacggtagcacctgacaacactgcaatccccagtttaagggctgaagctgaagaaaatgaaaaagaaacagcagtatccacagaagacgattcccaccataaggctgaaaaatcatcagtactaaagtcaaaagaggaaagccatgaacagtcagcagaacagggcaagagttctagccaagagctgggattgaaggatcaagaggacagtgatggtcacttaagtgtgaatttggagtatgcaccaactgaaggtacattggacataaaagaagatatgagtgagcctcaggagaaaaaactctcagagaacactgattttttggctcctggtgttagttccttcacagattctaaccaacaagaaagtatcacaaagagagaggaaaaccaagaacaacctagaaattattcacatcatcagttgaacaggagcagtaaacatagccaaggcctaagggatcaaggaaaccaagagcaggatccaaatatttccaatggagaagaggaag

SEQ ID NO: 3341 - protein, 202 aa, Homo sapiens
MKTGLFFLCLLGTAAAIPTNARLLSDHSKPTAETVAPDNTAIPSLRAEAEENEKETAVSTEDDSHHKAEKSSVLKSKEESHEQSAEQGKSSSQELGLKDQEDSDGHLSVNLEYAPTEGTLDIKEDMSEPQEKKLSENTDFLAPGVSSFTDSNQQESITKREENQEQPRNYSHHQLNRSSKHSQGLRDQGNQEQDPNISNGEE

SEQ ID NO: 3342 - DNA, 1127 bp, Homo sapiens
gagaacaagagcttgaggggaagactgttaaccccatccacgccaccagaattagctctttcccttttggtttgcaagcactgcctgtaaagccctcgcatgagaggccagcctgctagggaaatccaggaatctgcaacaaaaacgatgacagtctgaaatactctctggtgccaacctccaaattctcgtctgtcacttcagacccccactagttgacagagcagcagaatttcaactccagtagacttgaatatgcctctgggcaaagaagcagagctaacgaggaaagggatttaaagagtttttcttgggtgtttgtcaaacttttattccctgtctgtgtgcagaggggattcaacttcaatttttctgcagtggctctgggtccagccccttacttaaaggccataagatgttttattgaaagaaactttcaatatcaagtaatccaaccaaccttctaagataagccttttccttcaacacaaagaagtgcattttgccaaatctggaaagcatgaagactgggctttttttcctatgtctcttgggaactgcagctgcaatcccgacaaatgcaagattattatctgatcattccaaaccaactgctgaaacggtagcacctgacaacactgcaatccccagtttaagggctgaagctgaagaaaatgaaaaagaaacagcagtatccacagaagacgattcccaccataaggctgaaaaatcatcagtactaaagtcaaaagaggaaagccatgaacagtcagcagaacagggcaagagttctagccaagagctgggattgaaggatcaagaggacagtgatggtcacttaagtgtgaatttggagtatgcaccaactgaaggtacattggacataaaagaagatatgagtgagcctcaggagaaaaaactctcagagaacactgattttttggctcctggtgttagttccttcacagattctaaccaacaagaaagtatcacaaagagagaggaaaaccaagaacaacctagaaattattcacatcatcagttgaacaggagcagtaaacatagccaaggcctaagggatcaaggaaaccaagagcaggatccaaatatttccaatggagaagagg

SEQ ID NO: 3343 - protein, 201 aa, Homo sapiens
MKTGLFFLCLLGTAAAIPTNARLLSDHSKPTAETVAPDNTAIPSLRAEAEENEKETAVSTEDDSHHKAEKSSVLKSKEESHEQSAEQGKSSSQELGLKDQEDSDGHLSVNLEYAPTEGTLDIKEDMSEPQEKKLSENTDFLAPGVSSFTDSNQQESITKREENQEQPRNYSHHQLNRSSKHSQGLRDQGNQEQDPNISNGE

SEQ ID NO: 3344 - DNA, 723 bp, Homo sapiens
gatgataatggaacatttacaggatgcaaagcactgtgctaggcaccaggagaatgcagaaagggcacatccccttccttcaaggagtttacagctttctcagaaatctggaaagcatgaagactgggctttttttcctatgtctcttgggaactgcagctgcaatcccgacaaatgcaagattattatctgatcattccaaaccaactgctgaaacggtagcacctgacaacactgcaatccccagtttaagggctgaagctgaagaaaatgaaaaagaaacagcagtatccacagaagacgattcccaccataaggctgaaaaatcatcagtactaaagtcaaaagaggaaagccatgaacagtcagcagaacagggcaagagttctagccaagagctgggattgaaggatcaagaggacagtgatggtcacttaagtgtgaatttggagtatgcaccaactgaaggtacattggacataaaagaagatatgagtgagcctcaggagaaaaaactctcagagaacactgattttttggctcctggtgttagttccttcacagattctaaccaacaagaaagtatcacaaagagagaggaaaaccaagaacaacctagaaattattcacatcatcagttgaacaggagcagtaaacatagccaaggcctaagggatcaaggaaaccaagagcaggatccaaatatttccaatggagaagagg

SEQ ID NO: 3345 - protein, 232 aa, Homo sapiens
MQSTVLGTRRMQKGHIPFLQGVYSFLRNLESMKTGLFFLCLLGTAAAIPTNARLLSDHSKPTAETVAPDNTAIPSLRAEAEENEKETAVSTEDDSHHKAEKSSVLKSKEESHEQSAEQGKSSSQELGLKDQEDSDGHLSVNLEYAPTEGTLDIKEDMSEPQEKKLSENTDFLAPGVSSFTDSNQQESITKREENQEQPRNYSHHQLNRSSKHSQGLRDQGNQEQDPNISNGE

SEQ ID NO: 3346 - DNA, 743 bp, Homo sapiens
aggtctcaggtctgaagtccactgcggtcagccttccctggtggtgagctgctgtcagaacctccccactactcctctgggtggccccagtcttgtgcctatttccctctcgtggtcatcaagtctcgcccagatggagtctcagttttataagggggagtttccctgcacaagctctctctctttgtctgctgccattcatgtaaaatgtgacttgctcctccttgccttccgtcatgattgtgatgcctcccagccatgtggaaatagaattccaaaattgtacgagcttcaggccccacaaaacctggatccaccctcagatttcatttatctcgcttcgtggtgacaaatgaacctgctgttcttgtcactccccgggtccgactgtactcccaaatctgtcaagcgaaaagtttcagaaatgttcgttatgactccttggatattcttaactaatagggcctctgtgagatctgtactactaagaagtttcacaagtaattctaatattcagcctgggttgaaaaccgccatccaccatccacggatgctgtgcttagggcccgtgcttctcagatggtgggccatcactcattctgagttgtgaaatcatcttaacaggtcccaattagcattgttttaatagaatggaatatgttaccttgcatcataaggttggtgtgttcgtcccacttttgtttcaatatctacaatatatataacttatacattgccttggg

SEQ ID NO: 3347 - protein, 71 aa, Homo sapiens
MESQFYKGEFPCTSSLSLSAAIHVKCDLLLLAFRHDCDASQPCGNRIPKLYELQAPQNLDPPSDFIYLASW

SEQ ID NO: 3348 - DNA, 4250 bp, Homo sapiens
atgcaaaagtccaggacagtgggccactttcagtcttcaaagagaaagataagaaattctggattttcaaaatccttttgaagccttttaagccattgattattattattcctaaagaaaatgaagataattacatatttttgcatttgggcagtagcatgggccattccagttcctcaaagcaaaccactggagagacatgtcgaaaaatccatgaatttgcatctcctagcaagatcaaatgtgtcagtacaggatgagttaaatgccagtggaaccatcaaagaaagtggtgtcctggtgcatgaaggtgatagaggaaggcaagagaatacccaagatggtcacaagggagaagggaatggctctaagtgggcagaagtaggagggaagagtttttctacatattccacattagcaaacgaagaggggaatattgagggctggaatggggacacaggaaaagcagaaacatatggtcatgatggaatacatgggaaagaagaaaacatcacagcaaatggcatccagggacaagtaagcatcattgacaatgctggagccacaaacagaagcaacactaatggaaatactgataagaatacccaaaatggggatgttggcgatgcaggtcacaatgaggatgtcgctgttgtccaagaagatggacctcaagtagctggaagcaataacagtacagacaatgaggatgaaataattgagaattcctgtagaaacgagggtaatacaagtgaaataacacctcagatcaacagcaagagaaatgggactaaggaagctgaggtaacaccaggcactggagaagatgctggcctggataattccgatgggagtcctagtgggaatggagcagatgaggatgaagacgagggttctggtgatgatgaagatgaagaagcagggaatggaaaagacagtagtaataacagcaagggccaggagggccaggaccatgggaaagaagatgatcatgatagtagcataggtcaaaattcagatagtaaagaatattatgaccctgaaggcaaagaagatccccataatgaagttgatggagacaagacctccaagagtgaggagaattctgctggtattccagaagacaatggcagccaaagaatagaggacacccagaagctcaaccatagagaaagcaaacgcgtagaaaatagaatcaccaaagaatcagagacacatgctgttgggaagagccaagataagggaatagaaatcaagggtcccagcagtggcaacagaaatattaccaaagaagttgggaaaggcaacgaaggtaaagaggataaaggacaacatggaatgatcttgggcaaaggcaatgtcaagacacaaggagaggttgtcaacatagaaggacctggccaaaaatcagaaccaggaaataaagttggacacagcaatacaggtagtgacagcaatagtgatggatatgacagttatgattttgatgataagtccatgcaaggagatgatcccaatagcagtgatgaatctaatggcaatgatgatgctaattcagaaagtgacaataacagcagtagccgaggagatgcttcttataactctgatgaatcaaaagataatggcaatggcagtgactcaaaaggagcagaagatgatgacagtgatagcacatcagacactaataatagtgacagtaatggcaatggtaacaatgggaatgatgacaatgacaaatcagacagtggcaaaggtaaatcagatagcagtgacagtgatagtagtgatagcagcaatagcagtgatagtagtgacagcagtgacagtgacagcagtgatagcaacagtagcagtgatagtgacagcagtgacagtgacagcagtgatagcagtgacagtgatagtagtgatagcagcaatagcagtgacagtagtgacagcagtgatagcagtgacagtagtgatagtagtgacagcagtgacagcaagtcagacagcagcaaatcagagagcgacagcagtgatagtgacagtaagtcagacagcagtgacagcaacagcagtgacagtagtgacaacagtgatagcagcgacagcagcaatagcagtaacagcagtgatagtagtgacagcagtgatagcagtgacagcagcagtagcagtgacagcagcaacagcagtgatagtagtgacagtagtgacagcagcaatagcagtgagagcagtgatagtagtgacagcagtgatagtgacagcagtgatagtagtgacagcagtaatagtaacagcagcgatagtgacagcagcaacagcagcgatagcagtgacagcagcaacagcagtgacagcagtgatagcagtgacagcagcaacagcagtgacagtagcgatagcagtgacagcagcaacagcagtgacagcagtgatagcagtgacagcagtgatagtagtgacagcagcaacagcagtgatagcaacgacagcagcaatagcagtgacagcagtgatagcagcaacagcagtgatagcagcaacagcagtgatagcagtgatagcagtgacagcagtgatagcgacagcagcaatagcagtgacagcagtaatagtagtgacagcagcgatagcagcaacagcagtgatagcagcgacagcagcgatagcagtgacggcagtgatagcgacagcagcaatagaagtgacagtagtaatagtagtgacagcagcgatagcagtgacagcagcaacagcagtgacagcagtgatagcagtgacagcaacgaaagcagcaatagcagtgacagcagtgatagcagcaacagcagtgatagtgacagcagtgatagcagcaacagcagtgacagcagtgatagcagcaacagcagtgatagcagtgaaagcagtaatagtagtgacaacagcaatagcagtgacagcagcaacagcagtgacagcagtgatagcagtgacagcagtaatagtagtgacagcagcaatagcagtgacagcagcaacagcagtgacagcagtgatagcaatagcagcgacagcagtgacagcagcaacagcagcgatagcagtgacagcagtgatagcagtgacagcagtgacagcagtgatagcagcaacagcagtgatagcagtgacagcagtgacagcagtgatagcagtaatagtagtgacagcagcaatagcagtgacagcagcaacagcagtgacagcagcgatagcagtgacagcagcgatagcagtgacagcagcgatagcagtgacagcagtgacagcagcaatagcagtgacagcagtgacagcagcgacagcagtgatagcagtgacagcagtgacagcagcgacagcagtgatagcagtgaaagcagtgatagcatgacagcagcgacagcagtgatagcagtgacagcagcaacagcagtgacagcagtgacagcagtgaaagcagcgacagcagtgacagcagcgacagcagtgacagcagcgatagcagcgacagcagcgacagcagcgatagcagtgacagcagcaatagcagtgatagcagcgacagcagtgatagcagtgacagcagcgacagcagcgatagcagcgacagcagcgatagtagtgatagcagtgacagcagtgacagcagcgacagcagtgacagcagcgacagcagtgacagcagcgacagcagtgacagcaatgaaagcagcgacagcagtgacagcagcgatagcagtgacagcagcaacagcagtgacagcagcgacagcagtgatagcagtgacagcacatctgacagcaatgatgagagtgacagccagagcaagtctggtaacggtaacaacaatggaagtgacagtgacagtgacagtgaaggcagtgacagtaaccactcaaccagtgatgattagaacaaaagaaaaacccgtaagattccttttgtgaaaagtttggtaatgggataggaaaaaaagatttccaagaaagtaaagaaaggggagaaataaacataagacgtatgtaaacaaaaacaactgggggaatcaaatcaaacagttggattcagaaccaagacctaactcctgcagagacagactctgaatgcatgacctttggtacatgcctgttaatattcatgttctgaaaatattttgttaaaagtgtaaatctaaacataaaagaacaattaaaatattctttaatacttcacacagaaacctcaagtaatcactacatgataacttcaatttaag

SEQ ID NO: 3349 - protein, 1273 aa, Homo sapiens
MKIITYFCIWAVAWAIPVPQSKPLERHVEKSMNLHLLARSNVSVQDELNASGTIKESGVLVHEGDRGRQENTQDGHKGEGNGSKWAEVGGKSFSTYSTLANEEGNIEGWNGDTGKAETYGHDGIHGKEENITANGIQGQVSIIDNAGATNRSNTNGNTDKNTQNGDVGDAGHNEDVAVVQEDGPQVAGSNNSTDNEDEIIENSCRNEGNTSEITPQINSKRNGTKEAEVTPGTGEDAGLDNSDGSPSGNGADEDEDEGSGDDEDEEAGNGKDSSNNSKGQEGQDHGKEDDHDSSIGQNSDSKEYYDPEGKEDPHNEVDGDKTSKSEENSAGIPEDNGSQRIEDTQKLNHRESKRVENRITKESETHAVGKSQDKGIEIKGPSSGNRNITKEVGKGNEGKEDKGQHGMILGKGNVKTQGEVVNIEGPGQKSEPGNKVGHSNTGSDSNSDGYDSYDFDDKSMQGDDPNSSDESNGNDDANSESDNNSSSRGDASYNSDESKDNGNGSDSKGAEDDDSDSTSDTNNSDSNGNGNNGNDDNDKSDSGKGKSDSSDSDSSDSSNSSDSSDSSDSDSSDSNSSSDSDSSDSDSSDSSDSDSSDSSNSSDSSDSSDSSDSSDSSDSSDSKSDSSKSESDSSDSDSKSDSSDSNSSDSSDNSDSSDSSNSSNSSDSSDSSDSSDSSSSSDSSNSSDSSDSSDSSNSSESSDSSDSSDSDSSDSSDSSNSNSSDSDSSNSSDSSDSSNSSDSSDSSDSSNSSDSSDSSDSSNSSDSSDSSDSSDSSDSSNSSDSNDSSNSSDSSDSSNSSDSSNSSDSSDSSDSSDSDSSNSSDSSNSSDSSDSSNSSDSSDSSDSSDGSDSDSSNRSDSSNSSDSSDSSDSSNSSDSSDSSDSNESSNSSDSSDSSNSSDSDSSDSSNSSDSSDSSNSSDSSESSNSSDNSNSSDSSNSSDSSDSSDSSNSSDSSNSSDSSNSSDSSDSNSSDSSDSSNSSDSSDSSDSSDSSDSSDSSNSSDSSDSSDSSDSSNSSDSSNSSDSSNSSDSSDSSDSSDSSDSSDSSDSSDSSNSSDSSDSSDSSDSSDSSDSSDSSDSSESSDSMTAATAVIAVTAATAVTAVTAVKAATAVTAATAVTAAIAATAATAAIAVTAAIAVIAATAVIAVTAATAAIAATAAIVVIAVTAVTAATAVTAATAVTAATAVTAMKAATAVTAAIAVTAATAVTAATAVIAVTAHLTAMMRVTARASLVTVTTMEVTVTVTVKAVTVTTQPVMIRTKEKPVRFLL

SEQ ID NO: 3350 - DNA, 2681 bp, Homo sapiens
tgggcatagatttcctctttgagaacatcaacctgatttttgagactttttgaaaaaattctttgtgaactacggagggtagaggtatcacacccaactatgaagatcagcatcctgctcatgttcctttggggattatcctgtgctctcccagtaaccaggtatcaaaataatgaatctgaggattctgaagaatggaagggtcatttggctcaggcaccaacaccacccttggagagcagtgagtcatcagaaggcagtaaagttagctcagaggaacaggcaaatgaagaccccagtgacagcactcagtcagaggagggcctgggctctgatgatcatcaatacatttataggctagctggtggcttctccaggagcacaggaaaaggaggagatgataaagatgacgatgaagatgacagtggagatgacacctttggtgacgatgacagtggcccagggcccaaagacagacaagaaggaggaaactccagactgggaagtgatgaggactctgatgacaccatacaagccagtgaagagagtgccccacaagggcaagacagtgcccaagataccaccagtgagagcagggaacttgacaatgaggaccgggtggacagcaagcctgagggaggtgactccactcaagagagtgagagtgaagagcactgggtgggaggtggcagtgatggggagagcagccatggagacggctccgagttggacgatgagggaatgcagagtgatgacccagagagcatcaggagtgaaaggggaaactccagaatgaacagtgcaggcatgaaatcaaaagaatctggagaaaacagtgagcaagcaaacactcaagattcaggtggcagccaattgctggagcatcccagtaggaaaatttttaggaagtctcgcatctcagaggaagatgacagaagcgagcttgatgacaacaacacaatggaagaagtcaagagtgactctacagaaaacagcaactccagagacactggcctcagccaacccaggagagacagcaagggtgactctcaagaagacagcaaggagaatctgtcccaggaagagagccaaaacgtagatggtcccagcagtgagtccagccaagaggccaacctgtcatctcaagagaacagcagtgagtctcaggaagaggtggtgagtgagtccaggggagataaccccgaccccacaactagttatgtagaagaccaggaagacagtgactccagcgaggaggacagctcgcacacactctcccactcaaaaagtgaatccagagaggagcaagcagacagcgaatccagtgagagcctcaacttctcagaggaaagcccggagtcccctgaggatgagaacagctccagccaggagggcctccagtctcacagcagctcagcagagagtcagagcgaggaaagccattctgaggaagacgacagtgactctcaagacagcagcagatccaaagaagatagcaactccacggagagcaaatcaagcagtgaggaagatggccagttgaaaaacattgagatagagagccggaaattaacagttgatgcctatcacaacaaacccattggggaccaagatgacaatgactgccaagacggctattagcatcagctgtcctaagaagcagttgtcacataaaggagtcttagggacttgaaaatgtatcatgataactataatttattgatgttttgatcaaaagaataaccagatgccatatttttcctgaaaggaattgctggacattacacttgtttttagggtgtcatcatttcacagaggtttaaatactgtggagtgacaccagaacacagccaaagaggctagaagcaagaaaggatctgcatgataactttgcagctgagatagttcctaattcatcaacgtaacaaacaaagctattgggtgtccatgatataccaggcactatgctaggtgttgagaatgtaaagcaggttaagacttgtttcttgctcctgaggagcgtatagaaggacccacaaagctacagagttaaagagggatatgtataagagaaacaagaattgttacaacccagtatggtgagtgccaagacagagagctatgaacacgatatctatctgggaacactgagaagggtgaccaatgcgttggagaacgagggagggcttcatagcagaagacattggagttggaaggttgcatagggtttcctcattggagaccgggaaattctattcttgggataaataatagtaaattctataggattcaatacttagtttgcaaaagcactttgaaattatggcacagtgagttgttttggataagaaaatctttttctcccaattaatttaccaattcatcatttttttttttttgtagaactcccataaacatcaccttactaatcactggtgatgataagaaggattgggtcaggaagagtgggagaaagaaattcctctttacgtagatactttttagctttattttttctaaaatcagtttgcgtgcaatgctagaaaaaaactgttctctgagtcctttacagagcaaaattctgtatgtaagattcaattgatttttgacaaataccatttgaaatattacctcaacataaaatacttgttttgtaataaagattataatacccagaagaa

SEQ ID NO: 3351 - protein, 513 aa, Homo sapiens; identical to SEQ ID NO: 338

SEQ ID NO: 3352 - DNA, 2633 bp, Homo sapiens
tgggcatagatttcctctttgagaacatcaacctgatttttgagactttttgaaaaaattctttgtgaactacggagggtagaggtatcacacccaactatgaagatcagcatcctgctcatgttcctttggggattatcctgtgctctcccagtaaccaggtatcaaaataatgaatctgaggattctgaagaatggaagggtcatttggctcaggcaccaacaccacccttggcaaatgaagaccccagtgacagcactcagtcagaggagggcctgggctctgatgatcatcaatacatttataggctagctggtggcttctccaggagcacaggaaaaggaggagatgataaagatgacgatgaagatgacagtggagatgacacctttggtgacgatgacagtggcccagggcccaaagacagacaagaaggaggaaactccagactgggaagtgatgaggactctgatgacaccatacaagccagtgaagagagtgccccacaagggcaagacagtgcccaagataccaccagtgagagcagggaacttgacaatgaggaccgggtggacagcaagcctgagggaggtgactccactcaagagagtgagagtgaagagcactgggtgggaggtggcagtgatggggagagcagccatggagacggctccgagttggacgatgagggaatgcagagtgatgacccagagagcatcaggagtgaaaggggaaactccagaatgaacagtgcaggcatgaaatcaaaagaatctggagaaaacagtgagcaagcaaacactcaagattcaggtggcagccaattgctggagcatcccagtaggaaaatttttaggaagtctcgcatctcagaggaagatgacagaagcgagcttgatgacaacaacacaatggaagaagtcaagagtgactctacagaaaacagcaactccagagacactggcctcagccaacccaggagagacagcaagggtgactctcaagaagacagcaaggagaatctgtcccaggaagagagccaaaacgtagatggtcccagcagtgagtccagccaagaggccaacctgtcatctcaagagaacagcagtgagtctcaggaagaggtggtgagtgagtccaggggagataaccccgaccccacaactagttatgtagaagaccaggaagacagtgactccagcgaggaggacagctcgcacacactctcccactcaaaaagtgaatccagagaggagcaagcagacagcgaatccagtgagagcctcaacttctcagaggaaagcccggagtcccctgaggatgagaacagctccagccaggagggcctccagtctcacagcagctcagcagagagtcagagcgaggaaagccattctgaggaagacgacagtgactctcaagacagcagcagatccaaagaagatagcaactccacggagagcaaatcaagcagtgaggaagatggccagttgaaaaacattgagatagagagccggaaattaacagttgatgcctatcacaacaaacccattggggaccaagatgacaatgactgccaagacggctattagcatcagctgtcctaagaagcagttgtcacataaaggagtcttagggacttgaaaatgtatcatgataactataatttattgatgttttgatcaaaagaataaccagatgccatatttttcctgaaaggaattgctggacattacacttgtttttagggtgtcatcatttcacagaggtttaaatactgtggagtgacaccagaacacagccaaagaggctagaagcaagaaaggatctgcatgataactttgcagctgagatagttcctaattcatcaacgtaacaaacaaagctattgggtgtccatgatataccaggcactatgctaggtgttgagaatgtaaagcaggttaagacttgtttcttgctcctgaggagcgtatagaaggacccacaaagctacagagttaaagagggatatgtataagagaaacaagaattgttacaacccagtatggtgagtgccaagacagagagctatgaacacgatatctatctgggaacactgagaagggtgaccaatgcgttggagaacgagggagggcttcatagcagaagacattggagttggaaggttgcatagggtttcctcattggagaccgggaaattctattcttgggataaataatagtaaattctataggattcaatacttagtttgcaaaagcactttgaaattatggcacagtgagttgttttggataagaaaatctttttctcccaattaatttaccaattcatcatttttttttttttgtagaactcccataaacatcaccttactaatcactggtgatgataagaaggattgggtcaggaagagtgggagaaagaaattcctctttacgtagatactttttagctttattttttctaaaatcagtttgcgtgcaatgctagaaaaaaactgttctctgagtcctttacagagcaaaattctgtatgtaagattcaattgatttttgacaaataccatttgaaatattacctcaacataaaatacttgttttgtaataaagattataatacccagaagaa

SEQ ID NO: 3353 - protein, 497 aa, Homo sapiens
MKISILLMFLWGLSCALPVTRYQNNESEDSEEWKGHLAQAPTPPLANEDPSDSTQSEEGLGSDDHQYIYRLAGGFSRSTGKGGDDKDDDEDDSGDDTFGDDDSGPGPKDRQEGGNSRLGSDEDSDDTIQASEESAPQGQDSAQDTTSESRELDNEDRVDSKPEGGDSTQESESEEHWVGGGSDGESSHGDGSELDDEGMQSDDPESIRSERGNSRMNSAGMKSKESGENSEQANTQDSGGSQLLEHPSRKIFRKSRISEEDDRSELDDNNTMEEVKSDSTENSNSRDTGLSQPRRDSKGDSQEDSKENLSQEESQNVDGPSSESSQEANLSSQENSSESQEEVVSESRGDNPDPTTSYVEDQEDSDSSEEDSSHTLSHSKSESREEQADSESSESLNFSEESPESPEDENSSSQEGLQSHSSSAESQSEESHSEEDDSDSQDSSRSKEDSNSTESKSSSEEDGQLKNIEIESRKLTVDAYHNKPIGDQDDNDCQDGY

SEQ ID NO: 3354 - DNA, 365 bp, Homo sapiens
tcctccttgccttccgtcatgattgtgatgcctcccagccatgtggaaatgacttgacctcttgcccaccagataactcttgttaaaacagatttcaagtcataatctctcctgaagactcttgattcattgtcatgcatcccctggtactattatacacatccattataagaagaaagctaacagaaaatatgcttccttgccagagtatactactaagttggaatcacagcagtattttcttctatgaactctatagcttagcttattaatatgctgatgaagtcattagcagtttcaatatttgcaatgaaatcaatttggttatactcataataaattaaaattaaaatatttcaaaaagt

SEQ ID NO: 3355 - protein, 45 aa, Homo sapiens
MHPLVLLYTSIIRRKLTENMLPCQSILLSWNHSSIFFYELYSLAY

SEQ ID NO: 3356 - DNA, 493 bp, Homo sapiens
agaaataaatatgcttttttgaacctggccgttcatacaacctagaggaaacgtaacacaggaaaagcagcattgaaactcagaatccagatttaagtctcaattaactcactggttttggttttagccctgaaaaccaatcatcttggtgttagcactgaaagtcatgtgttccaggaaacccctaagttccaggacttgacctcttgcccaccagataactcttgttaaaacagatttcaagtcataatctctcctgaagactcttgattcattgtcatgcatcccctggtactattatacacatccattataagaagaaagctaacagaaaatatgcttccttgccagagtatactactaagttggaatcacagcagtattttcttctatgaactctatagcttagcttattaatatgctgatgaagtcattagcagtttcaatatttgcaatgaaatcaatttggttatactcataataaattaaaatt

SEQ ID NO: 3357 - protein, 45 aa, Homo sapiens; identical to SEQ ID NO: 3355

SEQ ID NO: 3358 - DNA, 259 bp, Homo sapiens
agtacaaccagaaagttgcctatagatgattcagctagaagacaccaactagtgtgaccaacaaggcaacttagtgctacgtgggaagtcagagagaaataaatatgcttttttgaacctggccgttcatacaacctagaggaaacgtaacacaggaaaagcagcattgaaactcagaatccagatttaagtctcaattaactcactggttttggttttagccctgaaaaccaatcatcttggtgttagcactgaaagt

SEQ ID NO: 3359 - DNA, 531 bp, Homo sapiens
actctcatttcatccacagtgacccaggcacccaattattgaatgcttttagaagtcttctcaaatgaatctctatgaacagcagtaataacggtctcaggtctgaagtccactgcggtcagccttccctggtggtgagctgctgtcagaacctccccactactcctctgggtggccccagtcttgtgcctatttccctctcgtggtcatcaagtctcgcccagtggaaattgacttccttgttctgagctgccccatggagaggccatgtggcaaagaattgagggtggcctccagccaacagccagcaaggaactgtggccttcggtgggaggaacagaatccaactaacaaccatatgagtgagcttggaagcagatgcttccccggttgagacctgagatgactgtagacccagttgacaccttgattgcagcctatgaaaggccctaaagcaggggacccagctaagccaaggccaggttcctgacccataggaactgtgagataataaaattttttttttgtaaa

SEQ ID NO: 3360 - protein, 57 aa, Homo sapiens
MNSSNNGLRSEVHCGQPSLVVSCCQNLPTTPLGGPSLVPISLSWSSSLAQWKLTSLF

SEQ ID NO: 3361 - DNA, 2132 bp, Homo sapiens
cgcggggcgcggagtcggcggggcctcgcgggacgccgggcagtgcggagaccgcggcgctgaggacgcgggagccgggagcgcagccgcggggtggagttcagcctactctttcttagatgtgaaaggaaaggaagatcatttcatgccttgttgataaaggttcagacttctgctgattcataaccatttggctctgagctatgacaagagaggaaacaaaaagttaaacaagcaagcctgccataagtgagaagcaaacttccttgataacatgcttttgcgaagtgcaggaaaattaaatgtgggcaccaagaaagaggatggtgagagtacagcccccaccccccgtccaaaggtcttgcgttgtaaatgccaccaccattgtccagaagactcagtcaacaatatttgcagcacagacggatattgtttcacgatgatagaagaggatgactctgggttgcctgtggtcacttctggttgcctaggactagaaggctcagattttcagtgtcgggacactcccattcctcatcaaagaagatcaattgaatgctgcacagaaaggaacgaatgtaataaagacctacaccctacactgcctccattgaaaaacagagattttgttgatggacctatacaccacagggctttacttatatctgtgactgtctgtagtttgctcttggtccttatcatattattttgttacttccggtataaaagacaagaaaccagacctcgatacagcattgggttagaacaggatgaaacttacattcctcctggagaatccctgagagacttaattgagcagtctcagagctcaggaagtggatcaggcctccctctgctggtccaaaggactatagctaagcagattcagatggtgaaacagattggaaaaggtcgctatggggaagtttggatgggaaagtggcgtggcgaaaaggtagctgtgaaagtgttcttcaccacagaggaagccagctggttcagagagacagaaatatatcagacagtgttgatgaggcatgaaaacattttgggtttcattgctgcagatatcaaagggacagggtcctggacccagttgtacctaatcacagactatcatgaaaatggttccctttatgattatctgaagtccaccaccctagacgctaaatcaatgctgaagttagcctactcttctgtcagtggcttatgtcatttacacacagaaatctttagtactcaaggcaaaccagcaattgcccatcgagatctgaaaagtaaaaacattctggtgaagaaaaatggaacttgctgtattgctgacctgggcctggctgttaaatttattagtgatacaaatgaagttgacataccacctaacactcgagttggcaccaaacgctatatgcctccagaagtgttggacgagagcttgaacagaaatcacttccagtcttacatcatggctgacatgtatagttttggcctcatcctttgggaggttgctaggagatgtgtatcaggaggtatagtggaagaataccagcttccttatcatgacctagtgcccagtgacccctcttatgaggacatgagggagattgtgtgcatcaagaagttacgcccctcattcccaaaccggtggagcagtgatgagtgtctaaggcagatgggaaaactcatgacagaatgctgggctcacaatcctgcatcaaggctgacagccctgcgggttaagaaaacacttgccaaaatgtcagagtcccaggacattaaactctgataggagaggaaaagtaagcatctctgcagaaagccaacaggtactcttctgtttgtgggcagagcaaaagacatcaaataagcatccacagtacaagccttgaacatcgtcctgcttcccagtgggttcagacctcacctctcagggagcgacctgggcaaagacagagaagctcccagaaggagagattgatccatgtctgtttgtaggacggagaaaccgcttgggtaacttgttcaagatatgatgcatgttgctttctaagaaagccctgtattttgtgattgcctttttttttttttaagatgctttcattttgccaaaataaaacagataatgtggatggttt

SEQ ID NO: 3362 - protein, 502 aa, Homo sapiens; identical to SEQ ID NO: 340

SEQ ID NO: 3363 - DNA, 246 bp, Homo sapiens
gaagatgtgcttgcttcccctttgcccttccaccgtaattgtgagtttcctgaggcctcaccagccatgcctcctgtacagcctgtggaactcttgaaacatggattttttcctaataattgaagacggttcaagaaaatatcttctacaagaaaatatgcaactaggagtcctgcaatgaacgttgtttgctttcttcaatatcaattataataatattttatctttaaaatcagaattttaccg

SEQ ID NO: 3364 - protein, 30 aa, Homo sapiens
MCLLPLCPSTVIVSFLRPHQPCLLYSLWNS

SEQ ID NO: 3365 - DNA, 843 bp, Homo sapiens
aggaatctttctccttcaacagacagaaatcagataaaagataagggaagatgttggtgctaaatttctggacatgctatgcaggagtgaaatgtcagatgacaaagcaatatcaggaagaagactgccaaaggacaatcttgttgaattctgggcagaaacactaaggagagatctgaattgaaactatgttattataataattgtgttatcttcaatctgggcatggcacacacaggaacattctggcctgatgctgctcaagctctccctctttggataaataaatggcttcagttttcaaaacattctcctaaagcacttttatattcttattttttaaattgtataacacccagtatacctcagtggtcccagtctttaaaagccttgttaattttacctgtaaattttctttctttatattcttttatcgaattcatatcttctcatttatgccagtaatgttctcacccataaactctaccctaaggtcaaaatgtttccttcctcctcttttaaataactgtcaatatgggctctcccaataaacaaaccaccgccaaaaaaagaacaacaaaaagcctgtatctgggatgctatgtgagaaataattacccttcacaaaccctatcttcagatatttctgtattttaagccacaccaacataaggtagatgtatttgtgtgtgttatgtttttccaccttgaaatatttttaagaagttggatatattatcttaaatttcattatcagagtgagttaagaaataaatacattgtatttaaatgaccaaagtgatcccaaacaatcataatactaatatgggggcaaaggaccat

SEQ ID NO: 3366 - protein, 38 aa, Homo sapiens
MLVLNFWTCYAGVKCQMTKQYQEEDCQRTILLNSGQKH

SEQ ID NO: 3367 - DNA, 315 bp, Homo sapiens
aggaatctttctccttcaacagacagaaatcagataaaagataagggaagatgttggtgctaaatttctggacatgctatgcaggagtgaaatgtcagatgacaaagcaatatcaggaagaagactgccaaaggacaatcttgttgaattctgggcagaaacactaaggagagatctgaattgaaactatgttattataataattgtgttatcttcaatctgggcatggcacacacaggaacattctggcctgatgctgctcaagctctccctctttggataaataaatggcttcagttttcaaaacattctcct

SEQ ID NO: 3368 - protein, 38 aa, Homo sapiens; identical to SEQ ID NO: 3366

SEQ ID NO: 3369 - DNA, 1928 bp, Homo sapiens
gactggggtagtctaccccacagatgcctaactctcactatttcttctttcagcaaacttccttgataacatgcttttgcgaagtgcaggaaaattaaatgtgggcaccaagaaagaggatggtgagagtacagcccccaccccccgtccaaaggtcttgcgttgtaaatgccaccaccattgtccagaagactcagtcaacaatatttgcagcacagacggatattgtttcacgatgatagaagaggatgactctgggttgcctgtggtcacttctggttgcctaggactagaaggctcagattttcagtgtcgggacactcccattcctcatcaaagaagatcaattgaatgctgcacagaaaggaacgaatgtaataaagacctacaccctacactgcctccattgaaaaacagagattttgttgatggacctatacaccacagggctttacttatatctgtgactgtctgtagtttgctcttggtccttatcatattattttgttacttccggtataaaagacaagaaaccagacctcgatacagcattgggttagaacaggatgaaacttacattcctcctggagaatccctgagagacttaattgagcagtctcagagctcaggaagtggatcaggcctccctctgctggtccaaaggactatagctaagcagattcagatggtgaaacagattggaaaaggtcgctatggggaagtttggatgggaaagtggcgtggcgaaaaggtagctgtgaaagtgttcttcaccacagaggaagccagctggttcagagagacagaaatatatcagacagtgttgatgaggcatgaaaacattttgggtttcattgctgcagatatcaaagggacagggtcctggacccagttgtacctaatcacagactatcatgaaaatggttccctttatgattatctgaagtccaccaccctagacgctaaatcaatgctgaagttagcctactcttctgtcagtggcttatgtcatttacacacagaaatctttagtactcaaggcaaaccagcaattgcccatcgagatctgaaaagtaaaaacattctggtgaagaaaaatggaacttgctgtattgctgacctgggcctggctgttaaatttattagtgatacaaatgaagttgacataccacctaacactcgagttggcaccaaacgctatatgcctccagaagtgttggacgagagcttgaacagaaatcacttccagtcttacatcatggctgacatgtatagttttggcctcatcctttgggaggttgctaggagatgtgtatcaggaggtatagtggaagaataccagcttccttatcatgacctagtgcccagtgacccctcttatgaggacatgagggagattgtgtgcatcaagaagttacgcccctcattcccaaaccggtggagcagtgatgagtgtctaaggcagatgggaaaactcatgacagaatgctgggctcacaatcctgcatcaaggctgacagccctgcgggttaagaaaacacttgccaaaatgtcagagtcccaggacattaaactctgataggagaggaaaagtaagcatctctgcagaaagccaacaggtactcttctgtttgtgggcagagcaaaagacatcaaataagcatccacagtacaagccttgaacatcgtcctgcttcccagtgggttcagacctcacctctcagggagcgacctgggcaaagacagagaagctcccagaaggagagattgatccatgtctgtttgtaggacggagaaaccgcttgggtaacttgttcaagatatgatgcatgttgctttctaagaaagccctgtattttgtgattgcctttttttttttttaagatgctttcattttgccaaaataaaacagataatgtggatggttt

SEQ ID NO: 3370 - protein, 502 aa, Homo sapiens; identical to SEQ ID NO: 340

SEQ ID NO: 3371 - DNA, 757 bp, Homo sapiens
atatagtgaaaacccatctctattaaaaaatacaaacaatagcctagtgtgttggtgcacacctgtattcccacctactcgggagattgatgcacgagaattgcttgaacccggaaggcggaggttgcaatgagccaggatcatgacactgcactcgacagaccgagaccctgtcttaaaacaaataaacaaacaacaacaaaaacaaaaacacctttggctcattggttttgtgtctggttactaaaatgctaaataatatatacgttttccagcaagctgtgcagaaagctttatgagatgctggagctctgttattgtgggcttttggtgttacttgatatctcttcactgaggatttcttatgaagtgaaattgtacttttcaataggaagaccaataattgatgtaccacaggagaaagttttagtgatgctgtgcatgcttttgatctctcattcaaaggatcaatattaaataaaattgtcatgagctgtgttgaagacagggtgctttcaaatagaggtaatttgctcttgtgttgtaagaggaacatgtcaacaaagataggaaatgagggtgatcgtgcagatggcttgtatcttatatatgcaaaggagccaatctcagaagcacaaagaaaaaagtgtgcataccttattttgtacagataaagatgatgtctttttgttattgtctgtctgttttgtatgtgtctgagataagggatagagaggaaacatccgtcaggctaatt

SEQ ID NO: 3372 - protein, 58 aa, Homo sapiens
MLELCYCGLLVLLDISSLRISYEVKLYFSIGRPIIDVPQEKVLVMLCMLLISHSKDQY

SEQ ID NO: 3373 - DNA, 283 bp, Homo sapiens
cctgtttttattttcttcttatcacactctttcaagtttccttttctaaaaaaaccccccggcagaggcagagtgccctccggatatctgtccggcgccttgctgagtggtggaggtgagggataccagctccgggtgtgcctcttttctctccctggctgccaatcctgattttccctgcagtccccttggtttgtaaattgcctgcatttattctgtcagccaacatgtacaaaatgtaagaaagaatttttaaacaggtaataaattatatttataagca

SEQ ID NO: 3374 - protein, 56 aa, Homo sapiens
PVFIFFLSHSFKFPFLKKPPGRGRVPSGYLSGALLSGGGEGYQLRVCLFSLPGCQS

SEQ ID NO: 3375 - DNA, 391 bp, Homo sapiens
cgtgatgcctccagtctcattcatcagtctgaagaccacaatggactctgacctggatcatcatttaaaaatcatcagctggtcttttgcccaggctatgttacgcctttcaagtagttctgacaaggaagatgattattctaaccagcattatgatgttgtttgtttggcctgagtcgctctgcatcattaatattcagtagcatttataaaagctgtctagttagctctttaaaaacttttgtcctgcaaaatgtttgttagtcaacacactactttgtgtaaacaactattatgtttccttgggaccatcacaagctctttaacaaacacaaggactcaattcattcagcaggtggggattaaagaatcaaagcccagtagcaaaacc

SEQ ID NO: 3376 - protein, 56 aa, Homo sapiens
MPPVSFISLKTTMDSDLDHHLKIISWSFAQAMLRLSSSSDKEDDYSNQHYDVVCLA

SEQ ID NO: 3377 - DNA, 4355 bp, Homo sapiens
cagacttcggcgtgcggcggagctgcggctgctcctgctgctggggggagcggcggaggtggccgccttgcgcctccctggacttcccaagtgggggcagagcagtcgctcgcgggagacgtcagttagaaggcattgggaaagagggaccttcaaactcctcctcggcgtctcctctcctcccccttttggcccctgcctttggagaaagtggagtgtggcgcttggttgtcgttatttcttcggactgcttcgcggtgcacggattcagcttctgcccagtggggctttcagctgtttgcgcgtctctctgtccccctcccctccccccggcacacctctgtctacgatgaggaaaggtctgcgggcgacagcggcccgctgcggactgggactgggatacttgctgcaaatgctcgtgctacctgccctggccctgctcagcgccagcggcactggctccgccgcccaagatgatgacttttttcatgaactcccagaaacttttccttctgatccacctgagcctctgccacatttccttattgagcctgaagaagcttatattgtgaagaataagcccgtgaacctgtactgtaaagcaagccctgccacccagatctatttcaagtgtaatagtgaatgggttcatcagaaggaccacatagtagatgaaagagtagatgaaacttccggtctcattgtccgggaagtgagcattgagatttcgcgccagcaagtggaagaactctttggacctgaagattactggtgccagtgtgtggcctggagctccgcgggtaccacaaagagccggaaggcgtatgtgcgcattgcatatctacggaagacatttgagcaggaacccctaggaaaggaagtgtctttggaacaggaagtcttactccagtgtcgaccacctgaagggatcccagtggctgaggtggaatggttgaaaaatgaagacataattgatcccgttgaagatcggaatttttatattactattgatcacaacctcatcataaagcaggcccgactctctgatactgcaaattacacctgtgttgccaaaaacattgttgccaagaggaaaagtacaactgccactgtcatagtctatgtcaacggtggctggtccacctggacggagtggtctgtgtgtaacagccgctgtggacgagggtatcagaaacgtacaaggacttgtaccaacccggcaccactcaatgggggtgccttctgtgaagggcagagtgtgcagaaaatagcctgtactacgttatgcccagtggatggcaggtggacgccatggagcaagtggtctacttgtggaactgagtgcacccactggcgcaggagggagtgcacggcgccagcccccaagaatggaggcaaggactgcgacggcctcgtcttgcaatccaagaactgcactgatgggctttgcatgcagactgctcctgattcagatgatgttgctctctatgttgggattgtgatagcagtgatcgtttgcctggcgatctctgtagttgtggccttgtttgtgtatcggaagaatcatcgtgactttgagtcagatattattgactcttcggcactcaatgggggctttcagcctgtgaacatcaaggcagcaagacaagatctgctggctgtacccccagacctcacgtcagctgcagccatgtacagaggacctgtctatgccctgcatgacgtctcagacaaaatcccaatgaccaactctccaattctggatccactgcccaacctgaaaatcaaagtgtacaacacctcaggtgctgtcaccccccaagatgacctctctgagtttacgtccaagctgtcccctcagatgacccagtcgttgttggagaatgaagccctcagcctgaagaaccagagtctagcaaggcagactgatccatcctgtaccgcatttggcagcttcaactcgctgggaggtcaccttattgttcccaattcaggagtcagcttgctgattcccgctggggccattccccaagggagagtctacgaaatgtatgtgactgtacacaggaaagaaactatgaggccacccatggatgactctcagacacttttgacccctgtggtgagctgtgggcccccaggagctctgctcacccgcccagtcgtcctcactatgcatcactgcgcagaccccaataccgaggactggaaaatactgctcaagaaccaggcagcacagggacagtgggaggatgtggtggtggtcggggaggaaaacttcaccaccccctgctacattcagctggatgcagaggcctgccacatcctcacagagaacctcagcacctacgccctggtaggacattccaccaccaaagcggctgcgaagcgcctcaagctggccatctttgggcccctgtgctgctcctcgctggagtacagcatccgagtctactgtctggatgacacccaggatgccctgaaggaaattttacatcttgagagacagatgggaggacagctcctagaagaacctaaggctcttcattttaaaggcagcacccacaacctgcgcctgtcaattcacgatatcgcccattccctctggaagagcaaattgctggctaaatatcaggaaattccattttaccatgtttggagtggatctcaaagaaacctgcactgcaccttcactctggaaagatttagcctgaacacagtggagctggtttgcaaactctgtgtgcggcaggtggaaggagaagggcagatcttccagctcaactgcaccgtgtcagaggaacctactggcatcgatttgccgctgctggatcctgcgaacaccatcaccacggtcacggggcccagtgctttcagcatccctctccctatccggcagaagctctgtagcagcctggatgccccccagacgagaggccatgactggaggatgctggcccataagctgaacctggacaggtacttgaattactttgccaccaaatccagcccaactggcgtaatcctggatctttgggaagcacagaacttcccagatggaaacctgagcatgctggcagctgtcttggaagaaatgggaagacatgaaacggtggtgtccttagcagcagaagggcagtattaaccaccatgctggaaggggaaatgaaggacaaaaatgcacagggagtctgtggccgtccaggtgaatcacagctgaggaggaaatccagatgagaccaatgcacttcacaggcaagactgcagcaggagccagaaggaaaacagatacaactgcccatgtacatgcccactttactcggacatcatcacgggagttaagaaaaattgtgtaaatttgtaccttgaatttagctatcaacctaattttcctcttagttgggctgtatgctgtgtggtacaggatcttacagtttcctaggaaacgctttttattgctatccagatatatggataaactttcttaacaaacccaatttctacaaatgttgtttacatcaaattggacagggatgcagacactgtccatggctcgttctatttttgttcaaatcatttgaagttgaagctgtggacggtttgttgtgtctatttcagattagtaatttacagagaaatcacagacttttgctacaaatcgtgtgcatcaagtgtctcagataatcctcccatcagtgttctgtttctagaacttgtagaaccagtgttactgtttgtatcagggaagtggagaatctaagtgtaaaaaagaaataactaagactcctattccttggagggacccttctggtgccctttgggaataaagctgtagcactgcagggaagacagtgattcatgttcaaccccacaaacaagcatttttttcacaacatgtgtgtttgtttgtaatatgcaatatgaagtgtttttttttaaaggtattattattatttacaggtattctggtaaaatgatttttttaaatttctatttttgttagcagtgctgtttgttagtatttggttattgactagacctgtcccaccttttcacctatcaaggtgggtgtggtcatcagtttaattcaacatgcatcacttccttgaccttttacctttcccttattccaccccagaaaggtgattgataaatgctgaatggctttgtcagtctgttccttcagcttgctcaggcagggtctttctttctcctctgaggagtcttaaggagacgtgttctctattaagttcacttaatattgccgttgtgtggccccacgtcgactccctatggtgctctactctagaggcagtgtggttggaggaatggactctaaactggagatcaagaaa

SEQ ID NO: 3378 - protein, 931 aa, Homo sapiens
MRKGLRATAARCGLGLGYLLQMLVLPALALLSASGTGSAAQDDDFFHELPETFPSDPPEPLPHFLIEPEEAYIVKNKPVNLYCKASPATQIYFKCNSEWVHQKDHIVDERVDETSGLIVREVSIEISRQQVEELFGPEDYWCQCVAWSSAGTTKSRKAYVRIAYLRKTFEQEPLGKEVSLEQEVLLQCRPPEGIPVAEVEWLKNEDIIDPVEDRNFYITIDHNLIIKQARLSDTANYTCVAKNIVAKRKSTTATVIVYVNGGWSTWTEWSVCNSRCGRGYQKRTRTCTNPAPLNGGAFCEGQSVQKIACTTLCPVDGRWTPWSKWSTCGTECTHWRRRECTAPAPKNGGKDCDGLVLQSKNCTDGLCMQTAPDSDDVALYVGIVIAVIVCLAISVVVALFVYRKNHRDFESDIIDSSALNGGFQPVNIKAARQDLLAVPPDLTSAAAMYRGPVYALHDVSDKIPMTNSPILDPLPNLKIKVYNTSGAVTPQDDLSEFTSKLSPQMTQSLLENEALSLKNQSLARQTDPSCTAFGSFNSLGGHLIVPNSGVSLLIPAGAIPQGRVYEMYVTVHRKETMRPPMDDSQTLLTPVVSCGPPGALLTRPVVLTMHHCADPNTEDWKILLKNQAAQGQWEDVVVVGEENFTTPCYIQLDAEACHILTENLSTYALVGHSTTKAAAKRLKLAIFGPLCCSSLEYSIRVYCLDDTQDALKEILHLERQMGGQLLEEPKALHFKGSTHNLRLSIHDIAHSLWKSKLLAKYQEIPFYHVWSGSQRNLHCTFTLERFSLNTVELVCKLCVRQVEGEGQIFQLNCTVSEEPTGIDLPLLDPANTITTVTGPSAFSIPLPIRQKLCSSLDAPQTRGHDWRMLAHKLNLDRYLNYFATKSSPTGVILDLWEAQNFPDGNLSMLAAVLEEMGRHETVVSLAAEGQY

SEQ ID NO: 3379 - DNA, 8102 bp, Homo sapiens
ggtgctctgtgggcagctgggactggcccgccgaaagcacatggattacagtctgaggctgtaatgggaaagtcggttcctgggctgctgtctcatagacatcagcttgcagggaagctgggggctctccgaattgccctgctccggggcccctcctgctgcgtgactcacaggcacattgcagagagaagctgccgctcccagtaagtaatgaaaagagacatgaagaattggtatttcaaatgaccaccatgttgcaaaagtctgacagcaatgcaagcttcctccgtgctgccagagcaggcaacctggacaaagttgtggaatatctgaaggggggcatagacatcaatacctgcaatcagaatggactcaacgctctccatctggctgccaaggaaggccacgtggggctggtgcaggagctgctgggaagagggtcctctgtggattctgccactaagaagggaaataccgctcttcacattgcatctttggctggacaagcagaagttgtcaaagttcttgttaaggaaggagccaatattaatgcacagtctcagaatggctttactcctttatacatggctgcccaagagaatcacattgatgttgtaaaatatttgctggaaaatggagctaatcagagcactgctacagaggatggctttactcctctagctgtggcactccagcaaggacacaaccaggcggtggccatcctcttggagaatgacaccaaagggaaagtgaggctgccagctctgcatattgccgctaggaaagacgacaccaaatctgccgcacttctgcttcagaatgaccacaatgctgacgtacaatccaagatgatggtgaataggacaactgagagtggttttacccctttgcacatagctgcacattacggaaatgtcaacgtggcaactcttcttctaaaccggggagctgctgtggacttcacagccaggaatggaatcactcctctgcatgtggcttccaaaagaggaaatacaaacatggtgaagctcttactggatcgaggcggtcagatcgatgccaaaactagggatgggttgacaccacttcactgtgctgcacgaagtgggcatgaccaagtggtggaacttctgttggaacggggtgcccccttgctggcaaggactaagaatgggctgtctccactacacatggctgcccagggagaccacgtggaatgtgtgaagcacctgttacagcacaaggcacctgttgatgatgtcaccctagactacctgacagccctccacgttgctgcgcactgtggccactaccgtgtaaccaaactccttttagacaagagagccaatccgaacgccagagccctgaatggttttactccactgcacattgcctgcaagaaaaaccgcatcaaagtcatggaactgctggtgaaatatggggcttcaatccaagctataacagagtctggcctcacaccaatacatgtggctgccttcatgggccacttgaacattgtcctccttctgctgcagaacggagcctctccagatgtcactaacattcgtggtgagacggcactacacatggcagcccgagccgggcaggtggaagtggtccgatgcctcctgagaaatggtgcccttgttgatgccagagccagggaggaacagacacctttacatattgcctcccgcctgggtaagacagaaattgtccagctgcttctacaacatatggctcatccagatgcggccactacaaatgggtacacaccactgcacatctctgcccgggagggccaggtggatgtggcatcagtcctattggaagcaggagcagcccactccttagctaccaagaagggttttactcccctgcatgtagcagccaagtatggaagcctggatgtggcaaaacttctcttgcaacgccgtgctgccgcagattctgcagggaagaacggccttaccccgctccatgttgctgctcattatgacaaccagaaggtggcgctgctgttactggagaagggtgcttcccctcatgccactgccaagaatggctatactccgttacatattgctgccaagaagaatcaaatgcagatagcttccacactcctgaactatggagcagagacaaacattgtgacaaagcaaggagtaactccactccatctggcctcgcaggaggggcacacagatatggttaccttgcttctggataagggagccaatatccacatgtcaactaagagtggactcacatccttacaccttgcagcccaggaagataaagtgaatgttgctgatattctcaccaagcatggagctgatcaggatgctcatacaaagcttggttacacacctttaattgtggcctgtcactatggaaatgtgaaaatggtcaactttcttctgaagcagggagcaaatgttaacgcaaaaaccaagaacggctacacgcctttgcaccaggccgctcagcagggtcacacgcacatcatcaacgtcctgctccagcatggggccaagcccaacgccaccactgcgaatggcaacactgccttggcgattgctaagcgtctgggctacatctccgtggtcgacaccctgaaggttgtgactgaggaggtcaccaccaccaccacaactattacagaaaaacacaaactaaatgtacctgagacgatgactgaggttcttgatgtttctgatgaagagggtgatgacacaatgactggtgatgggggagaataccttaggcctgaggacctaaaagaactgggtgatgactcactacccagcagtcagttcctggatggtatgaattacctgcgatacagcttggagggaggacgatctgacagccttcgatccttcagttccgacaggtctcacactctgagccatgcctcctacctgagggacagtgccgtgatggatgactcagttgtgattcccagtcaccaggtgtcaactctagccaaggaggcagaaaggaattcttatcgcctaagctggggcactgagaacttagacaacgtggctctttcttctagtcctattcattcaggccgcgcctctccatgtcttgaacgtgacaacagcagtttcctggttagttttatggtggatgcccgaggtggtgctatgcgaggatgcagacacaatgggctccgaatcattattccacctcggaaatgtactgctccaacgcgagtcacctgccgactggtcaagcgccacagactggcaacaatgcctccaatggtggaaggagaaggcctggccagtcgcctgatcgaagttggaccttctggtgctcagttccttggtaaacttcacctgccaacggctcctcccccacttaatgagggagaaagtttggtcagccgcattcttcagctggggcctcctggaaccaaattccttgggcctgtgatcgtggagatccctcactttgcggcccttcgaggaaaggaaagggaactggtggtcctgcgcagtgagaatggggacagctggaaagagcatttctgtgactacactgaagatgaattgaatgaaattcttaacggcatggatgaagtactggatagcccagaagacctagaaaagaaacgaatctgccgcatcatcacccgagacttcccacagtactttgcagtggtgtctcgtatcaaacaggacagcaatctgattggcccagaaggaggtgtactgagcagcacagtggtgccccaggtgcaggccgtcttcccagagggggcactcaccaagcggatccgcgtaggcctgcaggctcaacctatgcacagtgagctggttaagaagatcctaggcaacaaagctaccttcagccctatagtcactttggaacctagaagaagaaaattccacaaaccaattaccatgaccattcctgtccccaaagcttcaagtgatgtcatgttgaatggttttgggggagatgcaccaaccttaagattactatgcagcataacaggtggaaccacccctgcccagtgggaagatattacaggaactacgccattaacatttgtcaatgaatgtgtttcctttacaacaaacgtgtctgccaggttctggctgatagattgtcgacagatccaggaatccgttacttttgcatcacaagtatacagagaaattatctgcgtaccttatatggccaaatttgtagtgtttgccaaatcacatgaccccattgaagccaggttgaggtgtttctgcatgactgatgataaagtggataagacccttgaacaacaagaaaattttgctgaggtggccagaagcagggatgtggaggtgttagaaggaaaacccatctacgttgattgtttcggcaacttggtaccattaactaaaagtggccagcatcatatattcagtttttttgccttcaaagaaaatagacttcctctatttgtcaaggtacgcgatacgactcaggaaccttgcggacgactatcatttatgaaggagccaaaatccacgagaggcctggtgcatcaagctatttgcaacttaaacatcactttgccgatttatacaaaggaatcagagtcagatcaagaacaggaggaagagatcgatatgacatcagaaaaaaatccacaggatgagcaggaacggatcgaggaaaggctggcttatattgctgatcaccttggcttcagctggacagaattagcaagagaactggatttcactgaggagcaaattcatcaaattcgaattgaaaatcccaactctcttcaagaccagagtcatgcactgttgaagtactggctagagagggatgggaaacatgctacagataccaacctcgttgaatgtctcaccaagatcaaccgaatggatattgttcatctcatggagaccaacacagaacctctccaggagcgcatcagtcatagttatgcagaaattgaacagaccattacactggatcatagtgaagggttctcggtacttcaagaggagttatgcactgcacagcacaagcagaaagaggagcaagctgtttctaaagaaagtgagacctgcgatcaccctcctatcgtctcagaggaagacatttctgttggttattccacttttcaggatggcgtccccaaaactgagggggacagctcagcaacagcactctttccccaaactcacaaggagcaagttcaacaggatttctcagggaaaatgcaagacctgcctgaagagtcatctctggaatatcagcaggaatattttgtgacaactccaggaacagaaacatcagagactcagaaggctatgatagtacccagctctcccagcaagacacctgaggaagttagcacccctgcagaggaggagaagctgtacctccagaccccaacatccagcgagcggggaggctctcccatcatacaagaacccgaagagccctcagagcacagagaggagagctctccgcggaaaaccagcctcgtaatagtggagtctgccgataaccagcctgagacctgtgaaagactcgatgaagatgcagcttttgaaaagggagacgatatgcctgaaatacccccagaaacagtcacagaagaagaatacattgatgagcatggacacaccgtggtaaagaaggttactaggaaaatcattaggcggtatgtatcctctgaaggcacagagaaagaagagattatggtgcagggaatgccacaggaacctgtcaacatcgaggaaggggatggctattccaaagttataaagcgtgttgtattgaagagtgacaccgagcagtcagaggacaacaatgagtaaagccatcacacagaagagggctgtggtgaaggaccagcatggaaaacgcattgacttggagcacctggaggatgtaccagaagcactagaccaggacgacctccagcgcgatctccagcagctccttcggcatttctgcaaggaggacttgaagcaagaggccaagtgaggggctgcccagttctcacaccagaaaccacacattcactcaatatgcagcttcctgtttcagtaggggagtgacctaactggcctaattaatgggataccccgacatttccactgttagcaaatatacggcattttgctttagttttcccccatcctctttaactataaagctaatttgtgaccaaagatggcatccttcatactggatgctgtatccaatactttgttgtgtctgtgctaacctgggaactggccacctccattgttctttgcttctgcacaagatccatgaaaatccattgatcagaagaacttcacctgcagacctcttcaagtgacactatgtaggaatccttccaaggaatatctatgtacaatgtatatagctgaaatgctcagatgaacaacatattaaaattaaaaccactgcctattgtaactacactgggcatcagaataaaaggcctctagaaattgctgaacaatggttaattaagatattgctaacacaatcgagtgataatacagttttactgcaaaagaagcacttcaaacctattatgtccttagaacttccagagtagccactgctcccagttaaaggtgggtcagtagccttgcagaactgtcctgagaagttattgctggtgctggccagccatggcttaggactccaacagccactctgagggaggggagaagggagcagaggccacgcagaatgaaccgatggggtattcagttgctggcagctacattgtgtggcattctagcatcttcaggtctttagatcttggacaagttggcagggtattttaaaagctataactactgtagttttccagttttcattgctgctttagcaaaccacgctgtcttacagtggtactttcttctggccactgcactgtagataattcattggaaacaagatttacccactacataaaaggttaaactccttcagtatgttggagtggtttctttttttttttctttctttcttttttttcttcaggtttatatcttctctaatacctgcatgtggcgtttaaaaatcaagaccacggtcaaacccctcttctaatcacattaattgtttccattctttttaccctgagtgagcacttttcactttccagctaggtctgtttttcagcttgcagacaagattgagaaatccttgaaaatttggttttggttaaaatttttggtttatttatttgaaatccacactcccttggaaactcttaagtgcatttgtgcacttctgtttgtttgtctcaaagaagggactgtaacaatctgagtaatttccatgtcctcttccttattcctctagtggttgaagctgtgtagcattttaacatatatatattcacaaatatattcatataaacagtatacattttgaatcagtcatttgttaaagaaaagtatattcaatgaagatgaaatttaaataaaaaaggacagagtctatcctccagggattgaacattttccaattatctggtcttttcctgttgtgcaaaaatgactcattgctccgaatgtcaaaaacaaatgcgacaaacaatggcacttcatcatttaaagtaatgttgccaagagaaaaaatttcctgggagggaggtttcccacaagccaaatctcctaagcctcaaatgctagcactttttggcagttggataggaaatgagacattctttggcagccaaaataagagaggccgatggtgaaactttttgagacaccctatggccttcttgtcaaaaccttcactggagctcaagaaaagcatttctgttgtgttatttgcagtgcagatgatgtctgtgtaacaacataatggttattcacctttttttgattttgatttttgctgtgttatcaaaaacttgaatactgtgagaagaagtgaattttcagttgacgaatcagcatcttgttcccatggtgataacactaattgaatatatctatgagggcatgtattagttaatggaaaaaaaaatacaacactaacaatacatagctgcaatgtgtacaatggctgatttaattaaataaaatgtacaagtgttaaatgtggca

SEQ ID NO: 3380 - protein, 1863 aa, Homo sapiens
MTTMLQKSDSNASFLRAARAGNLDKVVEYLKGGIDINTCNQNGLNALHLAAKEGHVGLVQELLGRGSSVDSATKKGNTALHIASLAGQAEVVKVLVKEGANINAQSQNGFTPLYMAAQENHIDVVKYLLENGANQSTATEDGFTPLAVALQQGHNQAVAILLENDTKGKVRLPALHIAARKDDTKSAALLLQNDHNADVQSKMMVNRTTESGFTPLHIAAHYGNVNVATLLLNRGAAVDFTARNGITPLHVASKRGNTNMVKLLLDRGGQIDAKTRDGLTPLHCAARSGHDQVVELLLERGAPLLARTKNGLSPLHMAAQGDHVECVKHLLQHKAPVDDVTLDYLTALHVAAHCGHYRVTKLLLDKRANPNARALNGFTPLHIACKKNRIKVMELLVKYGASIQAITESGLTPIHVAAFMGHLNIVLLLLQNGASPDVTNIRGETALHMAARAGQVEVVRCLLRNGALVDARAREEQTPLHIASRLGKTEIVQLLLQHMAHPDAATTNGYTPLHISAREGQVDVASVLLEAGAAHSLATKKGFTPLHVAAKYGSLDVAKLLLQRRAAADSAGKNGLTPLHVAAHYDNQKVALLLLEKGASPHATAKNGYTPLHIAAKKNQMQIASTLLNYGAETNIVTKQGVTPLHLASQEGHTDMVTLLLDKGANIHMSTKSGLTSLHLAAQEDKVNVADILTKHGADQDAHTKLGYTPLIVACHYGNVKMVNFLLKQGANVNAKTKNGYTPLHQAAQQGHTHIINVLLQHGAKPNATTANGNTALAIAKRLGYISVVDTLKVVTEEVTTTTTTITEKHKLNVPETMTEVLDVSDEEGDDTMTGDGGEYLRPEDLKELGDDSLPSSQFLDGMNYLRYSLEGGRSDSLRSFSSDRSHTLSHASYLRDSAVMDDSVVIPSHQVSTLAKEAERNSYRLSWGTENLDNVALSSSPIHSGRASPCLERDNSSFLVSFMVDARGGAMRGCRHNGLRIIIPPRKCTAPTRVTCRLVKRHRLATMPPMVEGEGLASRLIEVGPSGAQFLGKLHLPTAPPPLNEGESLVSRILQLGPPGTKFLGPVIVEIPHFAALRGKERELVVLRSENGDSWKEHFCDYTEDELNEILNGMDEVLDSPEDLEKKRICRIITRDFPQYFAVVSRIKQDSNLIGPEGGVLSSTVVPQVQAVFPEGALTKRIRVGLQAQPMHSELVKKILGNKATFSPIVTLEPRRRKFHKPITMTIPVPKASSDVMLNGFGGDAPTLRLLCSITGGTTPAQWEDITGTTPLTFVNECVSFTTNVSARFWLIDCRQIQESVTFASQVYREIICVPYMAKFVVFAKSHDPIEARLRCFCMTDDKVDKTLEQQENFAEVARSRDVEVLEGKPIYVDCFGNLVPLTKSGQHHIFSFFAFKENRLPLFVKVRDTTQEPCGRLSFMKEPKSTRGLVHQAICNLNITLPIYTKESESDQEQEEEIDMTSEKNPQDEQERIEERLAYIADHLGFSWTELARELDFTEEQIHQIRIENPNSLQDQSHALLKYWLERDGKHATDTNLVECLTKINRMDIVHLMETNTEPLQERISHSYAEIEQTITLDHSEGFSVLQEELCTAQHKQKEEQAVSKESETCDHPPIVSEEDISVGYSTFQDGVPKTEGDSSATALFPQTHKEQVQQDFSGKMQDLPEESSLEYQQEYFVTTPGTETSETQKAMIVPSSPSKTPEEVSTPAEEEKLYLQTPTSSERGGSPIIQEPEEPSEHREESSPRKTSLVIVESADNQPETCERLDEDAAFEKGDDMPEIPPETVTEEEYIDEHGHTVVKKVTRKIIRRYVSSEGTEKEEIMVQGMPQEPVNIEEGDGYSKVIKRVVLKSDTEQSEDNNE

SEQ ID NO: 3381 - DNA, 4160 bp, Homo sapiens
actggcccgccgaaagcacatggattacagtctgaggctgtaatgggaaagtcggttcctgggctgctgtctcatagacatcagcttgcagggaagctgggggctctccgaattgccctgctccggggcccctcctgctgcgtgactcacaggcacattgcagagagaagctgccgctcccagtaagtagtctgacagcaatgcaagcttcctccgtgctgccagagcaggcaacctggacaaagttgtggaatatctgaaggggggcatagacatcaatacctgcaatcagaatggactcaacgctctccatctggctgccaaggaaggccacgtggggctggtgcaggagctgctgggaagagggtcctctgtggattctgccactaagaagggaaataccgctcttcacattgcatctttggctggacaagcagaagttgtcaaagttcttgttaaggaaggagccaatattaatgcacagtctcagaatggctttactcctttatacatggctgcccaagagaatcacattgatgttgtaaaatatttgctggaaaatggagctaatcagagcactgctacagaggatggctttactcctctagctgtggcactccagcaaggacacaaccaggcggtggccatcctcttggagaatgacaccaaagggaaagtgaggctgccagctctgcatattgccgctaggaaagacgacaccaaatctgccgcacttctgcttcagaatgaccacaatgctgacgtacaatccaagatgatggtgaataggacaactgagagtggttttacccctttgcacatagctgcacattacggaaatgtcaacgtggcaactcttcttctaaaccggggagctgctgtggacttcacagccaggaatggaatcactcctctgcatgtggcttccaaaagaggaaatacaaacatggtgaagctcttactggatcgaggcggtcagatcgatgccaaaactagggatgggttgacaccacttcactgtgctgcacgaagtgggcatgaccaagtggtggaacttctgttggaacggggtgcccccttgctggcaaggactaagaatgggctgtctccactacacatggctgcccagggagaccacgtggaatgtgtgaagcacctgttacagcacaaggcacctgttgatgatgtcaccctagactacctgacagccctccacgttgctgcgcactgtggccactaccgtgtaaccaaactccttttagacaagagagccaatccgaacgccagagccctgaatggttttactccactgcacattgcctgcaagaaaaaccgcatcaaagtcatggaactgctggtgaaatatggggcttcaatccaagctataacagagtctggcctcacaccaatacatgtggctgccttcatgggccacttgaacattgtcctccttctgctgcagaacggagcctctccagatgtcactaacattcgtggtgagacggcactacacatggcagcccgagccgggcaggtggaagtggtccgatgcctcctgagaaatggtgcccttgttgatgccagagccagggaggaacagacacctttacatattgcctcccgcctgggtaagacagaaattgtccagctgcttctacaacatatggctcatccagatgcggccactacaaatgggtacacaccactgcacatctctgcccgggagggccaggtggatgtggcatcagtcctattggaagcaggagcagcccactccttagctaccaagaagggttttactcccctgcatgtagcagccaagtatggaagcctggatgtggcaaaacttctcttgcaacgccgtgctgccgcagattctgcagggaagaacggccttaccccgctccatgttgctgctcattatgacaaccagaaggtggcgctgctgttactggagaagggtgcttcccctcatgccactgccaagaatggctatactccgttacatattgctgccaagaagaatcaaatgcagatagcttccacactcctgaactatggagcagagacaaacattgtgacaaagcaaggagtaactccactccatctggcctcgcaggaggggcacacagatatggttaccttgcttctggataagggagccaatatccacatgtcaactaagagtggactcacatccttacaccttgcagcccaggaagataaagtgaatgttgctgatattctcaccaagcatggagctgatcaggatgctcatacaaagcttggttacacacctttaattgtggcctgtcactatggaaatgtgaaaatggtcaactttcttctgaagcagggagcaaatgttaacgcaaaaaccaagaacggctacacgcctttgcaccaggccgctcagcagggtcacacgcacatcatcaacgtcctgctccagcatggggccaagcccaacgccaccactgcgaatggcaacactgccttggcgattgctaagcgtctgggctacatctccgtggtcgacaccctgaaggttgtgactgaggaggtcaccaccaccaccacaactattacagaaaaacacaaactaaatgtacctgagacgatgactgaggttcttgatgtttctgatgaagagggtgatgacacaatgactggtgatgggggagaataccttaggcctgaggacctaaaagaactgggtgatgactcactacccagcagtcagttcctggatggtatgaattacctgcgatacagcttggagggaggacgatctgacagccttcgatccttcagttccgacaggtctcacactctgagccatgcctcctacctgagggacagtgccgtgatggatgactcagttgtgattcccagtcaccaggtgtcaactctagccaaggaggcagaaaggaattcttatcgcctaagctggggcactgagaacttagacaacgtggctctttcttctagtcctattcattcaggtttcctggttagttttatggtggatgcccgaggtggtgctatgcgaggatgcagacacaatgggctccgaatcattattccacctcggaaatgtactgctccaacgcgagtcacctgccgactggtcaagcgccacagactggcaacaatgcctccaatggtggaaggagaaggcctggccagtcgcctgatcgaagttggaccttctggtgctcagttccttggtaaacttcacctgccaacggctcctcccccacttaatgagggagaaagtttggtcagccgcattcttcagctggggcctcctggaaccaaattccttgggcctgtgatcgtggagatccctcactttgcggcccttcgaggaaaggaaagggaactggtggtcctgcgcagtgagaatggggacagctggaaagagcatttctgtgactacactgaagatgaaagaaaggtcgaagcaagttgcccatcagagtcaaaggcaaggaggacgtgccaaaaaagaccacccacaggccacatccagctgcgtcaccctctctgaagtcagagagacatgcgccagggtctccctcccctaaaacagaaagacactctactctttcctcttccgcaaaaactgaaaggcaccctccagtatcaccatcaagtaaaactgagaaacactcacctgtgtcaccctctgcaaaaacggaaagacattcacctgcgtcatcatcgagtaaaactgagaaacactcacctgtatcaccctcgacaaaaactgaaaggcactctcctgtgtcatctacaaaaacagaaagacacccacctgtttcgccttcaggcaaaacagacaaacgtccacctgtatcgccctccgggaggacagaaaaacacccgccagtatcgcctgggagaacagaaaaacgcttgcctgtttcaccctccggaagaacggacaagcaccaacctgtatcaacagctgggaaaactgagaagcacctgcctgtgtcaccttctggcaaaacagaaaagcaaccacctgtatcccccacttcaaaaacagagaggattgaggaaaccatgtctgttcgggagctgatgaaggctttccagtcaggtcaggacccttctaaacataaaactggactctttgagcacaaatcagc

SEQ ID NO: 3382 - protein, 1013 aa, Homo sapiens
MAAQENHIDVVKYLLENGANQSTATEDGFTPLAVALQQGHNQAVAILLENDTKGKVRLPALHIAARKDDTKSAALLLQNDHNADVQSKMMVNRTTESGFTPLHIAAHYGNVNVATLLLNRGAAVDFTARNGITPLHVASKRGNTNMVKLLLDRGGQIDAKTRDGLTPLHCAARSGHDQVVELLLERGAPLLARTKNGLSPLHMAAQGDHVECVKHLLQHKAPVDDVTLDYLTALHVAAHCGHYRVTKLLLDKRANPNARALNGFTPLHIACKKNRIKVMELLVKYGASIQAITESGLTPIHVAAFMGHLNIVLLLLQNGASPDVTNIRGETALHMAARAGQVEVVRCLLRNGALVDARAREEQTPLHIASRLGKTEIVQLLLQHMAHPDAATTNGYTPLHISAREGQVDVASVLLEAGAAHSLATKKGFTPLHVAAKYGSLDVAKLLLQRRAAADSAGKNGLTPLHVAAHYDNQKVALLLLEKGASPHATAKNGYTPLHIAAKKNQMQIASTLLNYGAETNIVTKQGVTPLHLASQEGHTDMVTLLLDKGANIHMSTKSGLTSLHLAAQEDKVNVADILTKHGADQDAHTKLGYTPLIVACHYGNVKMVNFLLKQGANVNAKTKNGYTPLHQAAQQGHTHIINVLLQHGAKPNATTANGNTALAIAKRLGYISVVDTLKVVTEEVTTTTTTITEKHKLNVPETMTEVLDVSDEEGDDTMTGDGGEYLRPEDLKELGDDSLPSSQFLDGMNYLRYSLEGGRSDSLRSFSSDRSHTLSHASYLRDSAVMDDSVVIPSHQVSTLAKEAERNSYRLSWGTENLDNVALSSSPIHSGFLVSFMVDARGGAMRGCRHNGLRIIIPPRKCTAPTRVTCRLVKRHRLATMPPMVEGEGLASRLIEVGPSGAQFLGKLHLPTAPPPLNEGESLVSRILQLGPPGTKFLGPVIVEIPHFAALRGKERELVVLRSENGDSWKEHFCDYTEDERKVEASCPSESKARRTCQKRPPTGHIQLRHPL

SEQ ID NO: 3383 - DNA, 1027 bp, Homo sapiens
ggggcatccccctttcacagggcactcattcttctctctcctgctgccatgtgaagaaggatgtgtttgcttcccttttcgccatgattataagtttcctgaggccttcctagctactgggaactgaaaatgaatttcatactccagtagtgttaccaaactacatttccccatcatggtagcctaagccaggaagtggagaaaagagaaggatgtcattaagtggaaaataatcagcaatctattgttgatggcagagacagcccatccagagtggccgctgtgaaaaagctggctgcagcggtgcggccgggattgcacactccatggggccagagggagcccagaacagggggagccccaaccccaccgagtttgcatcaggagcccacgctctcggtcaggctgcagccacacagccacagctccaaacccaggtaagcccctccacctgcaggctcagaagtgcctgttcccactccctggcctatccccactctcggcgccccctccggtgtggagcaaagttgaggccgagcccaggtgctgtcgcagcacagcagggtgtgcacgtgctgggggcaggaatgacatgccagccccctgctgcctcagccccctttggactttgggcactgacgagtgtggaagaggggccaggggagtggctgagggcagctctgcctgggcctaaaggtaaccctcagcacaaacagcctgggcgcgtggactacatgttgatgtcaggagggagactggttactgggcggaaaggggcgggtttccggagaaatctcaccttcaagccagggaggggctgaagcctggggccaggctaccagttccagacagaatctgcctcggaaagtgagaacttatcatgctttttccgagcccgcccatggccccccatggaccaatcaacatgcacttcctccctcctgagtccgtaaaaaccaccggacccagccagactcacacagatgtcaggactatcagctgcaagaaggagctacccacttcggat

SEQ ID NO: 3384 - protein, 164 aa, Homo sapiens [sequence omitted]

SEQ ID NO: 3385 - DNA, 425 bp, Homo sapiens
ttgccctcaaggacatgcataaaaagctaacggggcatggcaacatacagaaaaatgaagcaagcaggaaaagagcagatctacccactgggtctggagacctggatggcagtggaggctcagccagcaagccaagacacattgttcaagatagttaagacagttctacctataattcagacagccaggcatctatggtgtaggagtgaggcaatgtagaaggagagaatcaaggcagaagtttagagtcagatcatcccagcttactaataagcaagaagtcagcccatctgcccattaccctgcaacagtccccacggcatcctctctgtccttaaataaatagatccaaggcaagatgaatgaatgggttcagggaaagataaatatctccagaaaaatgcaataaagagaaattttgagcc

SEQ ID NO: 3386 - protein, 47 aa, Homo sapiens
MHKKLTGHGNIQKNEASRKRADLPTGSGDLDGSGGSASKPRHIVQDS

SEQ ID NO: 3387 - DNA, 369 bp, Homo sapiens
atctgtataaactttagtttatacaagcaaaagacagggaactctgtgatgaagaaatctctaaggactctgagaagaatggtcctgtactcgagtttgagttttaaactaggaaaatgactaataattgaaaataatgggaactctgtggaattttctttgtatgtcatcatgaaattgctgtgtaacaaacaaccaagatccaaaatagcaagactgggagagtttgtgtgctgcaggaagagaccaacaagaaacagaagatcagtcagtgcatgggtagatgacatctgtgcatcccattgtgtgaaaaataatctgctgattttgccctttgttctaaaataaattcattacataggccatatc

SEQ ID NO: 3388 - protein, 58 aa, Homo sapiens
MKLLCNKQPRSKIARLGEFVCCRKRPTRNRRSVSAWVDDICASHCVKNNLLILPFVLK

SEQ ID NO: 3389 - DNA, 369 bp, Homo sapiens
tttaaactaggaaaatgactaataattgaaaataatgggaactctgtggaattttctttgtatgtcatcatgaaattgctgtgtaacaaacaaccaagatccaaaatagcaagactgggaggtacgactgcagaaaaaaattcatcccatgataagaaccaatgggttgaaactgtccaataaacgttgcttaatgaagcccaggagcgattataaacatccaatgaatgagtttgtgtgctgcaggaagagaccaacaagaaacagaagatcagtcagtgcatgggtagatgacatctgtgcatcccattgtgtgaaaaataatctgctgattttgccctttgttctaaaataaattcattacatagg

SEQ ID NO: 3390 - protein, 68 aa, Homo sapiens
MIRTNGLKLSNKRCLMKPRSDYKHPMNEFVCCRKRPTRNRRSVSAWVDDICASHCVKNNLLILPFVLK

SEQ ID NO: 3391 - DNA, 542 bp, Homo sapiens
ctaggtgaaattcaagagtggacagaatagaaccatggagtattcagtgccagggaaatggccatcaggagccaaggaacaagaaactacttctggaaagaagaggcacacaggtacgatatgaaaggcagcccagaaaatggctaaggattctcaaaaagacaatgcagagaccccttcactacaagacaagaggcgcccctctcaggatctgccactatgtactccccttggctccaggccaacacatagcgttaaggtgcagcataagacaactagagaagtgttgggcttgccaaggaaggaaagtgaatatgcacacatggagtcaatttgcaccagaaggaaactggggagtactacatgcctggattctaaagagtctacttccctggaaagatgacctgctgacctgcatgacctacaacatgcacctagcaatcatttatgtatttgatatattttttaatttgagcaactattatgtgcctggcattctgtatggtaagggcaatgattcagaatgcaagcatgaaacatga

SEQ ID NO: 3392 - protein, 125 aa, Homo sapiens
MQRPLHYKTRGAPLRICHYVLPLAPGQHIALRCSIRQLEKCWACQGRKVNMHTWSQFAPEGNWGVLHAWILKSLLPWKDDLLTCMTYNMHLAIIYVFDIFFNLSNYYVPGILYGKGNDSECKHET

SEQ ID NO: 3393 - DNA, 5055 bp, Homo sapiens
aataatgcacctgactttaccaggggggaacaaccagccgagtagaacaaggaacagatgtaaagggaataaaaggagagagaaaaagagatgagattcgtttaaagaaatccaggggcagaagaggtggctgccgcggcagaggcagctagagcttacttccctgtctgcgtgagctgcaggcagaggacgctttcaccagttgcagatgtaacctcgggaattcctgggccgtcggtttgtttgccaaacaaagtcttttcttctctggctcagacactgaagaggctcctggatttttctgcgatcctgccacaagctggcagttacccgagagccttcccaaggagctggaggagaaatgagcccttgtgggcggaagatgggcgaagggcgtcagcagcggcgggctccggtcgggaagctccttctgctccccgggaggagagatacaccccatgggcggtcaggcagcagcggcgccaggacgcagcgctccctgctctggctcttggtgcacgtgtggctgtgggcggcctcgggctcctctgcccagttgttcaacctcaccctttccgtagatgaggggcttcccccggacacgctggtaggtgacatccgcgccgggctgccggccgcgcagcagcaggaggggagcggcttctttctgtcggaggactccgatgactccccgctgctggacgacttccacgtgcacccggacaccggcatcatccgcactgcgcggcgcctggaccgcgagcggcgggaccactacagcttcgtcgccgccacgctgctgggcgctgtggtgcaggtggagattcgcgtcaacgacgtgaatgaccactcgccccgctttcccctcgactccctgcaactcgacgtctccgagctcagcccgccagggaccgccttccgcctgccagttgcccacgatccggacgccggactgttcagcactcagggctacaccctggtgcaaccgtccgacctgcccaaggaccccgcaggcccgttcttccagttgcgctaccggactccggggccactaccgtcaccgcttttgccaggctcctcgtcacccctggagcctctagatctggtgctgctgcggcgcttggaccgagaggaggcggcggcgcaccggctgcagatcgaggcatgggacggcggccgaccccggcgcaccggcctcctgagcgtggagctgcgcgtgctggatgagaacgacaacccgccggtctttgagcaggacgagtaccgcgccgcggtgcgcgaggacgcccagccgggcgccgaggtctgtcgcgtgcgcgccaccgaccgcgacctggggcccaatggcttcgtgcgctacagcgtccgcgcccggcaagtgcctggggcgggtagcggcggcggggcactgggcgacgcggcctacttcgcggtggaggagctgagcggcgtggtgcgagtgtggagacctctggaccgcgaggcacaggcctggcaccagttggtggtggaggcccgcgatggaggcgccgagcctgaggttgccacggtgcgcgtgtccatcgccgtgctggacgtgaatgacaaccggccagcaattcacgtgctctttctcacagagggaggcgtcgcccgtgtctctgaaggcgcccgaccgggcgactacgtggctcgcgtctcggtgtctgacgcggacggtgactgggagaaggaagatgaggccacaggggagcttggtgtgggtcttggagacgggagcatctctctgtccttggaaggcggagagggagacttcgcgttgctacccggcggccccccaggggtatttttcctttgcgtggaggggcccctggacagagagagccgcgatctgtatgagttactactggtggccacggacgcggggtccccgccgctgagcacggaggagacgctgctactccgggtcgctgacctcaatgaccaaccacctctcttcagccaacagcattacaaggcctcagtgtccgaggccgcggcccctggcactgtagtcatgtgggtcagcgcctccgatgccgacgaggcaggcagtgatcacgcctggctgcgctacactgtagtccaactctcggctccctgcaatctcggctccctgcaatcaaagatggtccacaccgcagagtgtggaccatcttttgccattgattccgaaagcggtgcgatcagcactatccggactctagaccgagaggtccaggaggcggtggagctgaaagtggtggcccaggacctcggagagcccccactctctgccacctgcctggtgagcatcaccgtagatgatgtgaatgacaatgagcccatcttctggaggcaggtgtacaatgccaccattgcagagcatgccccggttggacactgctttctgcaggtgacagcctctgatgcagattcaggactctatggctttattgaatattctctttatgatggattcctgagctatgaagcacctcaggcattccggatcgaccctcatgatgggcaaatctgtgtttctcaagatatcgacagggaaagggatccagctacctatgatctcctggtggaagctaaggatgggggtgggctaagtgcccaagcctttgttcgtgtggacctggaggacgtgaatgataatcatcctgtgtttaacccatcaacctatgtgacgagcatcagtgatgagacccagccaggcaccgagatcatcaatgttcttgccactgaccaggactctgggatatatgggacagtggcttatgagcttattccaggaaacgtgtcgtccctttttaccattgactccaccacaggaattatttacttaacattacctcttagtcatttggaatctaccacactttcgttgatggtctctgctcaagacggtggtgggctcacagctgtcattaatgccgatgtcaccatacacattttccagacaactctggcacctgctgagtttgaaaggcctaagtacactttcttagtttatgaagatgtgcctgaagatagtcccattggaacagtgaaagcaagagagcccttgaactcctcagaaccaatcttttacaggatttcttctggtgatctcggcggaaagttctccattcacccgcggctgggcactattcgcacccggaagcccctggatcacgagacgcagcccgtggttgtgctcacggtgcaggcgcagctcggcagcgccccagcctgcagcagcaccgaggtcaacataacagtcatggatgtcaatgacaaccacccagcgttcctcaggacctcggatgagattagaatatcccagaccacgccccctggcacagccttgtacctcgcacgtgcggaagacagagacagtgggcggaacggactcatccggtactccatcgccagcccgcagccaggcgtctttgccatcgacagagccctgggggtgctgttcctcaacggcagcctgggcgcgggcgagcagcgggagctcacgctgactctcagggccgaggaccaaggcgtgcatcctcaggcagccctgctggtgctgacagtcgttatcgagaaacgcgaacacagcccatcctggactttcgaacatttggtctatcaagtggaagtcagtgagtctctctcaccgatgacacaaatgctgcaaacacaggcgcacccacttggcccccagcgtgcagcctcgcctcttaggtactcgctggaacccagcgtagactctgctatgtttggaatccgcccttacacgggctggatttatttgcggcgacagtttgactatgaatccacccaaacatataattttagagtgtttgcttggatccccgaggacggattcttgcaaaatgtgagcactacagtcattgttcgtgtctgggatgagaatgacaattcccccaccttcttgcatgatgtgttgtttttgaaagtcgaagagagccctgttccccaaggggtaataggcaaaattacagctattgacatggactctggaaagaatggacagctattatatttccttttgtctgatggaaaattcttcaagatgaatcctaatacaggagagttaatcaattgggtggcactggatcgtgagcaccgggggcaccatgagatgactgtgctagtgacagaccgcggctccccaccacgaaacgccaccatggcggtttacgtctcagttactgacatcaatgataacaggcccttcttcccccagtgtctccctggaaaggagttacacgtgaaggttctggaaggtcaaccagtaaatatgttggttacaactgtgtttgcaaaggatcctgatgaaggaaataatgcagaagttacatactcagtatcttcagctagacctatgcctctgaagggaaaaacagcatttgggaagcagtcgtgcaaaaaacaaacaaacaaacaaacaaacaaaatcctgacctgaatctggtcagttctctagatctgcctcccaatttaaggaaaacataagaatagaggaacatattatgctacacgttggagatgcaacagcaaatctagatcatggaaaatgtcaggatacaagttccagtttattcaacaaataaattgcaaggacaaatagagagatgggtggcaggaatccatagattaaagaaatatgcaatatatggactttattttgatcttaatgtaaacaagaaaaataaagagtatttatgggatggttgaaaatttgaaaacttactgaatatttggtgatactgtgaaccattattaatttttaaggtataatatggtactgtgatgattgtgttaaaatatttattttttaaagatgcattttgaaatatatacagaagaaataatatgacttctggaacttacttcaaaaaaaatgggagaagcgaagtatatacatggggaatagatgaaataagattggccatgagctgatcattgttgaagctaggtgatggactcgtgaaagtttattataccattttgtccacttttttgtatgcattttccataataaaaattttt

SEQ ID NO: 3394 - protein, 1369 aa, Homo sapiens
MSPCGRKMGEGRQQRRAPVGKLLLLPGRRDTPHGRSGSSGARTQRSLLWLLVHVWLWAASGSSAQLFNLTLSVDEGLPPDTLVGDIRAGLPAAQQQEGSGFFLSEDSDDSPLLDDFHVHPDTGIIRTARRLDRERRDHYSFVAATLLGAVVQVEIRVNDVNDHSPRFPLDSLQLDVSELSPPGTAFRLPVAHDPDAGLFSTQGYTLVQPSDLPKDPAGPFFQLRYRTPGPLPSPLLPGSSSPLEPLDLVLLRRLDREEAAAHRLQIEAWDGGRPRRTGLLSVELRVLDENDNPPVFEQDEYRAAVREDAQPGAEVCRVRATDRDLGPNGFVRYSVRARQVPGAGSGGGALGDAAYFAVEELSGVVRVWRPLDREAQAWHQLVVEARDGGAEPEVATVRVSIAVLDVNDNRPAIHVLFLTEGGVARVSEGARPGDYVARVSVSDADGDWEKEDEATGELGVGLGDGSISLSLEGGEGDFALLPGGPPGVFFLCVEGPLDRESRDLYELLLVATDAGSPPLSTEETLLLRVADLNDQPPLFSQQHYKASVSEAAAPGTVVMWVSASDADEAGSDHAWLRYTVVQLSAPCNLGSLQSKMVHTAECGPSFAIDSESGAISTIRTLDREVQEAVELKVVAQDLGEPPLSATCLVSITVDDVNDNEPIFWRQVYNATIAEHAPVGHCFLQVTASDADSGLYGFIEYSLYDGFLSYEAPQAFRIDPHDGQICVSQDIDRERDPATYDLLVEAKDGGGLSAQAFVRVDLEDVNDNHPVFNPSTYVTSISDETQPGTEIINVLATDQDSGIYGTVAYELIPGNVSSLFTIDSTTGIIYLTLPLSHLESTTLSLMVSAQDGGGLTAVINADVTIHIFQTTLAPAEFERPKYTFLVYEDVPEDSPIGTVKAREPLNSSEPIFYRISSGDLGGKFSIHPRLGTIRTRKPLDHETQPVVVLTVQAQLGSAPACSSTEVNITVMDVNDNHPAFLRTSDEIRISQTTPPGTALYLARAEDRDSGRNGLIRYSIASPQPGVFAIDRALGVLFLNGSLGAGEQRELTLTLRAEDQGVHPQAALLVLTVVIEKREHSPSWTFEHLVYQVEVSESLSPMTQMLQTQAHPLGPQRAASPLRYSLEPSVDSAMFGIRPYTGWIYLRRQFDYESTQTYNFRVFAWIPEDGFLQNVSTTVIVRVWDENDNSPTFLHDVLFLKVEESPVPQGVIGKITAIDMDSGKNGQLLYFLLSDGKFFKMNPNTGELINWVALDREHRGHHEMTVLVTDRGSPPRNATMAVYVSVTDINDNRPFFPQCLPGKELHVKVLEGQPVNMLVTTVFAKDPDEGNNAEVTYSVSSARPMPLKGKTAFGKQSCKKQTNKQTNKILT

SEQ ID NO: 3395 - DNA, 3312 bp, Homo sapiens
ctcagttgctaaacctgaggttctagccaaagaggagcttcctcctcttctctgaacttgactcctgtagcttgcaacaagtagctatggaggtacagaaacattctgtacacacccttgtgttcaggtcgttgaagaggacccatgacatgtttgtagctgataatggaaaacctgtgcctttagatgaagagagtcacaaacgaaaaatggcaatcaagcttcgtaatgagtatggtcctgtgttgcatatgcctacttcaaaagaaaatcttaaagagaagggtcctcagaatgcaacggattcatatgttcataaacagtaccctgccaatcaaggacaagaagttgaatactttgtggcaggtacacatccatacccaccaggacctggggttgctttgacagcagatactaagatccagagaatgccaagtgaatcagctgcacagtccttagcggtggcattacctttgcagaccaaggctgatgcaaatcgtactgcccctagtggaagtgaataccgacatcctggggcttctgaccgtccacagcctacagcgatgaattcaattgtcatggagactggcaataccaagaactctgcactgatggctaaaaaagcccctacaatgccaaaaccccagtggcacccaccgtggaaactctacagggttatcagtgggcatcttggctgggttcgatgtattgctgtggaacctggaaatcagtggtttgttactggatctgctgacagaactataaagatctgggacttggctagtggcaaattaaaactgtcattgactgggcatattagtactgtgcggggcgtgatagtaagcacaaggagcccatatctgttctcttgtggagaagacaaacaagtgaaatgctgggatctcgaatacaataaggttatacggcattatcatggacatttaagtgcagtgtatggtttggatttgcacccgacaatcgatgtgttggtaacctgtagtcgagattcaactgcacggatttgggatgtgagaactaaagccagtgtacacacattatctggacatacaaatgcagttgctacagtgagatgtcaggctgcagaaccacaaattattacaggaagccatgatactacaattcgattatgggatctggtggctggaaaaacaagagtgacattaacaaatcacaaaaaatcagttagggctgtggttttacatccaagacattacacatttgcatctggttctccagataacataaagcagtggaaattccctgatggaagtttcattcaaaatctttccggtcataatgctattattaacacattgacggtaaattctgatggagtgcttgtatctggagctgacaatggcaccatgcatctttgggactggagaactggctacaattttcagagagttcacgcagctgtgcaacctgggtctttggacagtgaatcaggaatatttgcttgtgcttttgatcagtctgaaagtcgattactaacagctgaagctgataaaaccattaaagtatacagagaggatgacacagccacagaagaaactcatccagtcagctggaaaccagaaattatcaagagaaagagattttaatgaatgtggaattttttctctctctttttttttctttttaattaaaaaaaaaaaagcttggcgttcatgaggatatccagtcattttgtgctctggctgggaatataaaggagaaattcacttgcttcaatcattgctgcttcatattttacaataaactgtcccctgtcccctacccctgtgtttttatttctaaaacaatttgtgatactaggaagatgcagatatcaagtaaatgcaggtttattgaacataactattctagatgtaatattttgacagtcttattagaaaacccccttttttaaaaaaaatgtatgaaaccgataattaggacatttgaaggagcagtagtttttttttagtcctttaaaaaataacatctgtgactaataatttgagattaaaagatttgaagtcttaatttatgtatgtttattccaaaaacagtttttgagtgtatgttctacaaagttctgcactagatactgttcaggaaatagacaagtaagatgtgtctatcctctaagacttccagtttggtagcttagtatagaaattctgtaacagaggtgcaggtgaaatgctgggggaacagaagggataagaccatttatttttctcaggaaggattgtggaagacttcatagagtaagtggcattggagattaccttgaagtgaaggaagacaaagaaggaaaagagatgaggcataaagtgatgaaaccaggcacaagaaagtgtgcggtgtgttctgggacaaagaatgttctgctactgtcgaataatgggactaaagctggcttgttctggggaaagctcatataagtatggattttattcctcaactagtaggataccaatactggtattgaaacttggggaaaataactggagataccagtgcagctatttaaagctgtagcaagggctgcaatcttgcggagattttaaagagaagttttaaagtttctaatactgatgcctctttttggtaaatacaagttttataaatcctgccctgggatcctgattccccattaatcaagatttgtcagacttcaccttctataattagaaaacacagttataagaacagtcaattttttaaattttccaaattaaaaaattgcaccatgattttgaacaagcacttccaattacattacccatcttgtatgccataggtgggagtataattgtcacagcctttaggaatgtagttttctgggatttattgaaactttgaaccttttggcctactaagttcattcctaggaaactgcctaatgggaatgatctgacaagtgtacacaagcaaagtcattgcacctttgttctttaatacttaaaactagcccaaatgccctgtcagtaagggactggtttaatagatggtacctttatgcaatttgtttctaagtattcgttaagagagtgaggaatgtctggattattagggcaagatttctaaacttgggtaaaaaaaaaagttgtgcaagcatttttgtggacaacttgatgctctaaaatataagtaacaccacattactaacagtggctttgttaggaagcagaattatggaagaactttcatgggtggctttacatatttctataatgttttaattttctataagcatgtatttcgtaaacttaaataaagaaaaaagaacactacacttgc

SEQ ID NO: 3396 - protein, 512 aa, Homo sapiens
MEVQKHSVHTLVFRSLKRTHDMFVADNGKPVPLDEESHKRKMAIKLRNEYGPVLHMPTSKENLKEKGPQNATDSYVHKQYPANQGQEVEYFVAGTHPYPPGPGVALTADTKIQRMPSESAAQSLAVALPLQTKADANRTAPSGSEYRHPGASDRPQPTAMNSIVMETGNTKNSALMAKKAPTMPKPQWHPPWKLYRVISGHLGWVRCIAVEPGNQWFVTGSADRTIKIWDLASGKLKLSLTGHISTVRGVIVSTRSPYLFSCGEDKQVKCWDLEYNKVIRHYHGHLSAVYGLDLHPTIDVLVTCSRDSTARIWDVRTKASVHTLSGHTNAVATVRCQAAEPQIITGSHDTTIRLWDLVAGKTRVTLTNHKKSVRAVVLHPRHYTFASGSPDNIKQWKFPDGSFIQNLSGHNAIINTLTVNSDGVLVSGADNGTMHLWDWRTGYNFQRVHAAVQPGSLDSESGIFACAFDQSESRLLTAEADKTIKVYREDDTATEETHPVSWKPEIIKRKRF

SEQ ID NO: 3397 - DNA, 3356 bp, Homo sapiens
gagcttgcatcacatccgccgcctgggcgcccaattccggaaggtgctgcacagctgtggcggcgggtactgcgttagtgattagagtttcttccctgccggaggtgggatacacggtagcatcatggtcgaggaggtacagaaacattctgtacacacccttgtgttcaggtcgttgaagaggacccatgacatgtttgtagctgataatggaaaacctgtgcctttagatgaagagagtcacaaacgaaaaatggcaatcaagcttcgtaatgagtatggtcctgtgttgcatatgcctacttcaaaagaaaatcttaaagagaagggtcctcagaatgcaacggattcatatgttcataaacagtaccctgccaatcaaggacaagaagttgaatactttgtggcaggtacacatccatacccaccaggacctggggttgctttgacagcagatactaagatccagagaatgccaagtgaatcagctgcacagtccttagcggtggcattacctttgcagaccaaggctgatgcaaatcgtactgcccctagtggaagtgaataccgacatcctggggcttctgaccgtccacagcctacagcgatgaattcaattgtcatggagactggcaataccaagaactctgcactgatggctaaaaaagcccctacaatgccaaaaccccagtggcacccaccgtggaaactctacagggttatcagtgggcatcttggctgggttcgatgtattgctgtggaacctggaaatcagtggtttgttactggatctgctgacagaactataaagatctgggacttggctagtggcaaattaaaactgtcattgactgggcatattagtactgtgcggggcgtgatagtaagcacaaggagcccatatctgttctcttgtggagaagacaaacaagtgaaatgctgggatctcgaatacaataaggttatacggcattatcatggacatttaagtgcagtgtatggtttggatttgcacccgacaatcgatgtgttggtaacctgtagtcgagattcaactgcacggatttgggatgtgagaactaaagccagtgtacacacattatctggacatacaaatgcagttgctacagtgagatgtcaggctgcagaaccacaaattattacaggaagccatgatactacaattcgattatgggatctggtggctggaaaaacaagagtgacattaacaaatcacaaaaaatcagttagggctgtggttttacatccaagacattacacatttgcatctggttctccagataacataaagcagtggaaattccctgatggaagtttcattcaaaatctttccggtcataatgctattattaacacattgacggtaaattctgatggagtgcttgtatctggagctgacaatggcaccatgcatctttgggactggagaactggctacaattttcagagagttcacgcagctgtgcaacctgggtctttggacagtgaatcaggaatatttgcttgtgcttttgatcagtctgaaagtcgattactaacagctgaagctgataaaaccattaaagtatacagagaggatgacacagccacagaagaaactcatccagtcagctggaaaccagaaattatcaagagaaagagattttaatgaatgtggaattttttctctctctttttttttctttttaattaaaaaaaaaaaagcttggcgttcatgaggatatccagtcattttgtgctctggctgggaatataaaggagaaattcacttgcttcaatcattgctgcttcatattttacaataaactgtcccctgtcccctacccctgtgtttttatttctaaaacaatttgtgatactaggaagatgcagatatcaagtaaatgcaggtttattgaacataactattctagatgtaatattttgacagtcttattagaaaacccccttttttaaaaaaaatgtatgaaaccgataattaggacatttgaaggagcagtagtttttttttagtcctttaaaaaataacatctgtgactaataatttgagattaaaagatttgaagtcttaatttatgtatgtttattccaaaaacagtttttgagtgtatgttctacaaagttctgcactagatactgttcaggaaatagacaagtaagatgtgtctatcctctaagacttccagtttggtagcttagtatagaaattctgtaacagaggtgcaggtgaaatgctgggggaacagaagggataagaccatttatttttctcaggaaggattgtggaagacttcatagagtaagtggcattggagattaccttgaagtgaaggaagacaaagaaggaaaagagatgaggcataaagtgatgaaaccaggcacaagaaagtgtgcggtgtgttctgggacaaagaatgttctgctactgtcgaataatgggactaaagctggcttgttctggggaaagctcatataagtatggattttattcctcaactagtaggataccaatactggtattgaaacttggggaaaataactggagataccagtgcagctatttaaagctgtagcaagggctgcaatcttgcggagattttaaagagaagttttaaagtttctaatactgatgcctctttttggtaaatacaagttttataaatcctgccctgggatcctgattccccattaatcaagatttgtcagacttcaccttctataattagaaaacacagttataagaacagtcaattttttaaattttccaaattaaaaaattgcaccatgattttgaacaagcacttccaattacattacccatcttgtatgccataggtgggagtataattgtcacagcctttaggaatgtagttttctgggatttattgaaactttgaaccttttggcctactaagttcattcctaggaaactgcctaatgggaatgatctgacaagtgtacacaagcaaagtcattgcacctttgttctttaatacttaaaactagcccaaatgccctgtcagtaagggactggtttaatagatggtacctttatgcaatttgtttctaagtattcgttaagagagtgaggaatgtctggattattagggcaagatttctaaacttgggtaaaaaaaaaagttgtgcaagcatttttgtggacaacttgatgctctaaaatataagtaacaccacattactaacagtggctttgttaggaagcagaattatggaagaactttcatgggtggctttacatatttctataatgttttaattttctataagcatgtatttcgtaaacttaaataaagaaaaaagaacactacacttgc

SEQ ID NO: 3398 - protein, 514 aa, Homo sapiens; identical to SEQ ID NO: 348

SEQ ID NO: 3399 - DNA, 2047 bp, Homo sapiens
ctcagttgctaaacctgaggttctagccaaagaggagcttcctcctcttctctgaacttgactcctgtagcttgcaacaagtagctatggaggtacagaaacattctgtacacacccttgtgttcaggtcgttgaagaggacccatgacatgtttgtagctgataatggaaaacctgtgcctttagatgaagagagtcacaaacgaaaaatggcaatcaagcttcgtaatgagtatggtcctgtgttgcatatgcctacttcaaaagaaaatcttaaagagaagggtcctcagaatgcaacggattcatatgttcataaacagtaccctgccaatcaaggacaagaagttgaatactttgtggcaggtacacatccatacccaccaggacctggggttgctttgacagcagatactaagatccagagaatgccaagtgaatcagctgcacagtccttagcggtggcattacctttgcagaccaaggctgatgcaaatcgtactgcccctagtggaagtgaataccgacatcctggggcttctgaccgtccacagcctacagcgatgaattcaattgtcatggagactggcaataccaagaactctgcactgatggctaaaaaagcccctacaatgccaaaaccccagtggcacccaccgtggaaactctacagggttatcagtgggcatcttggctgggttcgatgtattgctgtggaacctggaaatcagtggtttgttactggatctgctgacagaactataaagatctgggacttggctagtggcaaattaaaactgtcattgactgggcatattagtactgtgcggggcgtgatagtaagcacaaggagcccatatctgttctcttgtggagaagacaaacaagtgaaatgctgggatctcgaatacaataaggttatacggcattatcatggacatttaagtgcagtgtatggtttggatttgcacccgacaatcgatgtgttggtaacctgtagtcgagattcaactgcacggatttgggatgtgagaactaaagccagtgtacacacattatctggacatacaaatgcagttgctacagtgagatgtcaggctgcagaaccacaaattattacaggaagccatgatactacaattcgattatgggatctggtggctggaaaaacaagagtgacattaacaaatcacaaaaaatcagttagggctgtggttttacatccaagacattacacatttgcatctggttctccagataacataaagcagtggaaattccctgatggaagtttcattcaaaatctttccggtcataatgctattattaacacattgacggtaaattctgatggagtgcttgtatctggagctgacaatggcaccatgcatctttgggactggagaactggctacaattttcagagagttcacgcagctgtgcaacctgggtctttggacagtgaatcaggaatatttgcttgtgcttttgatcagtctgaaagtcgattactaacagctgaagctgataaaaccattaaagtatacagagaggatgacacagccacagaagaaactcatccagtcagctggaaaccagaaattatcaagagaaagagattttaatgaatgtggaattttttctctctctttttttttctttttaattaaaaaaaaaaaagcttggcgttcatgaggatatccagtcattttgtgctctggctgggaatataaaggagaaattcacttgcttcaatcattgctgcttcatattttacaataaactgtcccctgtcccctacccctgtgtttttatttctaaaacaatttgtgatactaggaagatgcagatatcaagtaaatgcaggtttattgaacataactattctagatgtaatattttgacagtcttattagaaaacccccttttttaaaaaaaatgtatgaaaccgataattaggacatttgaaggagcagtagtttttttttagtcctttaaaaaataacatctgtgactaataatttgagattaaaagatttgaagtctt

SEQ ID NO: 3400 - protein, 512 aa, Homo sapiens; identical to SEQ ID NO: 3396

SEQ ID NO: 3401 - DNA, 2091 bp, Homo sapiens
gagcttgcatcacatccgccgcctgggcgcccaattccggaaggtgctgcacagctgtggcggcgggtactgcgttagtgattagagtttcttccctgccggaggtgggatacacggtagcatcatggtcgaggaggtacagaaacattctgtacacacccttgtgttcaggtcgttgaagaggacccatgacatgtttgtagctgataatggaaaacctgtgcctttagatgaagagagtcacaaacgaaaaatggcaatcaagcttcgtaatgagtatggtcctgtgttgcatatgcctacttcaaaagaaaatcttaaagagaagggtcctcagaatgcaacggattcatatgttcataaacagtaccctgccaatcaaggacaagaagttgaatactttgtggcaggtacacatccatacccaccaggacctggggttgctttgacagcagatactaagatccagagaatgccaagtgaatcagctgcacagtccttagcggtggcattacctttgcagaccaaggctgatgcaaatcgtactgcccctagtggaagtgaataccgacatcctggggcttctgaccgtccacagcctacagcgatgaattcaattgtcatggagactggcaataccaagaactctgcactgatggctaaaaaagcccctacaatgccaaaaccccagtggcacccaccgtggaaactctacagggttatcagtgggcatcttggctgggttcgatgtattgctgtggaacctggaaatcagtggtttgttactggatctgctgacagaactataaagatctgggacttggctagtggcaaattaaaactgtcattgactgggcatattagtactgtgcggggcgtgatagtaagcacaaggagcccatatctgttctcttgtggagaagacaaacaagtgaaatgctgggatctcgaatacaataaggttatacggcattatcatggacatttaagtgcagtgtatggtttggatttgcacccgacaatcgatgtgttggtaacctgtagtcgagattcaactgcacggatttgggatgtgagaactaaagccagtgtacacacattatctggacatacaaatgcagttgctacagtgagatgtcaggctgcagaaccacaaattattacaggaagccatgatactacaattcgattatgggatctggtggctggaaaaacaagagtgacattaacaaatcacaaaaaatcagttagggctgtggttttacatccaagacattacacatttgcatctggttctccagataacataaagcagtggaaattccctgatggaagtttcattcaaaatctttccggtcataatgctattattaacacattgacggtaaattctgatggagtgcttgtatctggagctgacaatggcaccatgcatctttgggactggagaactggctacaattttcagagagttcacgcagctgtgcaacctgggtctttggacagtgaatcaggaatatttgcttgtgcttttgatcagtctgaaagtcgattactaacagctgaagctgataaaaccattaaagtatacagagaggatgacacagccacagaagaaactcatccagtcagctggaaaccagaaattatcaagagaaagagattttaatgaatgtggaattttttctctctctttttttttctttttaattaaaaaaaaaaaagcttggcgttcatgaggatatccagtcattttgtgctctggctgggaatataaaggagaaattcacttgcttcaatcattgctgcttcatattttacaataaactgtcccctgtcccctacccctgtgtttttatttctaaaacaatttgtgatactaggaagatgcagatatcaagtaaatgcaggtttattgaacataactattctagatgtaatattttgacagtcttattagaaaacccccttttttaaaaaaaatgtatgaaaccgataattaggacatttgaaggagcagtagtttttttttagtcctttaaaaaataacatctgtgactaataatttgagattaaaagatttgaagtctt

SEQ ID NO: 3402 - protein, 514 aa, Homo sapiens; identical to SEQ ID NO: 348

SEQ ID NO: 3403 - DNA, 1799 bp, Homo sapiens
ctcagttgctaaacctgaggttctagccaaagaggagcttcctcctcttctctgaacttgactcctgtagcttgcaacaagtagctatggaggtacagaaacattctgtacacacccttgtgttcaggtcgttgaagaggacccatgacatgtttgtagctgataatggaaaacctgtgcctttagatgaagagagtcacaaacgaaaaatggcaatcaagcttcgtaatgagtatggtcctgtgttgcatatgcctacttcaaaagaaaatcttaaagagaagggtcctcagaatgcaacggattcatatgttcataaacagtaccctgccaatcaaggacaagaagttgaatactttgtggcaggtacacatccatacccaccaggacctggggttgctttgacagcagatactaagatccagagaatgccaagtgaatcagctgcacagtccttagcggtggcattacctttgcagaccaaggctgatgcaaatcgtactgcccctagtggaagtgaataccgacatcctggggcttctgaccgtccacagcctacagcgatgaattcaattgtcatggagactggcaataccaagaactctgcactgatggctaaaaaagcccctacaatgccaaaaccccagtggcacccaccgtggaaactctacagggttatcagtgggcatcttggctgggttcgatgtattgctgtggaacctggaaatcagtggtttgttactggatctgctgacagaactataaagatctgggacttggctagtggcaaattaaaactgtcattgactgggcatattagtactgtgcggggcgtgatagtaagcacaaggagcccatatctgttctcttgtggagaagacaaacaagtgaaatgctgggatctcgaatacaataaggttatacggcattatcatggacatttaagtgcagtgtatggtttggatttgcacccgacaatcgatgtgttggtaacctgtagtcgagattcaactgcacggatttgggatgtgagaactaaagccagtgtacacacattatctggacatacaaatgcagttgctacagtgagatgtcaggctgcagaaccacaaattattacaggaagccatgatactacaattcgattatgggatctggtggctggaaaaacaagagtgacattaacaaatcacaaaaaatcagttagggctgtggttttacatccaagacattacacatttgcatctggttctccagataacataaagcagtggaaattccctgatggaagtttcattcaaaatctttccggtcataatgctattattaacacattgacggtaaattctgatggagtgcttgtatctggagctgacaatggcaccatgcatctttgggactggagaactggctacaattttcagagagttcacgcagctgtgcaacctgggtctttggacagtgaatcaggaatatttgcttgtgcttttgatcagtctgaaagtcgattactaacagctgaagctgataaaaccattaaagtatacagagaggatgacacagccacagaagaaactcatccagtcagctggaaaccagaaattatcaagagaaagagattttaatgaatgtggaattttttctctctctttttttttctttttaattaaaaaaaaaaaagcttggcgttcatgaggatatccagtcattttgtgctctggctgggaatataaaggagaaattcacttgcttcaatcattgctgcttcatattttacaataaactgtcccctgtcccct

SEQ ID NO: 3404 - protein, 512 aa, Homo sapiens; identical to SEQ ID NO: 3396

SEQ ID NO: 3405 - DNA, 1843 bp, Homo sapiens
gagcttgcatcacatccgccgcctgggcgcccaattccggaaggtgctgcacagctgtggcggcgggtactgcgttagtgattagagtttcttccctgccggaggtgggatacacggtagcatcatggtcgaggaggtacagaaacattctgtacacacccttgtgttcaggtcgttgaagaggacccatgacatgtttgtagctgataatggaaaacctgtgcctttagatgaagagagtcacaaacgaaaaatggcaatcaagcttcgtaatgagtatggtcctgtgttgcatatgcctacttcaaaagaaaatcttaaagagaagggtcctcagaatgcaacggattcatatgttcataaacagtaccctgccaatcaaggacaagaagttgaatactttgtggcaggtacacatccatacccaccaggacctggggttgctttgacagcagatactaagatccagagaatgccaagtgaatcagctgcacagtccttagcggtggcattacctttgcagaccaaggctgatgcaaatcgtactgcccctagtggaagtgaataccgacatcctggggcttctgaccgtccacagcctacagcgatgaattcaattgtcatggagactggcaataccaagaactctgcactgatggctaaaaaagcccctacaatgccaaaaccccagtggcacccaccgtggaaactctacagggttatcagtgggcatcttggctgggttcgatgtattgctgtggaacctggaaatcagtggtttgttactggatctgctgacagaactataaagatctgggacttggctagtggcaaattaaaactgtcattgactgggcatattagtactgtgcggggcgtgatagtaagcacaaggagcccatatctgttctcttgtggagaagacaaacaagtgaaatgctgggatctcgaatacaataaggttatacggcattatcatggacatttaagtgcagtgtatggtttggatttgcacccgacaatcgatgtgttggtaacctgtagtcgagattcaactgcacggatttgggatgtgagaactaaagccagtgtacacacattatctggacatacaaatgcagttgctacagtgagatgtcaggctgcagaaccacaaattattacaggaagccatgatactacaattcgattatgggatctggtggctggaaaaacaagagtgacattaacaaatcacaaaaaatcagttagggctgtggttttacatccaagacattacacatttgcatctggttctccagataacataaagcagtggaaattccctgatggaagtttcattcaaaatctttccggtcataatgctattattaacacattgacggtaaattctgatggagtgcttgtatctggagctgacaatggcaccatgcatctttgggactggagaactggctacaattttcagagagttcacgcagctgtgcaacctgggtctttggacagtgaatcaggaatatttgcttgtgcttttgatcagtctgaaagtcgattactaacagctgaagctgataaaaccattaaagtatacagagaggatgacacagccacagaagaaactcatccagtcagctggaaaccagaaattatcaagagaaagagattttaatgaatgtggaattttttctctctctttttttttctttttaattaaaaaaaaaaaagcttggcgttcatgaggatatccagtcattttgtgctctggctgggaatataaaggagaaattcacttgcttcaatcattgctgcttcatattttacaataaactgtcccctgtcccct

SEQ ID NO: 3406 - protein, 514 aa, Homo sapiens; identical to SEQ ID NO: 348

SEQ ID NO: 3407 - DNA, 522 bp, Homo sapiens
cagtaccctgatcttttagctttttagaattcttgcaagttgtctcctatttatattcgtcctccagtttgtaaatcattatctttcacttaagcattttctttattatattcaggcactagttatgtagtaaattttcagccttgaattgatccagttatcttcttgagataatgaatacctattctctttcctaatatgtctattgtgtttttatagatttgggatgtgagaactaaagccagtgtacacacattatctggacatacaaatgcagttgctacagtgagatgtcaggctgcagaaccacaaattattacaggaagccatgatactacaattcgattatgggatctggtggctggaaaaacaagagtgacattaacaaatcacaaaaaatcagttagggctgtggttttacatccaagacagtaagtgtattttcctaattagcttcttgtttttcttcagttcttaagataatgctgaaatgctagtggtgttagcactgcttttggcagt

SEQ ID NO: 3408 - protein, 71 aa, Homo sapiens
IWDVRTKASVHTLSGHTNAVATVRCQAAEPQIITGSHDTTIRLWDLVAGKTRVTLTNHKKSVRAVVLHPRQ

SEQ ID NO: 3409 - DNA, 1585 bp, Homo sapiens
gggtttttcatcggggagtgggagtggactgaaggcttggccgctccgcctcactgagccggctcagccagcgcagctgttcctggaacgccagtcccttaggatgggagagagcggagaaggcaaagaggaacagactgggaaagagactggatagattctaatatggctacatcctggtgggaggcaggacactgaagtacttagaacccctcagaatggccagatcctgctcatgcttgggctagaagaatggaacctttgtaattctggacttgtaaatggaaacacatcacttactgtgaaccacatcccagacagacatgggcaggtgaaaacaaattcttccagatggcctgacagcacctgtctacagtacagtattgaggcacacaggaccttggaaataaaagggaatattacaaatactgcagagacacaaggattagttgtttgtttgtttaagggagtaacatccagaagaaacaattagtaatatttctttactgcttgagtacattttatcatcagatggccaatcatataactgggtttattcaagaaatttttttctgtaaaatataaagtgaatcacctatctaattttgataacagaaagcccagggagcagcagcttaaaccataagagcatatactgtttacctgaagagagagaaggtggttccaagtgctctccaaagccccatgatgtcaggacatgggtcagcatctctacagctctcctgcttctctctcatgggtgcaaagtggcttctcacatctcaacatgccaaggcaggaagctgggatacaagggcaaggagagagctcctctcttctacagagaaggaaacatctttcccacaagcctggcaccctgcccttcactctccatgtgatgggaccacaaggcccctcccagctgcagaatgttggggaagagggtgcctgattctctggcttctgtagctggaggcaggcactggagaaagagatgggaatggccaatgggtagccatttctatcgtgatacagtcaaataacaggacttttaaaaggaaataatttcttgagaatagcagagcacaccagtatgctcgaataaaaatggtaactggatttcctgaactgttaaattaaacatgcattgctgatttcctctttctgcagctgctctgcttctaactatccgtctcttctgtctgtggctcaagatccatcatctttagaatataaaatccttcttatggttttatttgtcctttgtttgctggtccctccttgcctgccttcaatatttttggctttcttcccttgctttgctgggatgtgtgatttatcctatcaccggagatctctgtgagaaagtactggatgtttatttgcctgcatatgtcagaagctccaggcagggctgcctcgtcccacaacttcaggggagccattcatttccatgtgccttgcacagcctgtgcggccacaatcggcagcactgagtttgggcaacagagaaatggtttcactggaaaagacacagttttaaattcccctttccaaaataaatctattttcagcattatcactc

SEQ ID NO: 3410 - protein, 85 aa, Homo sapiens
MLGLEEWNLCNSGLVNGNTSLTVNHIPDRHGQVKTNSSRWPDSTCLQYSIEAHRTLEIKGNITNTAETQGLVVCLFKGVTSRRNN

SEQ ID NO: 3411 - DNA, 1889 bp, Homo sapiens
tgtttggcatcccactgaccccacatctgtttcgctgctaatgctctgctgccagaactatccaagctgcctccctctgggcccagggactattgctgaagagatgacatctctgtatgttacccaggctggactggaactctgggctcaagccatcctcctgcctcacctcctgaagtgttgggattacaggaaagggtcccaatccagaccccaagggaggattcttggatctcatgcaagaaagaattcaggaactccaagatgggaggcaagctcagcaagaagaagaagggctacaatgtgaacgacgagaaagccaaggagaaagacaagaaggccgagggcgcggcgacggaagaggaggggaccccgaaggagagtgagccccaggcggccgcagagcccgccgaggccaaggagggcaaggagaagcccgaccaggacgccgagggcaaggccgaggagaaggagggcgagaaggacgcggcggctgccaaggaggaggccccgaaggcggagcccgagaagacggagggcgcggcagaggccaaggctgagcccccgaaggcgcccgagcaggagcaggcggcccccggccccgctgcgggcggcgaggcccccaaagctgctgaggccgccgcggccccggccgagagcgcggcccctgccgccggggaggagcccagcaaggaggaaggggaacccaaaaagactgaggcgcccgcagctcctgccgcccaggagaccaaaagtgacggggccccagcttcagactcaaaacccggcagctcggaggctgccccctcttccaaggagacccccgcagccacggaagcgcctagttccacacccaaggcccagggccccgcagcctctgcagaagagcccaagccggtggaggccccggcagctaattccgaccaaaccgtaaccgtgaaagagtgacaaggacagcctataggaaaaacaataccacttaaaacaatctcctctctctctctctctctctctctctatctctctctctatctcctctctctctctcctctcctatctctcctctctctctctcctatactaacttgtttcaaattggaagtaatgatatgtattgcccaaggaaaaatacaggatgttgtcccatcaagggagggagggggtgggagaatccaaatagtatttttgtggggaaatatctaatataccttcagtcaactttaccaagaagtcctggatttccaagatccgcgtctgaaagtgcagtacatcgtttgtacctgaaactgccgccacatgcactcctccaccgctgagagttgaatagcttttcttctgcaatgggagttgggagtgatgcgtttgattctgcccacagggcctgtgccaaggcaatcagatctttatgagagcagtattttctgtgttttctttttaatttacagcctttcttattttgatatttttttaatgttgtggatgaatgccagctttcagacagagcccacttagcttgtccacatggatctcaatgccaatcctccattcttcctctccagatatttttgggagtgacaaacattctctcatcctacttagcctacctagatttctcatgacgagttaatgcatgtccgtggttgggtgcacctgtagttctgtttattggtcagtggaaatgaaaaaaaaaaaaaaaaaaagtctgcgttcattgcagttccagtttctcttccattctgtgtcacagacaccaacacaccactcattggaaaatggaaaaaaaaaacaaaaaaaaaacaaaaaaatgtacaatggatgcattgaaattatatgtaattgtataaatggtgcaacagtaataaagttaaacaattaaaaagaagtaataa

SEQ ID NO: 3412 - protein, 88 aa, Homo sapiens
MLCCQNYPSCLPLGPGTIAEEMTSLYVTQAGLELWAQAILLPHLLKCWDYRKGSQSRPQGRILGSHARKNSGTPRWEASSARRRRATM

SEQ ID NO: 3413 - DNA, 2941 bp, Homo sapiens
atttatttggaaccgttggataagaagtgctcgggctctcgctcagacttagggagctgcctcgaggtgatgaatgacaccccctggcaccagctacccttctcagaccccagtccagcccgctcccgacgtcgactacgattccgctacctcggctggcagcgaggttggggtgagccccagctgcaggcgcgtctgggctgcgccgctgcaaacgagttgcgcaccttgggcggctccgcacctgcacccgcacccgcggggctcagccccgaaggctgcagcttcgggggaggcgcggtcgccgaggtccagctggtggggcgagagacgtcgcccctcggaggatgctctcggaacttgggagaggaaggagggaagagaagaggggaaaggggccgtcgatgtttttgatgtctgtgctttaatggaggccaccaatattgagaagacggggttggccgaggcagcccgcacgctgctgcttgcgagcgctcgagtcaaagctagggccaaccgcggcttgtccgggtgccctaagggggcggacacttggtttagcaccgggacacagaatagccaccggggtaggaagatgcgttcactttgcttacctgttggcaagagggacatacaaaaataacgtaacgtgacatcgttgacaacggtagctctttgattacacaaaagccaattttaccttcccgcaaaagccagttgacgcctttggaacttttatttgcggcattttggcgccctctggctgtgtttggatcgctttcatgctcgcctgcgtcccagccaagaaaaaatcgatggagctgcaggttgtcctcaggatggttctgccctcaggacctgggcgtgaattcagggacagggtggccctccagaaccggagtgacaaactgtaaccatacttagggaggcagacgtcaaaggcaagtacatctgtattcaactgggtaaagccatgtgaagacgtgcctgcctccctgttaccttccaccatgattgtaagcttcctgaggcctccccagccatgcctgctgtatagcctgcagaacagtttcagtcgatttgattataaagcaaaggtttgggaagaaagactcatattcctcctgagatgcaacctcaagtcttaggaaaagaaagttttgaactcaggttccgggaatgtggaagaggaagctcttaaagggcaagtagactttgcaacatgctcgttttcaggattctcctcctttgtcctcaaccctgcccagtgttcccctaactccacctaagccactccataaagttaggtcccattcctctattccttcactactaatgacagctaatagagctaaacagaataccacaataagccagaagctgcctttttttattattattattattcattgcccaatttgtagaactctctgaattcaattaaagtttggcaaagcctgtgcaaatgaaaccaagtacctattttttgctcatcataaacccaaaagttttctagagaactaactgaaagagattttcaccaaatctttttatttttttaatctagagaatacaattgagaaccaaatcaataaatatcctcaactgttacctttgttataagggaactacgatgaaccgtgcttgccccacatttaccctagcagcaactatgctttttctatctctggccttaccctgccttcctgcctccagagtctgagatggagaaaggcaaagtcagatggaggatagagctgggcagggagttgctgccagcaacaattggagttgctggtttgctttcaacactgaccccactttattggccatgagttaaggcagtcaaatgggcatctaggaaacatgaccaagatctgcattagggaagcaaagcagattaaaaggcacaattgctggccaggcatggtggctcacacctctaatcctagtgagaggtgaagccagttggacttcctgggtcgagtggggtggggtcttggagaaattttctatctagctagaggattataaatgcaccaatcagctctgtgtctagctaaaggtttgtaaacgcaccaatcagcactctgtaaaaacgcaccaatcaatgctctgtgtctagctgaaggtttgtaaatgcaccaatcagcactccgtaaaacggactgatcagtgctttgtaaaatggaccaatcagcaggatgtaggcagggccaaataagggaaaaaaagctggcacccaagccaacaggggcaacctgcttgagtccctttccacattgtggaagctttgttccttcactcttcatgataaatcttgctgctgctcactctttgggtccgcactacctttatgagctgtaacactcaccacgagggtctgtggcttcattccttaagttagcaagaccacgaacccacagggaggaacaaacaactccgggcacaccacctttaagagctataacactcactgcgaaggtctgtggcttcactcctgtagtcagcaaaaccacaaacccaccggaaggaagaaactccagacacatctaaacatctgaaggaacaaactctggacacaccatctttaagaactgtaacactcaccgtgagggtccgtggcttcattcttgaagtcagggagaccaagaacccaccggaaggaacaaactccggacacactagcacttacaggaggcccaggtgggaagatcacttgaggccaggagtttgagaccagcctgggcaacgtagtcagaccccatctctacaaaaaaatttaaaaaattagccgagcatggtggcaagtgccagtaatcccagctactcttggaggctgaggcaggaagagcccttgagcccaggagctggaggctgcagtgaactatgatcaaaccactgtagtccagcctgagtgacagagtgagaccctgcctct

SEQ ID NO: 3414 - protein, 45 aa, Homo sapiens
MIVSFLRPPQPCLLYSLQNSFSRFDYKAKVWEERLIFLLRCNLKS

SEQ ID NO: 3415 - DNA, 391 bp, Homo sapiens
gattacacaaaagccaattttaccttcccgcaaaagccagttgacgcctttggaacttttatttgcggcattttggcgccctctggctgtgtttggatcgctttcatgctcgcctgcgtcccagccaagaaaaaatcgatggagctgcaggttgtcctcaggatggttctgccctcaggacctgggcgtgaattcagggacagggtggccctccagaaccggagtgacaaactgtaaccatacttagggaggcagacgtcaaaggcaagtacatctgtattcaactgggtaaagccatgtgaagacgtgcctgcctccctgttaccttccaccatgattgtaagcttcctgaggcctccccagccatgcctgctgtatagcctgcagaaca

SEQ ID NO: 3416 - protein, 43 aa, Homo sapiens [sequence omitted]

SEQ ID NO: 3417 - DNA, 2433 bp, Homo sapiens
gcagaccctcccctctcccctccagcctggacacgcccgcctccccttgactccccccagctctgggcccccacctcccctcccctccagcacagtcacccccatttctctcctatccgccatcctggttcctcccttccccccacctcccaactctgtgccccgccaacgtttcctaaatgccctctattcagatcccccctccgcctcccctctcctctcctccattcctgcgtcccccttcccccgccgcgccgcctgggctgtccgtggacttctcccactctctcactctctcactcactctctctctctctctctctctctcactctctctctctctctccccctcatttatttggaaccgttggataagaagtgctcgggctctcgctcagacttagggagctgcctcgaggtgatgaatgacaccccctggcaccagctacccttctcagaccccagtccagcccgctcccgacgtcgactacgattccgctacctcggctggcagcgaggttggggtgagccccagctgcaggcgcgtctgggctgcgccgctgcaaacgagttgcgcaccttgggcggctccgcacctgcacccgcacccgcggggctcagccccgaaggctgcagcttcgggggaggcgcggtcgccgaggtccagctggtggggcgagagacgtcgcccctcggaggatgctctcggaacttgggagaggaaggagggaagagaagaggggaaaggggccgtcgatgtttttgatgtctgtgctttaatggaggccaccaatattgagaagacggggttggccgaggcagcccgcacgctgctgcttgcgagcgctcgagtcaaagctagggccaaccgcggcttgtccgggtgccctaagggggcggacacttggtttagcaccgggacacagaatagccaccggggtaggaagatgcgttcactttgcttacctgttggcaagagggacatacaaaaataacgtaactgacaaactgtaaccatacttagggaggcagacgtcaaaggcaagtacatctgtattcaactgggtaaaggaagagtttttcagcctggcgtggtggctcacacctgtaatcccagcactttgggaggccaaggaagtctctactgattctaaatttcacctctgatccgaaccctggtggtctgatgatattacttcctacttctgggacctctaccctacgaaacccacctctcactgaaacaagtggatatctttgtggttgctgccacgggatttaagagtcctttttttttttttgatacggagtcttgctctgtcacccaagctggagtgcagtggtgtgatctcagctctctgcaacccccacctcctgggttcaagcgattctcctgcctcagcctcctgagtagctgggattacaggcattcaccaccatgcccagctaatttctgtattttcagtagagacggggtttcactatgttggccaggatggtcttgatctcctgaccttaagagatcctcctgcctcggcctcccaaagggctgagattacaggcgtgagccaccacgcccagcctaagagtccatttgaagcatttttattctaagaaaatttatttccatatgtagttgggatgaaaagtctatgaaatccattcaaaacaaaggtgctttcaactatactgtttgaagttacagttttgtttcttcccttatcctgtgctatcttaagccatatgttgttgtaaattaacaggaaagagggcatttaaaacaaatggtttatgtgaatagcattaatcccgtcaagactagtttgtgacaagggctaaagattgcactcttgccttttaagctcaaccaagttaaacatctgaactatttctgctgtcttgtaaatattaagatgtaacacgtttctgatgtttgttgacatttgttgtacttttgatgaacaattagcctgcaagaatattaacaggaaattccattcatgagataagcagctgtttgtgcaaagcttcagccagatcatgggaccaaaaatcttctttatgcaactactgtttgttgaatagtcagcattccttgcatgttcaaaaggaaatgctttggaaataacttttatggctaattttgacttttatattttcgtaaggagaaaataactttcatggttaatgttgactcttatacttgcaggtagtaaaataatgtcctttatcaccatgtaaatttcaaacagtagtcattgacaaatccctagtaatttccaaattgtaatgcagaatcctaaggctggtgttaagatccctgagtccacgtcatatcataatgcatgattattttattgaaataaaaacctacaattatatgaaacactctctctctctcttttttttttttagacagagtcttgctctgtc

SEQ ID NO: 3418 - protein, 189 aa, Homo sapiens
MTPPGTSYPSQTPVQPAPDVDYDSATSAGSEVGVSPSCRRVWAAPLQTSCAPWAAPHLHPHPRGSAPKAAASGEARSPRSSWWGERRRPSEDALGTWERKEGREEGKGAVDVFDVCALMEATNIEKTGLAEAARTLLLASARVKARANRGLSGCPKGADTWFSTGTQNSHRGRKMRSLCLPVGKRDIQK

SEQ ID NO: 3419 - DNA, 1862 bp, Homo sapiens
gggagcgagcgcgagaaatgcagaggctgcagcggcggcggcggcggcagtagcggcagcggcgacgacggcggcggcagcgctccaactggctcctcgctccgggctccgccgtcgagccgggagagagcctccgccagcggccaggcaccagccagacgacgccagcgaccccggcctctcggcggcaccgcgctaactcaggggctgcataggcacccagagccgaactccaagatgggaggcaagctcagcaagaagaagaagggctacaatgtgaacgacgagaaagccaaggagaaagacaagaaggccgagggcgcggcgacggaagaggaggggaccccgaaggagagtgagccccaggcggccgcagagcccgccgaggccaaggagggcaaggagaagcccgaccaggacgccgagggcaaggccgaggagaaggagggcgagaaggacgcggcggctgccaaggaggaggccccgaaggcggagcccgagaagacggagggcgcggcagaggccaaggctgagcccccgaaggcgcccgagcaggagcaggcggcccccggccccgctgcgggcggcgaggcccccaaagctgctgaggccgccgcggccccggccgagagcgcggcccctgccgccggggaggagcccagcaaggaggaaggggaacccaaaaagactgaggcgcccgcagctcctgccgcccaggagaccaaaagtgacggggccccagcttcagactcaaaacccggcagctcggaggctgccccctcttccaaggagacccccgcagccacggaagcgcctagttccacacccaaggcccagggccccgcagcctctgcagaagagcccaagccggtggaggccccggcagctaattccgaccaaaccgtaaccgtgaaagagtgacaaggacagcctataggaaaaacaataccacttaaaacaatctcctctctctctctctctctctctctctatctctctctctatctcctctctctctctcctctcctatctctcctctctctctctcctatactaacttgtttcaaattggaagtaatgatatgtattgcccaaggaaaaatacaggatgttgtcccatcaagggagggagggggtgggagaatccaaatagtatttttgtggggaaatatctaatataccttcagtcaactttaccaagaagtcctggatttccaagatccgcgtctgaaagtgcagtacatcgtttgtacctgaaactgccgccacatgcactcctccaccgctgagagttgaatagcttttcttctgcaatgggagttgggagtgatgcgtttgattctgcccacagggcctgtgccaaggcaatcagatctttatgagagcagtattttctgtgttttctttttaatttacagcctttcttattttgatatttttttaatgttgtggatgaatgccagctttcagacagagcccacttagcttgtccacatggatctcaatgccaatcctccattcttcctctccagatatttttgggagtgacaaacattctctcatcctacttagcctacctagatttctcatgacgagttaatgcatgtccgtggttgggtgcacctgtagttctgtttattggtcagtggaaatgaaaaaaaaaaaaaaaaaaagtctgcgttcattgcagttccagtttctcttccattctgtgtcacagacaccaacacaccactcattggaaaatggaaaaaaaaaacaaaaaaaaaacaaaaaaatgtacaatggatgcattgaaattatatgtaattgtataaatggtgcaacagtaataaagttaaacaattaaaaagaagtaataa

SEQ ID NO: 3420 - protein, 227 aa, Homo sapiens; identical to SEQ ID NO: 350

SEQ ID NO: 3421 - DNA, 1723 bp, Homo sapiens
gcggcggcggcggcggcagtagcggcagcggcgacgacggcggcggcagcgctccaactggctcctcgctccgggctccgccgtcgagccgggagagagcctccgccagcggccaggcaccagccagacgacgccagcgaccccggcctctcggcggcaccgcgctaactcaggggctgcataggcacccagagccgaactccaagatgggaggcaagctcagcaagaagaagaagggctacaatgtgaacgacgagaaagccaaggagaaagacaagaaggccgagggcgcggcgacggaagaggagggcgagaaggacgcggcggctgccaaggaggaggccccgaaggcggagcccgagaagacggagggcgcggcagaggccaaggctgagcccccgaaggcgcccgagcaggagcaggcggcccccggccccgctgcgggcggcgaggcccccaaagctgctgaggccgccgcggccccggccgagagcgcggcccctgccgccggggaggagcccagcaaggaggaaggggaacccaaaaagactgaggcgcccgcagctcctgccgcccaggagaccaaaagtgacggggccccagcttcagactcaaaacccggcagctcggaggctgccccctcttccaaggagacccccgcagccacggaagcgcctagttccacacccaaggcccagggccccgcagcctctgcagaagagcccaagccggtggaggccccggcagctaattccgaccaaaccgtaaccgtgaaagagtgacaaggacagcctataggaaaaacaataccacttaaaacaatctcctctctctctctctctctctctctctatctctctctctatctcctctctctctctcctctcctatctctcctctctctctctcctatactaacttgtttcaaattggaagtaatgatatgtattgcccaaggaaaaatacaggatgttgtcccatcaagggagggagggggtgggagaatccaaatagtatttttgtggggaaatatctaatataccttcagtcaactttaccaagaagtcctggatttccaagatccgcgtctgaaagtgcagtacatcgtttgtacctgaaactgccgccacatgcactcctccaccgctgagagttgaatagcttttcttctgcaatgggagttgggagtgatgcgtttgattctgcccacagggcctgtgccaaggcaatcagatctttatgagagcagtattttctgtgttttctttttaatttacagcctttcttattttgatatttttttaatgttgtggatgaatgccagctttcagacagagcccacttagcttgtccacatggatctcaatgccaatcctccattcttcctctccagatatttttgggagtgacaaacattctctcatcctacttagcctacctagatttctcatgacgagttaatgcatgtccgtggttgggtgcacctgtagttctgtttattggtcagtggaaatgaaaaaaaaaaaaaaaaaaagtctgcgttcattgcagttccagtttctcttccattctgtgtcacagacaccaacacaccactcattggaaaatggaaaaaaaaaacaaaaaaaaaacaaaaaaatgtacaatggatgcattgaaattatatgtaattgtataaatggtgcaacagtaataaagttaaacaattaaaaagaagtaataa

SEQ ID NO: 3422 - protein, 191 aa, Homo sapiens
MGGKLSKKKKGYNVNDEKAKEKDKKAEGAATEEEGEKDAAAAKEEAPKAEPEKTEGAAEAKAEPPKAPEQEQAAPGPAAGGEAPKAAEAAAAPAESAAPAAGEEPSKEEGEPKKTEAPAAPAAQETKSDGAPASDSKPGSSEAAPSSKETPAATEAPSSTPKAQGPAASAEEPKPVEAPAANSDQTVTVKE

SEQ ID NO: 3423 - DNA, 1458 bp, Homo sapiens
gcagagcccgccgaggccaaggagggcaaggagaagcccgaccaggacgccgagggcaaggccgaggagaaggagggcgagaaggacgcggcggctgccaaggaggaggccccgaaggcggagcccgagaagacggagggcgcggcagaggccaaggctgagcccccgaaggcgcccgagcaggagcaggcggcccccggccccgctgcgggcggcgaggcccccaaagctgctgaggccgccgcggccccggccgagagcgcggcccctgccgccggggaggagcccagcaaggaggaaggggaacccaaaaagactgaggcgcccgcagctcctgccgcccaggagaccaaaagtgacggggccccagcttcagactcaaaacccggcagctcggaggctgccccctcttccaaggagacccccgcagccacggaagcgcctagttccacacccaaggcccagggccccgcagcctctgcagaagagcccaagccggtggaggccccggcagctaattccgaccaaaccgtaaccgtgaaagagtgacaaggacagcctataggaaaaacaataccacttaaaacaatctcctctctctctctctctctctctctctatctctctctctatctcctctctctctctcctctcttgtttcaaattggaagtaatgatatgtattgcccaaggaaaaatacaggatgttgtcccatcaagggagggagggggtgggagaatccaaatagtatttttgtggggaaatatctaatataccttcagtcaactttaccaagaagtcctggatttccaagatccgcgtctgaaagtgcagtacatcgtttgtacctgaaactgccgccacatgcactcctccaccgctgagagttgaatagcttttcttctgcaatgggagttgggagtgatgcgtttgattctgcccacagggcctgtgccaaggcaatcagatctttatgagagcagtattttctgtgttttctttttaatttacagcctttcttattttgatatttttttaatgttgtggatgaatgccagctttcagacagagcccacttagcttgtccacatggatctcaatgccaatcctccattcttcctctccagatatttttgggagtgacaaacattctctcatcctacttagcctacctagatttctcatgacgagttaatgcatgtccgtggttgggtgcacctgtagttctgtttattggtcagtggaaatgaaaaaaaaaaaaaaaaaaagtctgcgttcattgcagttccagtttctcttccattctgtgtcacagacaccaacacaccactcattggaaaatggaaaaaaaaaacaaaaaaaaaacaaaaaaatgtacaatggatgcattgaaattatatgtaattgtataaatggtgcaacagtaataaagttaaacaattaaaaagaagtaataa

SEQ ID NO: 3424 - protein, 81 aa, Homo sapiens
MSVVGCTCSSVYWSVEMKKKKKKSLRSLQFQFLFHSVSQTPTHHSLENGKKKQKKNKKMYNGCIEIICNCINGATVIKLNN

SEQ ID NO: 3425 - DNA, 1097 bp, Homo sapiens
catttccactgaccaataaacagaactacaggtgcacccaaccacggacatgcattaactcgtcatgagaaatctaggtaggctaagtaggatgagagaatgtttgtcactcccaaaaatatctggagaggaagaatggaggattggcattgagatccatgtggacaagctaagtgggctctgtctgaaagctggcattcatccacaacattaaaaaaatatcaaaataagaaaggctgtaaattaaaaagaaaacacagaaaatactgctctcataaagatctgattgccttggcacaggccctgtgggcagaatcaaacgcatcactcccaactcccattgcagaagaaaagctattcaactctcagcggtggaggagtgcatgtggcggcagtttcaggtacaaacgatgtactgcactttcagacgcggatcttggaaatccaggacttcttggtaaagttgactgaaggtatattagatatttccccacaaaaatactatttggattctcccaccccctccctcccttgatgggacaacatcctgtatttttccttgggcaatacatatcattacttccaatttgaaacaagttagtataggagagagagagaggagagataggagaggagagagagagaggagatagagagagagatagagagagagagagagagagagagaggagattgttttaagtggtattgtttttcctataggctgtccttgtcactctttcacggttacggtttggtcggaattagctgccggggcctccaccggcttgggctcttctgcagaggctgcggggccctgggccttgggtgtggaactaggcgcttccgtggctgcgggggtctccttggaagagggggcagcctccgagctgccgggttttgagtctgaagctggggccccgtcacttttggtctcctgggcggcaggagctgcgggcgcctcagtctttttgggttccccttcctccttgctgggctcctccccggcggcaggggccgcgccctccgtcttctcgggctccgccttcggggcctcctccttggcagccgccgcgtccttctcgccctccttctcc

SEQ ID NO: 3426 - protein, 49 aa, Homo sapiens
MRNLGRLSRMRECLSLPKISGEEEWRIGIEIHVDKLSGLCLKAGIHPQH

SEQ ID NO: 3427 - DNA, 375 bp, Homo sapiens
gagaaggacgcggcggctgccaaggaggaggccccgaaggcggagcccgcccccaaagctgctgaggccgccgcggccccggccgagagcgcggcccctgccgccggggaggagcccagcaaggaggaaggggaacccaaaaagactgaggcgcccgcagctcctgccgcccaggagaccaaaagtgacggggccccagcttcagactcaaaacccggcagctcggaggctgccccctcttccaaggagacccccgcagccacggaagcgcctagttccacacccaaggcccagggccccgcagcctctgcagaagagcccaagccggtggaggccccggcagctaattccgaccaaaccgtaaccgtgaaagag

SEQ ID NO: 3428 - protein, 124 aa, Homo sapiens
EKDAAAAKEEAPKAEPAPKAAEAAAAPAESAAPAAGEEPSKEEGEPKKTEAPAAPAAQETKSDGAPASDSKPGSSEAAPSSKETPAATEAPSSTPKAQGPAASAEEPKPVEAPAANSDQTVTVK

SEQ ID NO: 3429 - DNA, 565 bp, Homo sapiens
ataaactccaaaacaatgcaacttttttctctctagttttatcttcagcacagcttgactcatcataattttacctttaagtatcacctgcattaataaacatacaactaggtatcaataaatttctgtggaaaaggaaattatcacaagatcaaaattgaagaaccagtctcatttcatctaatatgaaaatgatcaacatatataaaattaaatgcataaccccatctaactgcaacgaaacatccaaaaatcccaaatgaggaagattctacaaaatgtgtgaccgctgctgctgtcaaggtcatcaagaaaaggaaaaaaagaaaccatcacaatccagaggagcccaagaagatatgacaactaaatattaggtagccacctggatgggatcctggaatagaaaaacggcagtagggaaaaactaatgaagtaaaattaaactctggagtttagttaacagtgatgtacttaaattggttctttcacagtgacaagtatactatagaggttcttaaaattgacattttattgaagagagtacaataaaattataatcacc

SEQ ID NO: 3430 - protein, 32 aa, Homo sapiens
MCDRCCCQGHQEKEKKKPSQSRGAQEDMTTKY

SEQ ID NO: 3431 - DNA, 1024 bp, Homo sapiens
tccggttcccgggtgaccactctgtcgccattgggcgagacctacctagtcctgacgacaacggacaaaggccttaaggggcctgaaagggaacaagatgtggaggttgaagacagtaatattgataatcctgaccctgattaggctgagcaacctccagtcctgcaagcttcattcctgaatggtagaaagcagtcttcagcctgagacccatccctagactctatggcacaaagaggcactacagaaaatcccagaatttattctgactgaagcaatatgcaactggcaaaactggcagctgaaaggatcctgaataagaaggcctccctatttcctgcgacacaacaatattaaaattaggccatttaataatataaaatagtctctaaatgttccatggaaaggaagagttgcaagtctctcgctttcaactgaaagtcagaaatgattaagtttactgaggaaagcatgccaaaacacaaagacaggccaaaaactagatctcctgcatcagttaactacattgtaaatgcaaaggaaaaattttggaaggaagttaaagtgctgctccagtgaactttatgaatgatgataaaaccaaagaggcctatagatgatatggagaaaatattagtgatctggatagaggatgaagcaagccatagcattcttttaagccaaagcctaatctacaacaaggctctattctcttcaattctgtgaaggctgagagaggtgaggaagctgcagaggaaaatttaaagatagtcgtagtgagttctagagatttaaggaaagaagctgtccccataacataaaagtaccagatggagtagtaagtgttgatatagaagctgcggctagttatacagaagatctagctgagctaaatgatgaaggtgtctacattaaataacagatttgtattgtagataaggcaatcttctgttggaataagatgtcatctgggactttgatagctcaaaagaagtcattgcctggtttcaaagctttaaaggac

SEQ ID NO: 3432 - protein, 45 aa, Homo sapiens
MMIKPKRPIDDMEKILVIWIEDEASHSILLSQSLIYNKALFSSIL

SEQ ID NO: 3433 - DNA, 384 bp, Homo sapiens
tctgatgagtgcattgaagaggatgacctgcttggttattctgcttcccgaatacaaaaaattaggcttctgaaatcaaacataagaagtcattgttgcttttattccagagactgggtctcgctgtgtttcccaggcaggtctctaactactgggctcaaatatctgtctgctgcagcctcccaaagtgatgggattagaggcattagccaccccacccagcctcaaccaaggttaaatcttaataatggcttttttataatttttagacaatatactttttataattttctgtttctaatttatttttctaacaagaatacattaacgttatagtcttgaagtgctcattaaattttataaaataaatgttattaagcataa

SEQ ID NO: 3434 - protein, 111 aa, Homo sapiens
SDECIEEDDLLGYSASRIQKIRLLKSNIRSHCCFYSRDWVSLCFPGRSLTTGLKYLSAAASQSDGIRGISHPTQPQPRLNLNNGFFIIFRQYTFYNFLFLIYFSNKNTLTL

SEQ ID NO: 3435 - DNA, 5128 bp, Homo sapiens
gagcgggcgggctgcgaggccgcggggcatgcgggaggcggaggggtggggaccggggtgggctgcgccctcccgctctggcccattccacaccccgccgaaagcggacactgtcagctgaatcactccccttttaggaggagggaggggaaaaaggtgtctagctcctttctgcttaaaaaagcacagggagatcgcgggcagctttgcagtcgctgccttctcgcgcctgaccatgcacccctgcatcttcctgctgggccacaggcgagcgctttatttctggagctgagggctaaaacttttttgacttttcttctcctcaacatctgaatcatgccatgtgcccagaggagctggcttgcaaacctttccgtggtggctcagctccttaactttggggcgctttgctatgggagacagcctcagccaggcccggttcgcttcccggacaggaggcaagagcattttatcaagggcctgccagaataccacgtggtgggtccagtccgagtagatgccagtgggcattttttgtcatatggcttgcactatcccatcacgagcagcaggaggaagagagatttggatggctcagaggactgggtgtactacagaatttctcacgaggagaaggacctgttttttaacttgacggtcaatcaaggatttctttccaatagctacatcatggagaagagatatgggaacctctcccatgttaagatgatggcttcctctgcccccctctgccatctcagtggcacggttctacagcagggcaccagagttgggacggcagccctcagtgcctgccatggactgactggatttttccaactaccacatggagactttttcattgaacccgtgaagaagcatccactggttgagggagggtaccacccgcacatcgtttacaggaggcagaaagttccagaaaccaaggagccaacctgtggattaaaggacagtgttaacatctcccagaagcaagagctatggcgggagaagtgggagaggcacaacttgccaagcagaagcctctctcggcgttccatcagcaaggagagatgggtggagacactggtggtggccgacacaaagatgattgaataccatgggagtgagaatgtggagtcctacatcctcaccatcatgaacatggtcactgggttgttccataacccaagcattggcaatgcaattcacattgttgtggttcggctcattctactcgaagaagaagagcaaggactgaaaatagttcaccatgcagaaaagacactgtctagcttctgcaagtggcagaagagtatcaatcccaagagtgacctcaatcctgttcatcacgacgtggctgtccttctcaccagaaaggacatctgtgctggtttcaatcgcccctgcgagaccctgggcctgtctcacctttcaggaatgtgtcagcctcaccgcagttgtaacatcaatgaagattcgggactccctctggctttcacaattgcccatgagctaggacacagcttcggcatccagcatgatgggaaagaaaatgactgtgagcctgtgggcagacatccgtacatcatgtcccgccagctccagtacgatcccactccgctgacatggtccaagtgcagcgaggagtacatcacccgcttcttggaccgaggctgggggttctgtcttgatgacatacctaaaaagaaaggcttgaagtccaaggtcattgcccccggagtgatctatgatgttcaccaccagtgccagctacaatatggacccaatgctaccttctgccaggaagtagaaaacgtctgccagacactgtggtgctccgtgaagggcttttgtcgctctaagctggacgctgctgcagatggaactcaatgtggtgagaagaagtggtgtatggcaggcaagtgcatcacagtggggaagaaaccagagagcattcctggaggctggggccgctggtcaccctggtcccactgttccaggacctgtggggctggagtccagagcgcagagaggctctgcaacaaccccgagccaaagtttggagggaaatattgcactggagaaagaaaacgctatcgcttgtgcaacgtccacccctgtcgctcagaggcaccaacatttcggcagatgcagtgcagtgaatttgacactgttccctacaagaatgaactctaccactggtttcccatttttaacccagcacatccttgtgagctctactgccgacccatagatggccagttttctgagaaaatgctggatgctgtcattgatggtaccccttgctttgaaggcggcaacagcagaaatgtctgtattaatggcatatgtaagatggttggctgtgactatgagatcgattccaatgccaccgaggatcgctgcggtgtgtgcctgggagatggctcttcctgccagactgtgagaaagatgtttaagcagaaggaaggatctggttatgttgacattgggctcattccaaaaggagcaagggacataagagtgatggaaattgagggagctggaaacttcctggccatcaggagtgaagatcctgaaaaatattacctgaatggagggtttattatccagtggaacgggaactataagctggcagggactgtctttcagtatgacaggaaaggagacctggaaaagctgatggccacaggtcccaccaatgagtctgtgtggatccagcttctattccaggtgactaaccctggcatcaagtatgagtacacaatccagaaagatggccttgacaatgatgttgagcagcagatgtacttctggcagtacggccactggacagagtgcagtgtgacctgcgggacaggtatccgccgccaaactgcccattgcataaagaagggccgcgggatggtgaaagctacattctgtgacccagaaacacagcccaatgggagacagaagaagtgccatgaaaaggcttgtccacccaggtggtgggcaggggagtgggaagcatgctcggcgacatgcgggccccacggggagaagaagcgaaccgtgctgtgcatccagaccatggtctctgacgagcaggctctcccgcccacagactgccagcacctgctgaagcccaagaccctcctttcctgcaacagagacatcctgtgcccctcggactggacagtgggcaactggagtgagtgttctgtttcctgtggtggtggagtgcggattcgcagtgtcacatgtgccaagaaccatgatgaaccttgcgatgtgacaaggaaacccaacagccgagctctgtgtggcctccagcaatgcccttctagccggagagttctgaaaccaaacaaaggcactatttccaatggaaaaaacccaccaacactaaagcccgtccctccacctacatccaggcccagaatgctgaccacacccacagggcctgagtctatgagcacaagcactccagcaatcagcagccctagtcctaccacagcctccaaagaaggagacctgggtgggaaacagtggcaagatagctcaacccaacctgagctgagctctcgctatctcatttccactggaagcacttcccagcccatcctcacttcccaatccttgagcattcagccaagtgaggaaaatgtttccagttcagatactggtcctacctcggagggaggccttgtagctacaacaacaagtggttctggcttgtcatcttcccgcaaccctatcacttggcctgtgactccattttacaataccttgaccaaaggtccagaaatggagattcacagtggctcaggggaagaaagagaacagcctgaggacaaagatgaaagcaatcctgtaatatggaccaagatcagagtacctggaaatgacgctccagtggaaagtacagaaatgccacttgcacctccactaacaccagatctcagcagggagtcctggtggccacccttcagcacagtaatggaaggactgctccccagccaaaggcccactacttccgaaactgggacacccagagttgaggggatggttactgaaaagccagccaacactctgctccctctgggaggagaccaccagccagaaccctcaggaaagacggcaaaccgtaaccacctgaaacttccaaacaacatgaaccaaacaaaaagttctgaaccagtcctgactgaggaggatgcaacaagtctgattactgagggctttttgctaaatgcctccaattacaagcagctcacaaacggccacggctctgcacactggatcgtcggaaactggagcgagtgctccaccacatgtggcctgggggcctactggagaagggtggagtgcagcacccagatggattctgactgtgcggccatccagagacctgaccctgcaaaaagatgccacctccgtccctgtgctggctggaaagtgggaaactggagcaagtgctccagaaactgcagtgggggcttcaagatacgcgagattcagtgcgtggacagccgggaccaccggaacctgaggccatttcactgccagttcctggccggcattcctcccccattgagcatgagctgtaacccggagccctgtgaggcgtggcaggtggagccttggagccagtgctccaggtcctgtggaggtggagttcaggagagaggagtgttctgtccaggaggcctctgtgattggacaaaaagacccacatccaccatgtcttgcaatgagcacctgtgctgtcactgggccactgggaactgggacctgtgttccacttcctgtggaggtggctttcagaagaggactgtccaatgtgtgccctcagagggcaataaaactgaagaccaagaccaatgtctatgtgatcacaaacccagacctccagaattcaaaaaatgcaaccagcaggcctgcaagaaaagtgccgatttactttgcactaaggacaaactgtcagccagtttctgccagacactgaaagccatgaagaaatgttctgtgcccaccgtgagggctgagtgctgcttctcgtgtccccagacacacatcacacacacccaaaggcaaagaaggcaacggttgctccaaaagtcaaaagaactctaagcccaaa

SEQ ID NO: 3436 - protein, 1594 aa, Homo sapiens; identical to SEQ ID NO: 352

SEQ ID NO: 3437 - DNA, 726 bp, Homo sapiens
tgcagaaatctctgctgattgagaccttctgatcgaaatgaaaggaataagatcgttgagactgggaaaagcccatgaaagagggaaaaggactgagcatggtgtgtgtaggggacaagaaagctagggaaaatgaggctggaggaatgggatataatgagaatatggagacaatgggtacacagagccaggaggtggtgggcaggggagtgggaagcatgctcggcgacatgcgggccccacggggagaagaagcgaaccgtgctgtgcatccagaccatggtctctgacgagcaggctctcccgcccacagactgccagcacctgctgaagcccaagaccctcctttcctgcaacagagacatcctgtgcccctcggactggacagtgggcaactggagtgagtgttctgtttcctgtggtggtggagtgcggattcgcagtgtcacatgtgccaagaaccatgatgaaccttgcgatgtgacaaggaaacccaacagccgagctctgtgtggcctccagcaatgcccttctagccggagagttctgaaaccaaacaaaggcactatttccaatggaaaaaacccaccaacactaaagcccgtccctccacctacatccaggcccagaatgctgaccacacccacagggcctgagtctatgagcacaagcactccagcaatcagcagccctagtcctaccacagcctccaaagaaggagacctg

SEQ ID NO: 3438 - protein, 197 aa, Homo sapiens
MRLEEWDIMRIWRQWVHRARRWWAGEWEACSATCGPHGEKKRTVLCIQTMVSDEQALPPTDCQHLLKPKTLLSCNRDILCPSDWTVGNWSECSVSCGGGVRIRSVTCAKNHDEPCDVTRKPNSRALCGLQQCPSSRRVLKPNKGTISNGKNPPTLKPVPPPTSRPRMLTTPTGPESMSTSTPAISSPSPTTASKEGD

SEQ ID NO: 3439 - DNA, 1406 bp, Homo sapiens
atggttggctgtgactatgagatcgattccaatgccaccgaggatcgctgcggtgtgtgcctgggagatggctcttcctgccagactgtgagaaagatgtttaagcagaaggaaggatctggttatgttgacattgggctcattccaaaaggagcaagggacataagagtgatggaaattgagggagctggaaacttcctggccatcaggagtgaagatcctgaaaaatattacctgaatggagggtttattatccagtggaacgggaactataagctggcagggactgtctttcagtatgacaggaaaggagacctggaaaagctgatggccacaggtcccaccaatgagtctgtgtggatccagcttctattccaggtgactaaccctggcatcaagtatgagtacacaatccagaaagatggccttgacaatgatgttgagcagcagatgtacttctggcagtacggccactggacagagtgcagtgtgacctgcgggacagatcagagatccatgtgaaaaactggcaagacaatagtctaaactgagctcactggtatgagagccagccgactttccacagtttagtgctcagaggtaaagggcactctcagagaacaccagtgacagctttgtctccaagccagtgtctgttcttctctcccctcagcggcatttgcttttacttctgccttaccatggagagtgacgctctgactttaggggaatttaggactgactactcctcaggaaacttggaaaagaattaccatgcattacggaaggcttaatgaaagtaatttatctgagtcacccatcaaaagatcaccaatgaaagttcagccaatagattatctgtgaagaaacatctgcagaaatggcttgacacagatattcatctccacaggaagcttcaggactccttataagaaaatatttgggcaaaagctcaggatcacttttagagagatgcaaaagccacctttttgcctcattgcagccttagtactgcagagttctgtcagtcataatagcgtctaaccaaaatttcctgtgtcctggaatggccctactgctggaaaatagctcctcacttctgaacgtgacctttgccatttttgtgctcagtgatcttgattctgcgttttggggcctgtaggtacaacagtggcctacacaaaagagagaacacttctgccctaccctgggcttctccttttcctttatctcctgggtaaattctctctggagttaagtcattctccctttgttcaaaaaatgtcatgtgctggtaggaaaagcaaatattgaaaactgcaaagaccatgcctacaaagttcctggagattgtttgactgttctaaactgaattataaactagatcacattcattggaaataaat

SEQ ID NO: 3440 - protein, 173 aa, Homo sapiens
MVGCDYEIDSNATEDRCGVCLGDGSSCQTVRKMFKQKEGSGYVDIGLIPKGARDIRVMEIEGAGNFLAIRSEDPEKYYLNGGFIIQWNGNYKLAGTVFQYDRKGDLEKLMATGPTNESVWIQLLFQVTNPGIKYEYTIQKDGLDNDVEQQMYFWQYGHWTECSVTCGTDQRSM

SEQ ID NO: 3441 - DNA, 7164 bp, Homo sapiens
atgggcagccaggccctgcaggagtggggacagagggaacccggccggtggcccgaccctgcagggaagaaggacgtgcggcgagaagcatcggattcggggagggccgggacctggccgagggggccgagcgaatgtagcccgcgagagaaaatggcggcggcggcggggaatcgcgcctcgtcgtcgggattcccgggcgccagggctacgagccctgaggcaggcggcggcggaggagccctcaaggcgagcagcgcgcccgcggctgccgcgggactgctgcgggaggcgggcagcgggggccgcgagcgggcggactggcggcggcggcagctgcgcaaagtgcggagtgtggagctggaccagctgcctgagcagccgctcttccttgccgcctcaccgccggcctcctcgacttccccgtcgccggagcccgcggacgcagcggggagtgggaccggcttccagcctgtggcggtgccgccgccccacggagccgcgagccgcggcggcgcccaccttaccgagtcggtggcggcgccggacagcggcgcctcgagtcccgcagcggccgagcccggggagaagcgggcgcccgccgccgagccgtctcctgcagcggcccccgccggtcgtgagatggagaataaagaaactctcaaagggttgcacaagatggatgatcgtccagaggaacgaatgatcagggagaaactgaaggcaacctgtatgccagcctggaagcacgaatggttggaaaggagaaataggcgagggcctgtggtggtaaaaccaatcccagttaaaggagatggatctgaaatgaatcacttagcagctgagtctccaggagaggtccaggcaagtgcggcttcaccagcttccaaaggccgacgcagtccttctcctggcaactccccatcaggtcgcacagtgaaatcagaatctccaggagtaaggagaaaaagagtttccccagtgccttttcagagtggcagaatcacaccaccccgaagagccccttcaccagatggcttctcaccatatagccctgaggaaacaaaccgccgtgttaacaaagtgatgcgggccagactgtacttactgcagcagatagggcctaactctttcctgattggaggagacagcccagacaataaataccgggtgtttattgggcctcagaactgcagctgtgcacgtggaacattctgtattcatctgctatttgtgatgctccgggtgtttcaactagaaccttcagacccaatgttatggagaaaaactttaaagaattttgaggttgagagtttgttccagaaatatcacagtaggcgtagctcaaggatcaaagctccatctcgtaacaccatccagaagtttgtttcacgcatgtcaaattctcatacattgtcatcatctagtacttctacgtctagttcagaaaacagcataaaggatgaagaggaacagatgtgtcctatttgcttgttgggcatgcttgatgaagaaagtcttacagtgtgtgaagacggctgcaggaacaagctgcaccaccactgcatgtcaatttgggcagaagagtgtagaagaaatagagaacctttaatatgtcccctttgtagatctaagtggagatctcatgatttctacagccacgagttgtcaagtcctgtggattccccttcttccctcagagctgcacagcagcaaaccgtacagcagcagcctttggctggatcacgaaggaatcaagagagcaattttaaccttactcattatggaactcagcaaatccctcctgcttacaaagatttagctgagccatggattcaggtgtttggaatggaactcgttggctgcttattttctagaaactggaatgtgagagagatggccctcaggcgtctttcccatgatgtcagtggggccctgctgttggcaaatggggagagcactggaaattctgggggcagcagtggaagcagcccgagtgggggagccaccagtgggtcttcccagaccagtatctcaggagatgtggtggaggcatgctgcagcgttctgtcaatggtctgtgctgaccctgtctacaaagtgtacgttgctgctttaaaaacattgagagccatgctggtatatactccttgccacagtttagcggaaagaatcaaacttcagagacttctccagccagttgtagacaccatcctagtcaaatgtgcagatgccaatagccgcacaagtcagctgtccatatcaacactgttggaactgtgcaaaggccaagcaggagagttggcagttggcagagaaatactaaaagctggatccattggtattggtggtgttgattatgtcttaaattgtattcttggaaaccaaactgaatcaaacaattggcaagaacttcttggccgcctttgtcttatagatagactgttgttggaatttcctgctgaattttatcctcatattgtcagtactgatgtttcacaagctgagcctgttgaaatcaggtataagaagctgctgtccctcttaacctttgctttgcagtccattgataattcccactcaatggttggcaaactttccagaaggatctacttgagttctgcaagaatggttactacagtaccccatgtgttttcaaaactgttagaaatgctgagtgtttccagttccactcacttcaccaggatgcgtcgccgtttgatggctattgcagatgaggtggaaattgccgaagccatccagttgggcgtagaagacactttggatggtcaacaggacagcttcttgcaggcatctgttcccaacaactatctggaaaccacagagaacagttcccctgagtgcacagtccatttagagaaaactggaaaaggattatgtgctacaaaattgagtgccagttcagaggacatttctgagagactggccagcatttcagtaggaccttctagttcaacaacaacaacaacaacaacaacagagcaaccaaagccaatggttcaaacaaaaggcagaccccacagtcagtgtttgaactcctctcctttatctcatcattcccaattaatgtttccagccttgtcaaccccttcttcttctaccccatctgtaccagctggcactgcaacagatgtctctaagcatagacttcagggattcattccctgcagaataccttctgcatctcctcaaacacagcgcaagttttctctacaattccacagaaactgtcctgaaaacaaagactcagataaactttccccagtctttactcagtcaagacccttgccctccagtaacatacacaggccaaagccatctagacctaccccaggtaatacaagtaaacagggagatccctcaaaaaatagcatgacacttgatctgaacagtagttccaaatgtgatgacagctttggctgtagcagcaatagtagtaatgctgttatacccagtgacgagacagtgttcaccccagtagaggagaaatgcagattagatgtcaatacagagctcaactccagtattgaggaccttcttgaagcatctatgccttcaagtgatacaacagtaacttttaagtcagaagttgctgtcctgtctcctgaaaaggctgaaaatgatgatacctacaaagatgatgtgaatcataatcaaaagtgcaaagagaagatggaagctgaagaagaagaagctttagcaattgccatggcaatgtcagcgtctcaggatgccctccccatagttcctcagctgcaggttgaaaatggagaagatatcatcattattcaacaggatacaccagagactctaccaggacataccaaagcaaaacaaccgtatagagaagacactgaatggctgaaaggtcaacagataggccttggagcattttcttcttgttatcaggctcaagatgtgggaactggaactttaatggctgttaaacaggtgacttatgtcagaaacacatcttctgagcaagaagaagtagtagaagcactaagagaagagataagaatgatgagccatctgaatcatccaaacatcattaggatgttgggagccacgtgtgagaagagcaattacaatctcttcattgaatggatggcagggggatcggtggctcatttgctgagtaaatatggagccttcaaagaatcagtagttattaactacactgaacagttactccgtggcctttcgtatctccatgaaaaccaaatcattcacagagatgtcaaaggtgccaatttgctaattgacagcactggtcagagactaagaattgcagattttggagctgcagccaggttggcatcaaaaggaactggtgcaggagagtttcagggacaattactggggacaattgcatttatggcacctgaggtactaagaggtcaacagtatggaaggagctgtgatgtatggagtgttggctgtgctattatagaaatggcttgtgcaaaaccaccatggaatgcagaaaaacactccaatcatcttgctttgatatttaagattgctagtgcaactactgctccatcgatcccttcacatttgtctcctggtttacgagatgtggctcttcgttgtttagaacttcaacctcaggacagacctccatcaagagagctactgaagcatccagtctttcgtactacatggtagccaattatgcagatcaactacagtagaaacaggatgctcaacaagagaaaaaaaacttgtggggaaccacattgatattctactggccatgatgccactgaacagctatgaacgaggccagtggggaacccttacctaagtatgtgattgacaaatcatgatctgtacctaagctcagtatgcaaaagcccaaactagtgcagaaactgtaaactgtgcctttcaaagaactggccctaggtgaacaggaaaacaatgaagtttgcatgactaaattgcagaagcataattttatttttttggagcactttttcagcaatattagcggctgaggggctcaggatctattttaatatttcaattattcttccatttcatatagtgatcacaagcagggggttctgcaattccgttcaaattttttgtcactggctataaaatcagtatctgcctcttttaggtcagagtatgctatgagtagcaatacatacatatatttttaaaagttgatacttctttatgacccacagttgacctttattttcttaaataccagggcagttgtggctcattgtgcattttactgttggcccattcatttcgtttttggaaattatggttttgtattttcatgtttatttacattcatttttgtttattcagggaaagctgatctttttttcaaaccagaaaaaaaaaatgaactagatatgaagtagagttcattaaatatcttgctattgtcagagtttttaaaatatagacttaattttgtttttttaaattggaatacaataaagtactacctacatttgagtcagtcaccactcttattgtgcaggttaagtacaagttaactaaaaataaactgtcctctctggtgcaactcacaaccaagatcaagattaccttaaaatttatttgaattttttagatgttttggttgtcaaactgtaggaaacttcacaacatttaagtcttactctgtatgtaacaatccatcattcaccttcactactggtagtaacatagagctgccattttccttttaccatgcatcatctctttacagtaggcctggcagatcattttttaaaaagattattcaactaccaatcagtaatgtttttaaacagtacatttgctttgaacttggaaaatgtgttcagaaagaaaaatggaattgaatttcatttatacactaattccttggattttgcacagttacctaacggttttagtctggagttaaattcagatgcatggaatcctgaaggaaaatggtagctttttaatctttttgtgtgtgtgtgagtcttttaaatcaagtactgattaactattaagtacaactttgagattttagttttaactcttcagaagccagtgtgaaatagaattggttattctcaaagactcaggataaactaaataagctatatatagagtacatttaaaatgtacaacacaaattggaaataaaataagttacaagataagtttacagggatatattgcttacaatttttaaaaggcagtttgttttttatgtgaatatgtttcttagtgaaattttacattcctttgttttggaagattggcgatatttgaagagttaaaaatagtacagaaatgtgaagtttggtatctctaaatgtgttgtacttgactttcttttttattttgtttttttttttttttgactacttagaattttcacaattctaataagattgtttccaagtctctcatgtgcaagctttaaaggatgcactcttgccattttatgtactggaagatcattggtcagatgaatactgtgtctgacaaaaatgtaaactgtataaactgaggaacctcagctaatcagtattactttgtagatcaccatgcccaccacatttcaaactcaaactatctgtagatttcaaaatccattgtgtttgagtttgtttgcagttccctcagcttgctggtaattgtggtgttttgttttttgttttgttttcaatgcaaatgtgatgtaatattcttattttctttggatcaaagctggactggaaattgtatcgtgtaattatttttgtgttcttaatgttatttggtactcaagttgtaaataacgtctactactgtttattccagtttctactacctcaggtgtcctatagatttttcttctaccaaagttcactttcacaatgaaattatatttgctgtgtgactatgattcctaagatttccagggcttaagggctaacttctattagcaccttactgtgtaagcaaatgttacaaaaaaaaaaaaaaaaaatctctgggttaagaaaatttggcttaaatgtatcctttgttattttaaatatattgagatattttaattaaaatttttaccccattgaaccgattttatagtatttgtacctattttggtgtttttgtctttatagtaaataaaagtttttgaacaaa

SEQ ID NO: 3442 - protein, 1563 aa, Homo sapiens
MGSQALQEWGQREPGRWPDPAGKKDVRREASDSGRAGTWPRGPSECSPREKMAAAAGNRASSSGFPGARATSPEAGGGGGALKASSAPAAAAGLLREAGSGGRERADWRRRQLRKVRSVELDQLPEQPLFLAASPPASSTSPSPEPADAAGSGTGFQPVAVPPPHGAASRGGAHLTESVAAPDSGASSPAAAEPGEKRAPAAEPSPAAAPAGREMENKETLKGLHKMDDRPEERMIREKLKATCMPAWKHEWLERRNRRGPVVVKPIPVKGDGSEMNHLAAESPGEVQASAASPASKGRRSPSPGNSPSGRTVKSESPGVRRKRVSPVPFQSGRITPPRRAPSPDGFSPYSPEETNRRVNKVMRARLYLLQQIGPNSFLIGGDSPDNKYRVFIGPQNCSCARGTFCIHLLFVMLRVFQLEPSDPMLWRKTLKNFEVESLFQKYHSRRSSRIKAPSRNTIQKFVSRMSNSHTLSSSSTSTSSSENSIKDEEEQMCPICLLGMLDEESLTVCEDGCRNKLHHHCMSIWAEECRRNREPLICPLCRSKWRSHDFYSHELSSPVDSPSSLRAAQQQTVQQQPLAGSRRNQESNFNLTHYGTQQIPPAYKDLAEPWIQVFGMELVGCLFSRNWNVREMALRRLSHDVSGALLLANGESTGNSGGSSGSSPSGGATSGSSQTSISGDVVEACCSVLSMVCADPVYKVYVAALKTLRAMLVYTPCHSLAERIKLQRLLQPVVDTILVKCADANSRTSQLSISTLLELCKGQAGELAVGREILKAGSIGIGGVDYVLNCILGNQTESNNWQELLGRLCLIDRLLLEFPAEFYPHIVSTDVSQAEPVEIRYKKLLSLLTFALQSIDNSHSMVGKLSRRIYLSSARMVTTVPHVFSKLLEMLSVSSSTHFTRMRRRLMAIADEVEIAEAIQLGVEDTLDGQQDSFLQASVPNNYLETTENSSPECTVHLEKTGKGLCATKLSASSEDISERLASISVGPSSSTTTTTTTTEQPKPMVQTKGRPHSQCLNSSPLSHHSQLMFPALSTPSSSTPSVPAGTATDVSKHRLQGFIPCRIPSASPQTQRKFSLQFHRNCPENKDSDKLSPVFTQSRPLPSSNIHRPKPSRPTPGNTSKQGDPSKNSMTLDLNSSSKCDDSFGCSSNSSNAVIPSDETVFTPVEEKCRLDVNTELNSSIEDLLEASMPSSDTTVTFKSEVAVLSPEKAENDDTYKDDVNHNQKCKEKMEAEEEEALAIAMAMSASQDALPIVPQLQVENGEDIIIIQQDTPETLPGHTKAKQPYREDTEWLKGQQIGLGAFSSCYQAQDVGTGTLMAVKQVTYVRNTSSEQEEVVEALREEIRMMSHLNHPNIIRMLGATCEKSNYNLFIEWMAGGSVAHLLSKYGAFKESVVINYTEQLLRGLSYLHENQIIHRDVKGANLLIDSTGQRLRIADFGAAARLASKGTGAGEFQGQLLGTIAFMAPEVLRGQQYGRSCDVWSVGCAIIEMACAKPPWNAEKHSNHLALIFKIASATTAPSIPSHLSPGLRDVALRCLELQPQDRPPSRELLKHPVFRTTW

SEQ ID NO: 3443 - DNA, 618 bp, Homo sapiens
aagaagcagtcttggacctttcatcttcagagaatgtcacaaggaacagagataagccacccctgctgagccctgcccaatctgcagattcgcactggggaaactctttttctccttactcctggagattctgatttcactgtgcgacctgatggggagttgccaggagaaggactgcgtcggcctttggaagctggtgaagccgcacttgcctggacctctcctggagactcagctgctaagtgattcatttcagatccatctcctttaactgggattggttttaccacctgaatcaaagtattccaatattttgattacttaaaaatataaaaggaataccctttgccatctcaatatggcttcaatgaagaatttcctaccaccattctacggcagttagctgctctcccgctgcatgaaggtaacaatgttgactagcaacatctagaatatgaagactgctgtacaaggctgcttctgctggtattgagggagagaagaagctctagccagaagacaaaggaggcttcaactgtttaatattagttcctttaaaaaatacacatccaactgcactgcagcaagtacaataaaatattaacatttattaaatac

SEQ ID NO: 3444 - protein, 39 aa, Homo sapiens
MGSCQEKDCVGLWKLVKPHLPGPLLETQLLSDSFQIHLL

SEQ ID NO: 3445 - DNA, 469 bp, Homo sapiens
ctggaagcacgaatggttggaaaggagaaataggcgagggcctgtggtggtaaaaccaatcccagttaaaggagatggatctgaaatgaatcacttagcagctgagtctccaggagaggtccaggcaagtgcggcttcaccagcttccaaaggccgacgcagtccttctcctggcaactccccaagttcactttcacaatgaaattatatttgctgtgtgactatgattcctaagatttccagggcttaagggctaacttctattagcaccttactgtgtaagcaaatgttacaaaaaaaaaaaaaaaaaatctctgggttaagaaaatttggcttaaatgtatcctttgttattttaaatatattgagatattttaattaaaatttttaccccattgaaccgattttatagtatttgtacctattttggtgtttttgtctttatagtaaataaaagtttttgaacaaa

SEQ ID NO: 3446 - protein, 38 aa, Homo sapiens [sequence omitted]

SEQ ID NO: 3447 - DNA, 906 bp, Homo sapiens
aaattcaacatcgtatactttgtgacactccctccaggacgactaacgtcttcaatgactgcacctcttatttccataatcattatctttttgtactaactgcattatttttacttgaacaaaaaggttgtaattcccgcctcacggttccgagtcatgatacaactgatctcctgtttccctagcatgcaaccttccggaaaccgctttgtttccctatttgtcggacactgacttcagggaggcccggtcggcctctttggtgagcacggtgttgagctgatcactggtgcgcccttaataacgccggcgggactcaccccaatccgaaacccaccatcccgacgtgcttttgagtggcgttctgcccgttcttaacgcgcgagctactgcacgctattctcacagccgggatgggcttctttaaccacgtgaagtacttgtatgaactatgaaaataaaccctggcttggcttttctgaggaagttcaagcacctaattaacccctggtggagaaaaagccacgcactctcacgcgattggagatcagagttggagcctgagggtgaaagcctcatgctgagaagagtggagcgggaagataaagcatggcaacattgatgacaccctaggcctaatacaccagccctgacctgcttaccttctctcatttgtaggctatgtagtccagtcacttttacgtgcagctgagtacaaccctaaatgatatatcaatcgcttcagtgaccatttatatgtcaatagcttgcacatttattatttgcaaccaaagtatctctggaggtactcatgtgcatatacagtattactggaaacttctacttggatatcctccaggcaactcgaatattttaacatggccaaagcacatcttgtcctccaac

SEQ ID NO: 3448 - protein, 56 aa, Homo sapiens
MKINPGLAFLRKFKHLINPWWRKSHALSRDWRSELEPEGESLMLRRVEREDKAWQH

SEQ ID NO: 3449 - DNA, 1567 bp, Homo sapiens
agacagccgtgacagagaaactaggcggtccgctcctgggacgcggtctcgggggcgggttcgcccctgaggcccggtgacccttcgcccgcaaccagggctagcgcttgtgtgcgcccacggaagcacccgagcgaccggagaaagaaaaagtggtcaaggggacctccttccagctctacgcgcctctcattcagagaggtgaggtcaggaaaggggaaggacgaagccccagagcaacagaagtcaggcggtgccaggaacactgagagcggagccaggggaaggcggccgagcgcggccccctctcctcccgggccggggcgggcccgaggcctcgatccgccttccccgcgccgtcctggtcacggccccgcggggcagccatgcctggccgtctgctgcggggcctgtggcagcgatggcgccgttacaagtaccgcttcgttccctggatcgcactgaacctaagccacaacccgaggaccctccgatatgttccagaggaatccaaagacaaagttatctcagatgaagatgtcctaggaacattactgaaagttttccaggctctattcttaaatgatttcaataaacaatcagaaatcttgtctatgcttccagaatctgttaaatcaaaatatcaagacctactggcagttgaacatcaaggggtgaaactgcttgaaaacagacatcaacagcaaagtacctttaaaccagaagaaattctttacaagactttgggtttcagtgttgcccaagcaactagctcattgatttctgctggaaaaggtgtcttcgttactaaaggattggtaccaaaaggcgcagtcgtatctatgtatcctggtacagtatatcagaagtatgagccgatctttttccagtccattggaaatccgtttatttttagatgcctggatggggtactcattgatgggaatgacaaagggatatcaaaagttgtgtacagatcttgcaatgggagggatcgactcggccctttaaaaatgagtgatagtacatggctaacgtcagaaattcataaccctctggctgtgggacagtatgtcaacaattgttccaatgacagagcagctaatgtctgttatcaggaatttgatgtgcctgcagttttccctatagaactgaagcagtatcttccaaacattgcctacagctatgacaaacaaagcccacttcgatgtgttgttcttgtcgcacttagggacatcaatcaaggagaagagcttttttcaaactactacacaattgtcagctaactctgtgaatcagaaattattaggttttctactcagctattaattctaagtgttttttgttaatcacttctctgagttctacctgtaaaacaaatattttgagacttaattggaataggaatttcttatgtttttgttgatattatatttatgttccaatttcatgataaaagctacttgcttcattacaatttcaaatttgtaatgcaattccaagtttaattggttttcacctaaatacacaatagcttattaaattaaaacctactctttgaacttat

SEQ ID NO: 3450 - protein, 299 aa, Homo sapiens
MPGRLLRGLWQRWRRYKYRFVPWIALNLSHNPRTLRYVPEESKDKVISDEDVLGTLLKVFQALFLNDFNKQSEILSMLPESVKSKYQDLLAVEHQGVKLLENRHQQQSTFKPEEILYKTLGFSVAQATSSLISAGKGVFVTKGLVPKGAVVSMYPGTVYQKYEPIFFQSIGNPFIFRCLDGVLIDGNDKGISKVVYRSCNGRDRLGPLKMSDSTWLTSEIHNPLAVGQYVNNCSNDRAANVCYQEFDVPAVFPIELKQYLPNIAYSYDKQSPLRCVVLVALRDINQGEELFSNYYTIVS

SEQ ID NO: 3451 - DNA, 1188 bp, Homo sapiens
agccgtgacagagaaactaggcggtccgctcctgggacgcggtctcgggggcgggttcgcccctgaggcccggtgacccttcgcccgcaaccagggctagcgcttgtgtgcgcccacggaagcacccgagcgaccggagaaagaaaaagtggtcaaggggacctccttccagctctacgcgcctctcattcagagagaatctgttaaatcaaaatatcaagacctactggcagttgaacatcaaggggtgaaactgcttgaaaacagacatcaacagcaaagtacctttaaaccagaagaaattctttacaagactttgggtttcagtgttgcccaagcaactagctcattgatttctgctggaaaaggtgtcttcgttactaaaggattggtaccaaaaggcgcagtcgtatctatgtatcctggtacagtatatcagaagtatgagccgatctttttccagtccattggaaatccgtttatttttagatgcctggatggggtactcattgatgggaatgacaaagggatatcaaaagttgtgtacagatcttgcaatgggagggatcgactcggccctttaaaaatgagtgatagtacatggctaacgtcagaaattcataaccctctggctgtgggacagtatgtcaacaattgttccaatgacagagcagctaatgtctgttatcaggaatttgatgtgcctgcagttttccctatagaactgaagcagtatcttccaaacattgcctacagctatgacaaacaaagcccacttcgatgtgttgttcttgtcgcacttagggacatcaatcaaggagaagagcttttttcaaactactacacaattgtcagctaactctgtgaatcagaaattattaggttttctactcagctattaattctaagtgttttttgttaatcacttctctgagttctacctgtaaaacaaatattttgagacttaattggaataggaatttcttatgtttttgttgatattatatttatgttccaatttcatgataaaagctacttgcttcattacaatttcaaatttgtaatgcaattccaagtttaattggttttcacctaaatacacaatagcttattaaattaaaacctactctttgaacttataatttcaatttttcttttgtttattttgtaagctctgtggtggtttat

SEQ ID NO: 3452 - protein, 147 aa, Homo sapiens
MYPGTVYQKYEPIFFQSIGNPFIFRCLDGVLIDGNDKGISKVVYRSCNGRDRLGPLKMSDSTWLTSEIHNPLAVGQYVNNCSNDRAANVCYQEFDVPAVFPIELKQYLPNIAYSYDKQSPLRCVVLVALRDINQGEELFSNYYTIVS

SEQ ID NO: 3453 - DNA, 992 bp, Homo sapiens
tggtcacggccccgcggggcagccatgcctggccgtctgctgcggggcctgtggcagcgatggcgccgttacaagtaccgcttcgttccctggatcgcactgaacctaagccacaacccgaggtacagtatatcagaagtatgagccgatctttttccagtccattggaaatccgtttatttttagatgcctggatggggtactcattgatgggaatgacaaagggatatcaaaagttgtgtacagatcttgcaatgggagggatcgactcggccctttaaaaatgagtgatagtacatggctaacgtcagaaattcataaccctctggctgtgggacagtatgtcaacaattgttccaatgacagagcagctaatgtctgttatcaggaatttgatgtgcctgcagttttccctatagaactgaagcagtatcttccaaacattgcctacagctatgacaaacaaagcccacttcgatgtgttgttcttgtcgcacttagggacatcaatcaaggagaagagcttttttcaaactactacacaattgtcagctaactctgtgaatcagaaattattaggttttctactcagctattaattctaagtgttttttgttaatcacttctctgagttctacctgtaaaacaaatattttgagacttaattggaataggaatttcttatgtttttgttgatattatatttatgttccaatttcatgataaaagctacttgcttcattacaatttcaaatttgtaatgcaattccaagtttaattggttttcacctaaatacacaatagcttattaaattaaaacctactctttgaacttataatttcaatttttcttttgtttattttgtaagctctgtggtggtttataaaattgtagccaggcatcagcagttcttgtagtactgctgatgtgtacaaacttctgtaaaaactttatttttacagaattgagtaaaaaatacctattgtgttgc

SEQ ID NO: 3454 - protein, 90 aa, Homo sapiens
MSDSTWLTSEIHNPLAVGQYVNNCSNDRAANVCYQEFDVPAVFPIELKQYLPNIAYSYDKQSPLRCVVLVALRDINQGEELFSNYYTIVS

SEQ ID NO: 3455 - DNA, 417 bp, Homo sapiens
ttgcgttcggcactgactggggagcttgtatctgggcaaaaatggaaactttttaaaaagactgcccttaccgcgtgagagtgcgtggctttttctccaccaggggttaattaggtgcttgaacttcctcagaaaagccaagccagggtttattttcatagttcatacaagtacttcacgtggttaaagaagcccatcccggctgtgagaatagcgtgcagtagctcgcgcgttaagaacgggcagaacgccactcaaaagcacgtcgggatggtgggtttcggattggggaccctccgatatgttccagaggaatccaaagacaaagttatctcagatgaagatgtcctaggaacattactgaaagttttccaggctctattcttaaatgatttcaataaacaatcagaaatcttg

SEQ ID NO: 3456 - protein, 48 aa, Homo sapiens
MVGFGLGTLRYVPEESKDKVISDEDVLGTLLKVFQALFLNDFNKQSEI

SEQ ID NO: 3457 - DNA, 5131 bp, Homo sapiens
aagactgaattccttgtgagcagggattcttcagtaaatttcatttgtatgtccagtagcaagtagctagtagccctcagccaagcacttagaactgagtaaatgatgggaaggtggaccatcagtgcataaaaggaaggaaccatgcctctagaagatttactggcattctatggctatgaacctacaattccagcagttgcaaattccagtgcaaatagttccccaagtgaactggcagatgaactaccagacatgacactagacaaagaggaaatagcaaaagacctgttgtcaggtgatgacgaggaaactcagtcttctgcggatgatctgacgccatctgtgacttcccatgaaacttctgatttcttccctaggcctttacgatcaaatactgcatgtgatggtgataaggaatcagaggttgaagatgttgaaacagacagtggtaattcacctgaagatttgaggaaggaaataatgattggtttacaatatcaggcagagattcccccttatcttggagagtacgatggtaatgagaaagtatatgaaaacgaagaccagttactttggtgtcctgatgtggttttggagagcaaagttaaggaataccttgttgagacttcattaaggactggcagtgaaaaaataatggataggatttctgcaggaacacacacaagggacaatgaacaggcattatatgaacttctcaagtgtaaccacaatataaaggaagcaatcgaaagatactgctgcaatggaaaggcctctcaaggaatgactgcatggacggaagaagaatgccgaagctttgaacatgcactcatgctttttggaaaagattttcatcttatacagaagaataaggtgagaactaggacagttgctgagtgtgtagcattctactatatgtggaagaaatctgaacgttatgattactttgctcaacagacaagatttgggaaaaaaagatataaccatcaccctggagttacggactatatggatcgtttagtagatgaaacagaagctttgggtgggacggtaaatgcttcagccttaacttctaaccggcctgagcctattcctgatcaacagctaaacattctcaactccttcactgccagtgacttgacagctttgaccaacagtgtagcaaccgtctgcgaccccacagatgtgaattgtttggatgatagctttcctccactgggcaacacaccccgtggacaagttaatcatgtgcctgttgtaacagaagagttactcaccctgcccagcaatggggaaagtgattgttttaatttatttgagactggattttatcactcggagctaaaccctatgaacatgtgcagtgaagagtcagagagaccagcaaaaagattgaaaatgggcattgccgtccctgaatcctttatgaatgaagtttctgtaaataacctgggtgtggactttgaaaatcacacacatcacatcaccagtgccaaaatggctgtttctgtggctgactttggcagtctctctgccaacgagaccaatggtttcatcagtgcccatgctctgcatcagcacgcggccctacactctgagtgacctgagtgaggatcccggaactgcgtgtgcagcaccagtaaacttgaggggagctatcaggtttgcatagtctttcactggaagtttgaacctttctcactatgacatcagtgatgtcagtatgtatagaactatatcttgatttatcaagagtattttcatttttcaatccataaatgtggaaatgaactatgatcagcagagttgggaactaagattgaactctgtggtgcagctttaagctctgcttctctcttcctcatctcccaatacctcttccccactcccttctttttctattcttttgtgttccccactgccctcactcccaattttaaaacctgtagacagaggccaccagctcaaaaccagcacagatgttctgaactgaatggtgtggcctgtttttgtgtaaattccttttgccgtaatggatgcagtggaataacaatgtttacaggtaccgatcccgatccctgctcaatgtagcatttttttggttttattttcttaataaaagcaggggtaggtttctttaaactgcacaaacatgcaaggattttttaaaaatggaaacttctctcatgttattcaactagagcacttcagtttacaaaacagcaagtccatctttatggaagccagcacaaggaactgtgtgcaaataatgaagacgcttgcttggatcctgtttcaaaattctagaccagggctaccttacacagaattggtcatgttactgccaggagatttctgtgtaacttcatttattggctacagttttggcatttgaagatgtggtactcagatggggttttgtccaccattgtcaagattgtaatcttaaaaatcataccagtcattgataatttagtttatcctgaggcagtcgacttgcagaggcacagtctacaaagcctaggatgttgccactcaatggtttacattttgggacatcttttaagttgtttgtagcactgcagttcaaagtgttaatatttagagggacttctagattttatacctaatgcagtagaaccttgaagtatatttaagcttttttgttaagcttgaacagttggcaagaataatgtgagttcctatctgaaatagaatggtacattaccacttttaagttttaaaaattgatagatgttcagatgtatctcaaactcagttttatttttattccaaatattgtgaatgagaagccattgtcctaaactttggccatttttgtgctataaacatgcatttttaagttataaggtgaatcaaacaatatgtaatacagtattaggatgtaatctttgcttttgtagtactgttaaaatagagaattatgttgtttgcaccgtcttaattaaaattcttgatttttactagttgctttgcaaaaaacaaatgtttggctgcattgctaatatttgtaagtataagttgcttcaaggttgtgctgatgagtagataggatgtagtgatcttagtagtgattgaaagggagggtatttattatacaaactgtgaactgcaatgacatccttagttttggatgatgtgtattcttgtttttctttgcagcattttaatgaagattgctttgaagtgtttacgcagtagcacattagtataaaatttagtttagcacagtggacaaaaagtagttaaattaataacttaaaatcagtctctaatttatacatctgaagtatagcattcctgtatgcacacagtaaataatgggtagcctgggctctgtgttactttcttgtatttttatccaagttgtcagcttcttattgctgtgttgttgtgctaaactttgaaccttatttcttttattaaaaatcagtacactttctataatttagtaagatactggccataatcttccattgttataaccttaattttcactctgggtttacagtggctggtctgtataaataatttacacaaagatgactgaatgctaataccagttgcacttaaatgaacatgcccattctcagtagctgatgcagtaatatattcagtttatctatgcattgctggggtcttgatataagatggaaacagtgtttcttatctaaagttttgattatcagcaagttgaatggacactttagttatttaaataaagatttttgaccaaaatccagaaaatggtatgagagaaaaataaattccagctagtttaatagatttttaaatgtcaatctgattttagcctcttagagagtgctaactagctggtaatgtttacttttaattccttgttaaaatgaggcaataatttgcaagatttttgtatataagtgtaaattcttcatatctttttagatctaattcaatattttctgactacttctgccatgtataataccatttttgtgcatgcttgatgtgacattcataaattgtaccactatgactttatccatgtaaaatagctatttattgaattttcttttaaaagctggatttactgggttttttttttctctcagtttaaacatcttaacagagaatttgttactgtttattaaaagaattgcatttggaagcaagaaaacaaccggatttgcaatcatgtgaagaaacaataatgcctttattatcaagtgttaagcacaattcttataacaaactgtgataaattctttttgtttttttttcctttgccccattattttcttatgaacaaaccaaaaattcatggtgagcagttgcagtgttggctgatatatcttttatgtacagggaatttgaaaaggacagtggattcatttagaagtgtaactggtgctgtgattatagcaatacatttgttagttgtacttcatctttttcatgctagctttttaaatgtttagttttcctcttgtcatggtcagctgctgaatttacttgaaggatgtagaatactgtttaaaaaatactaaaatttgtacaattagatcaaagaattgtgcaatcatttcctttttaatttttaaaatgttgaggctcataaatatttgagaacatcagatctaatagagcatagtgatactatttaatttaaccaaagtctctagtgaatatttcaactttgaatgtaaactaacaaataaacctgaccaccaaggagattgtttgcccagagtttcaaagcacattgtctacaaatggaaattgaaataatttataaaatattgacgttactatgttttttaaaaagttcctaattttttcactaaatggaggaaactattagttttattgttaaatatggtagatattaatattcctcttagatgaccagtgattccaattgtcccagtttgaaataagtaccctgtgagtatgagataaattagtgacaatcagaacaagtttcagtatcagatgttcaagaggaagttgctattgcattgattttaatatttgtacataaacactgatttttttgagcattattttgtatttgttgtactttaatacctggtgtacagttccagaaataaaaatctgggaatctttt

SEQ ID NO: 3458 - protein, 486 aa, Homo sapiens
MPLEDLLAFYGYEPTIPAVANSSANSSPSELADELPDMTLDKEEIAKDLLSGDDEETQSSADDLTPSVTSHETSDFFPRPLRSNTACDGDKESEVEDVETDSGNSPEDLRKEIMIGLQYQAEIPPYLGEYDGNEKVYENEDQLLWCPDVVLESKVKEYLVETSLRTGSEKIMDRISAGTHTRDNEQALYELLKCNHNIKEAIERYCCNGKASQGMTAWTEEECRSFEHALMLFGKDFHLIQKNKVRTRTVAECVAFYYMWKKSERYDYFAQQTRFGKKRYNHHPGVTDYMDRLVDETEALGGTVNASALTSNRPEPIPDQQLNILNSFTASDLTALTNSVATVCDPTDVNCLDDSFPPLGNTPRGQVNHVPVVTEELLTLPSNGESDCFNLFETGFYHSELNPMNMCSEESERPAKRLKMGIAVPESFMNEVSVNNLGVDFENHTHHITSAKMAVSVADFGSLSANETNGFISAHALHQHAALHSE

SEQ ID NO: 3459 - DNA, 5199 bp, Homo sapiens
tcgttcgccctaaaggtaccaatatggcggaggcttcttttggaagttcgagcccagttgggtctttgtcttctgaggatcatgattttgaccccactgctgagatgttggtccatgactatgatgatgaaagaactcttgaagaagaggaaatgatggatgagggtaaaaacttcagttcagaaattgaagacttagaaaaggaaggaaccatgcctctagaagatttactggcattctatggctatgaacctacaattccagcagttgcaaattccagtgcaaatagttccccaagtgaactggcagatgaactaccagacatgacactagacaaagaggaaatagcaaaagacctgttgtcaggtgatgacgaggaaactcagtcttctgcggatgatctgacgccatctgtgacttcccatgaaacttctgatttcttccctaggcctttacgatcaaatactgcatgtgatggtgataaggaatcagaggttgaagatgttgaaacagacagtggtaattcacctgaagatttgaggaaggaaataatgattggtttacaatatcaggcagagattcccccttatcttggagagtacgatggtaatgagaaagtatatgaaaacgaagaccagttactttggtgtcctgatgtggttttggagagcaaagttaaggaataccttgttgagacttcattaaggactggcagtgaaaaaataatggataggatttctgcaggaacacacacaagggacaatgaacaggcattatatgaacttctcaagtgtaaccacaatataaaggaagcaatcgaaagatactgctgcaatggaaaggcctctcaaggaatgactgcatggacggaagaagaatgccgaagctttgaacatgcactcatgctttttggaaaagattttcatcttatacagaagaataaggtgagaactaggacagttgctgagtgtgtagcattctactatatgtggaagaaatctgaacgttatgattactttgctcaacagacaagatttgggaaaaaaagatataaccatcaccctggagttacggactatatggatcgtttagtagatgaaacagaagctttgggtgggacggtaaatgcttcagccttaacttctaaccggcctgagcctattcctgatcaacagctaaacattctcaactccttcactgccagtgacttgacagctttgaccaacagtgtagcaaccgtctgcgaccccacagatgtgaattgtttggatgatagctttcctccactgggcaacacaccccgtggacaagttaatcatgtgcctgttgtaacagaagagttactcaccctgcccagcaatggggaaagtgattgttttaatttatttgagactggattttatcactcggagctaaaccctatgaacatgtgcagtgaagagtcagagagaccagcaaaaagattgaaaatgggcattgccgtccctgaatcctttatgaatgaagtttctgtaaataacctgggtgtggactttgaaaatcacacacatcacatcaccagtgccaaaatggctgtttctgtggctgactttggcagtctctctgccaacgagaccaatggtttcatcagtgcccatgctctgcatcagcacgcggccctacactctgagtgacctgagtgaggatcccggaactgcgtgtgcagcaccagtaaacttgaggggagctatcaggtttgcatagtctttcactggaagtttgaacctttctcactatgacatcagtgatgtcagtatgtatagaactatatcttgatttatcaagagtattttcatttttcaatccataaatgtggaaatgaactatgatcagcagagttgggaactaagattgaactctgtggtgcagctttaagctctgcttctctcttcctcatctcccaatacctcttccccactcccttctttttctattcttttgtgttccccactgccctcactcccaattttaaaacctgtagacagaggccaccagctcaaaaccagcacagatgttctgaactgaatggtgtggcctgtttttgtgtaaattccttttgccgtaatggatgcagtggaataacaatgtttacaggtaccgatcccgatccctgctcaatgtagcatttttttggttttattttcttaataaaagcaggggtaggtttctttaaactgcacaaacatgcaaggattttttaaaaatggaaacttctctcatgttattcaactagagcacttcagtttacaaaacagcaagtccatctttatggaagccagcacaaggaactgtgtgcaaataatgaagacgcttgcttggatcctgtttcaaaattctagaccagggctaccttacacagaattggtcatgttactgccaggagatttctgtgtaacttcatttattggctacagttttggcatttgaagatgtggtactcagatggggttttgtccaccattgtcaagattgtaatcttaaaaatcataccagtcattgataatttagtttatcctgaggcagtcgacttgcagaggcacagtctacaaagcctaggatgttgccactcaatggtttacattttgggacatcttttaagttgtttgtagcactgcagttcaaagtgttaatatttagagggacttctagattttatacctaatgcagtagaaccttgaagtatatttaagcttttttgttaagcttgaacagttggcaagaataatgtgagttcctatctgaaatagaatggtacattaccacttttaagttttaaaaattgatagatgttcagatgtatctcaaactcagttttatttttattccaaatattgtgaatgagaagccattgtcctaaactttggccatttttgtgctataaacatgcatttttaagttataaggtgaatcaaacaatatgtaatacagtattaggatgtaatctttgcttttgtagtactgttaaaatagagaattatgttgtttgcaccgtcttaattaaaattcttgatttttactagttgctttgcaaaaaacaaatgtttggctgcattgctaatatttgtaagtataagttgcttcaaggttgtgctgatgagtagataggatgtagtgatcttagtagtgattgaaagggagggtatttattatacaaactgtgaactgcaatgacatccttagttttggatgatgtgtattcttgtttttctttgcagcattttaatgaagattgctttgaagtgtttacgcagtagcacattagtataaaatttagtttagcacagtggacaaaaagtagttaaattaataacttaaaatcagtctctaatttatacatctgaagtatagcattcctgtatgcacacagtaaataatgggtagcctgggctctgtgttactttcttgtatttttatccaagttgtcagcttcttattgctgtgttgttgtgctaaactttgaaccttatttcttttattaaaaatcagtacactttctataatttagtaagatactggccataatcttccattgttataaccttaattttcactctgggtttacagtggctggtctgtataaataatttacacaaagatgactgaatgctaataccagttgcacttaaatgaacatgcccattctcagtagctgatgcagtaatatattcagtttatctatgcattgctggggtcttgatataagatggaaacagtgtttcttatctaaagttttgattatcagcaagttgaatggacactttagttatttaaataaagatttttgaccaaaatccagaaaatggtatgagagaaaaataaattccagctagtttaatagatttttaaatgtcaatctgattttagcctcttagagagtgctaactagctggtaatgtttacttttaattccttgttaaaatgaggcaataatttgcaagatttttgtatataagtgtaaattcttcatatctttttagatctaattcaatattttctgactacttctgccatgtataataccatttttgtgcatgcttgatgtgacattcataaattgtaccactatgactttatccatgtaaaatagctatttattgaattttcttttaaaagctggatttactgggttttttttttctctcagtttaaacatcttaacagagaatttgttactgtttattaaaagaattgcatttggaagcaagaaaacaaccggatttgcaatcatgtgaagaaacaataatgcctttattatcaagtgttaagcacaattcttataacaaactgtgataaattctttttgtttttttttcctttgccccattattttcttatgaacaaaccaaaaattcatggtgagcagttgcagtgttggctgatatatcttttatgtacagggaatttgaaaaggacagtggattcatttagaagtgtaactggtgctgtgattatagcaatacatttgttagttgtacttcatctttttcatgctagctttttaaatgtttagttttcctcttgtcatggtcagctgctgaatttacttgaaggatgtagaatactgtttaaaaaatactaaaatttgtacaattagatcaaagaattgtgcaatcatttcctttttaatttttaaaatgttgaggctcataaatatttgagaacatcagatctaatagagcatagtgatactatttaatttaaccaaagtctctagtgaatatttcaactttgaatgtaaactaacaaataaacctgaccaccaaggagattgtttgcccagagtttcaaagcacattgtctacaaatggaaattgaaataatttataaaatattgacgttactatgttttttaaaaagttcctaattttttcactaaatggaggaaactattagttttattgttaaatatggtagatattaatattcctcttagatgaccagtgattccaattgtcccagtttgaaataagtaccctgtgagtatgagataaattagtgacaatcagaacaagtttcagtatcagatgttcaagaggaagttgctattgcattgattttaatatttgtacataaacactgatttttttgagcattattttgtatttgttgtactttaatacctggtgtacagttccagaaataaaaatctgggaatctttt

SEQ ID NO: 3460 - protein, 549 aa, Homo sapiens; identical to SEQ ID NO: 358

SEQ ID NO: 3461 - DNA, 4156 bp, Homo sapiens
gctcgttcgccctaaaggtaccaatatggcggaggcttcttttggaagttcgagcccagttgggtctttgtcttctgaggatcatgattttgaccccactgctgagatgttggtccatgactatgatgatgaaagaactcttgaagaagaggaaatgatggatgagggtaaaaacttcagttcagaaattgaagacttagaaaaggaaggaaccatgcctctagaagatttactggcattctatggctatgaacctacaattccagcagttgcaaattccagtgcaaatagttccccaagtgaactggcagatgaactaccagacatgacactagacaaagaggaaatagcaaaagacctgttgtcaggtgatgacgaggaaactcagtcttctgcggatgatctgacgccatctgtgacttcccatgaaacttctgatttcttccctaggcctttacgatcaaatactgcatgtgatggtgataaggaatcagaggttgaagatgttgaaacagacagtggtaattcacctgaagatttgaggaaggaaataatgattggtttacaatatcaggcagagattcccccttatcttggagagtacgatggtaatgagaaagtatatgaaaacgaagaccagttactttggtgtcctgatgtggttttggagagcaaagttaaggaataccttgttgagacttcattaaggactggcagtgaaaaaataatggataggatttctgcaggaacacacacaagggacaatgaacaggcattatatgaacttctcaagtgtaaccacaatataaaggaagcaatcgaaagatactgctgcaatggaaaggcctctcaaggaatgactgcatggacggaagaagaatgccgaagctttgaacatgcactcatgctttttggaaaagattttcatcttatacagaagaataaggtgagaactaggacagttgctgagtgtgtagcattctactatatgtggaagaaatctgaacgttatgattactttgctcaacagacaagatttgggaaaaaaagatataaccatcaccctggagttacggactatatggatcgtttagtagatgaaacagaagctttgggtgggacggtaaatgcttcagccttaacttctaaccggcctgagcctattcctgatcaacagctaaacattctcaactccttcactgccagtgacttgacagctttgaccaacagtgtagcaaccgtctgcgaccccacagatgtgaattgtttggatgatagctttcctccactgggcaacacaccccgtggacaagttaatcatgtgcctgttgtaacagaagagttactcaccctgcccagcaatggggaaagtgattgttttaatttatttgagactggattttatcactcggagctaaaccctatgaacatgtgcagtgaagagtcagagagaccagcaaaaagattgaaaatgggcattgccgtccctgaatcctttatgaatgaagtttctgtaaataacctgggtgtggactttgaaaatcacacacatcacatcaccagtgccaaaatggctgtttctgtggctgactttggcagtctctctgccaacgagaccaatggtttcatcagtgcccatgctctgcatcagcacgcggccctacactctgagtgacctgagtgaggatcccggaactgcgtgtgcagcaccagtaaacttgaggggagctatcaggtttgcatagtctttcactggaagtttgaacctttctcactatgacatcagtgatgtcagtatgtatagaactatatcttgatttatcaagagtattttcatttttcaatccataaatgtggaaatgaactatgatcagcagagttgggaactaagattgaactctgtggtgcagctttaagctctgcttctctcttcctcatctcccaatacctcttccccactcccttctttttctattcttttgtgttccccactgccctcactcccaattttaaaacctgtagacagaggccaccagctcaaaaccagcacagatgttctgaactgaatggtgtggcctgtttttgtgtaaattccttttgccgtaatggatgcagtggaataacaatgtttacaggtaccgatcccgatccctgctcaatgtagcatttttttggttttattttcttaataaaagcaggggtaggtttctttaaactgcacaaacatgcaaggattttttaaaaatggaaacttctctcatgttattcaactagagcacttcagtttacaaaacagcaagtccatctttatggaagccagcacaaggaactgtgtgcaaataatgaagacgcttgcttggatcctgtttcaaaattctagaccagggctaccttacacagaattggtcatgttactgccaggagatttctgtgtaacttcatttattggctacagttttggcatttgaagatgtggtactcagatggggttttgtccaccattgtcaagattgtaatcttaaaaatcataccagtcattgataatttagtttatcctgaggcagtcgacttgcagaggcacagtctacaaagcctaggatgttgccactcaatggtttacattttgggacatcttttaagttgtttgtagcactgcagttcaaagtgttaatatttagagggacttctagattttatacctaatgcagtagaaccttgaagtatatttaagcttttttgttaagcttgaacagttggcaagaataatgtgagttcctatctgaaatagaatggtacattaccacttttaagttttaaaaattgatagatgttcagatgtatctcaaactcagttttatttttattccaaatattgtgaatgagaagccattgtcctaaactttggccatttttgtgctataaacatgcatttttaagttataaggtgaatcaaacaatatgtaatacagtattaggatgtaatctttgcttttgtagtactgttaaaatagagaattatgttgtttgcaccgtcttaattaaaattcttgatttttactagttgctttgcaaaaaacaaatgtttggctgcattgctaatatttgtaagtataagttgcttcaaggttgtgctgatgagtagataggatgtagtgatcttagtagtgattgaaagggagggtatttattatacaaactgtgaactgcaatgacatccttagttttggatgatgtgtattcttgtttttctttgcagcattttaatgaagattgctttgaagtgtttacgcagtagcacattagtataaaatttagtttagcacagtggacaaaaagtagttaaattaataacttaaaatcagtctctaatttatacatctgaagtatagcattcctgtatgcacacagtaaataatgggtagcctgggctctgtgttactttcttgtatttttatccaagttgtcagcttcttattgctgtgttgttgtgctaaactttgaaccttatttcttttattaaaaatcagtacactttctataatttagtaagatactggccataatcttccattgttataaccttaattttcactctgggtttacagtggctggtctgtataaataatttacacaaagatgactgaatgctaataccagttgcacttaaatgaacatgcccattctcagtagctgatgcagtaatatattcagtttatctatgcattgctggggtcttgatataagatggaaacagtgtttcttatctaaagttttgattatcagcaagttgaatggacactttagttatttaaataaagatttttgaccaaaatccagaaaatggtatgagagaaaaataaattccagctagtttaatagatttttaaatgtcaatctgattttagcctcttagagagtgctaactagctggtaatgtttacttttaattccttgttaaaatgaggcaataatttgcaagatttttgtatataagtgtaaattcttcatatctttttagatctaattcaatattttctgactacttctgccatgtataataccatttttgtgcatgcttgatgtgacattcataaattgtaccactatgactttatccatgtaaaatagctatttattgaattttcttttaaaagct

SEQ ID NO: 3462 - protein, 549 aa, Homo sapiens; identical to SEQ ID NO: 358

SEQ ID NO: 3463 - DNA, 678 bp, Homo sapiens
aggcttcttttggaagttcgagcccagttgggtctttgtcttctgaggatcatgattttgaccccactgctgagatgttggtccatgactatgatgatgaaagaactcttgaagaagaggaaatgatggatgagggtaaaaacttcagttcagaaattgaagacttagaaaaggaaggaaccatgcctctagaagatttactggcattctatggctatgaacctacaattccagcagttgcaaattccagtgcaaatagttccccaagtgaactggcagatgaactaccagacatgacactagacaaagtaagtgtgagcatttgaaagaaaaattcagggtctgttaccattgactgcttttacttccatttaaagtattatttaataattcttaaatgtaaacttcttgttgacccattgtgcttattttggtggctgatttaaactttgtttggctttgatcaccctatgttaagagtagtattaatagcagcttcatggtactttgcatgcctgaatattctcccataatgttttcatctttcctgtgtagacacattgtatctaaacttagattttgccttaacttcttttgatcctataaacacataaaagccttgattaataaatcccccagaagccttcaaaccaagctggcttaggcgtggagtggttg

SEQ ID NO: 3464 - protein, 83 aa, Homo sapiens
MLVHDYDDERTLEEEEMMDEGKNFSSEIEDLEKEGTMPLEDLLAFYGYEPTIPAVANSSANSSPSELADELPDMTLDKVSVSI

SEQ ID NO: 3465 - DNA, 433 bp, Homo sapiens
ctgagctaagtcttgaaagatgacaaggcttttgacaatacacaaatatagggctgccaagtttgatgagtgtaacaaacaaatagagccctgagatacagagtaacactcggggcccacttccagagggtagcagggaaagacagtcagcaatcttcagcggaggcctgaagtctgagaaggccagtcccatgaagagtattccaggcaaaaaaaaaagacatatgtgaggcctgaaggtggttccctgctaagccaagtggccaaagtttgagttctttcatcatcatagtcatggaccaacatctcagcagtggggtcaaaatcatgatcctcagaagacaaagacccaactggaataaaacaaactgaatcactttacacatttacaaggctattaacaaaagaaaataaaaatttgtgttcttctgcc

SEQ ID NO: 3466 - protein, 35 aa, Homo sapiens
AKWPKFEFFHHHSHGPTSQQWGQNHDPQKTKTQLE

SEQ ID NO: 3467 - DNA, 4240 bp, Homo sapiens
gcggccgcgggcgcgggcgggcgcgcgggggagcccggccgagggatgggctgcgcccccagcatccatgtctcgcagagcggcgtgatctactgccgggactcggacgagtccagctcgccccgccagaccaccagcgtgtcgcagggcccggcggcacccctgcccggcctcttcgtccagaccgacgccgccgacgccatccccccgagccgcgcgtcgggaccccccagcgtagcccgcgtccgcagggcccgcaccgagctgggcagcggtagcagcgcgggttccgcagcccccgccgcgaccaccagcaggggccggaggcgccactgctgcagcagcgccgaggccgagactcagacctgctacaccagcgtgaagcaggtgtcttctgcggaggtgcgcatcgggcccatgagactgacgcaggaccctattcaggttttgctgatctttgcaaaggaagatagtcagagcgatggcttctggtgggcctgcgacagagctggttatagatgcaatattgctcggactccagagtcagcccttgaatgctttcttgataagcatcatgaaattattgtaattgatcatagacaaactcagaacttcgatgcagaagcagtgtgcaggtcgatccgggccacaaatccctccgagcacacggtgatcctcgcagtggtttcgcgagtatcggatgaccatgaagaggcgtcagtccttcctcttctccacgcaggcttcaacaggagatttatggagaatagcagcataattgcttgctataatgaactgattcaaatagaacatggggaagttcgctcccagttcaaattacgggcctgtaattcagtgtttacagcattagatcactgtcatgaagccatagaaataacaagcgatgaccacgtgattcagtatgtcaacccagccttcgaaaggatgatgggctaccacaaaggtgagctcctgggaaaagaactcgctgatctgcccaaaagcgataagaaccgggcagaccttctcgacaccatcaatacatgcatcaagaagggaaaggagtggcagggggtttactatgccagacggaaatccggggacagcatccaacagcacgtgaagatcaccccagtgattggccaaggagggaaaattaggcattttgtctcgctcaagaaactgtgttgtaccactgacaataataagcagattcacaagattcatcgtgattcaggagacaattctcagacagagcctcattcattcagatataagaacaggaggaaagagtccattgacgtgaaatcgatatcatctcgaggcagtgatgcaccaagcctgcagaatcgtcgctatccgtccatggcgaggatccactccatgaccatcgaggctcccatcacaaaggacggcttgagaagactgtcaggaaacgagtatgtgtttactaagaatgtgcaccagagtcacagtcaccttgcaatgccaataaccatcaatgatgttcccccttgtatctctcaattacttgataatgaggagagttgggacttcaacatctttgaattggaagccattacgcataaaaggccattggtttatctgggcttaaaggtcttctctcggtttggagtatgtgaatttttaaactgttctgaaaccactcttcgggcctggttccaagtgatcgaagccaactaccactcttccaatgcctaccacaactccacccatgctgccgacgtcctgcacgccaccgctttctttcttggaaaggaaagagtaaagggaagcctcgatcagttggatgaggtggcagccctcattgctgccacagtccatgacgtggatcacccgggaaggaccaactctttcctctgcaatgcaggcagtgagcttgctgtgctctacaatgacactgctgttctggagagtcaccacaccgccctggccttccagctcacggtcaaggacaccaaatgcaacattttcaagaatattgacaggaaccattatcgaacgctgcgccaggctattattgacatggttttggcaacagagatgacaaaacactttgaacatgtgaataagtttgtgaacagcatcaacaagccaatggcagctgagattgaaggcagcgactgtgaatgcaaccctgctgggaagaacttccctgaaaaccaaatcctgatcaaacgcatgatgattaagtgtgctgacgtggccaacccatgccgccccttggacctgtgcattgaatgggctgggaggatctctgaggagtattttgcacagactgatgaagagaagagacagggactacctgtggtgatgccagtgtttgaccggaatacctgtagcatccccaagtctcagatctctttcattgactacttcataacagacatgtttgatgcttgggatgcctttgcacatctgccagccctgatgcaacatttggctgacaactacaaacactggaagacactagatgacctaaagtgcaaaagtttgaggcttccatctgacagctaaagccaagccacagagggggcctcttgaccgacaaaggacactgtgaatcacagtagcgtaaacgagaggccttcctttctaatgacaatgacaggtattggtgaaggagctaatgtttaatatttgaccttgaatcattcaagtccccaaatttcattcttagaaagttatgttccatgaagaaaaatatatgttcttttgaatacttaatgacagaacaaatacttggcaaactcctttgctctgctgtcatcctgtgtacccttgtcaatccatggagctggttcactgtaactagcaggccacaggaagcaaagccttggtgcctgtgagctcatctcccaggatggtgactaagtagcttagctagtgatcagctcatcctttaccataaaagtcatcattgctgtttagcttgactgttttcctcaagaacatcgatctgaaggattcataaggagcttatctgaacagatttatctaagaaaaaaaaaaaacgacataaaataagtgaaacaactaggaccaaattacagataaactagttagcttcacagcctctatggctacatggttcttctggccgatggtatgacacctaagttagaacacagccttggctggtgggtgccctctctagactggtatcagcagcctgtgtaacccctttcctgtaaaaggggttcatcttaacaaagtcatccatgatgagggaaaaagtggcatttcatttttggggaatccatgagcttcctttatttctggctcacagaggcagccacgaggcactacaccaagtattatataaaagccattaaatttgaatgcccttggacaagcttttcttaaaaaaaaaaaaaaaaagtttatatacatgtttaaaatttttattaaaatccaaattttctgggtgtaagcccatgcagtatgttgtgccatgcaccatctatacgtaatattttgggaggggataggggaagtttcaaggttcagatatttttaaccagtctatatttgaaatcatgccattagctttaacaatgttaaaattgtgtggtgtaaatatatcagaaaataggcatatggggaggcagtaaatactattttaagctattaattgtatgctaaaagcttctaaagcacaagtgcatatttttatactgctcttttcacaactccctgtgatctacataaagtcagactcgagattttcctttctcttttaccagctgatccttcctatgtattataaatattagactccgtaaacaaacttcatttttctttctctgtacttcatgctgcatttttaaaaggtataaacaaacagagactgaattaattgaatcagtaattacttttttccaatacaaattggaatgcagaatacttggaacttgtacatggggaaaaaatgacttatcactacataatgtgccaatgtttttttctatgttttgtaccaaaaatggaaaaatatgacaattccatgcaaagaaatgtatctaaattatttttgttagatgataagagaacttgcttggtcaggacagcagccagctttgtattgtaatgctatattatgtaaatgtgatgaaaatgtttttgtgaagtacttgtaactaaattcctacagccatttttcactcccaacagctgtttttattttacctctttggcctaaagttttcataatttcaaa

SEQ ID NO: 3468 - protein, 830 aa, Homo sapiens; identical to SEQ ID NO: 362

SEQ ID NO: 3469 - DNA, 4114 bp, Homo sapiens
gcggccgcgggcgcgggcgggcgcgcgggggagcccggccgagggatgggctgcgcccccagcatccatgtctcgcagagcggcgtgatctactgccgggactcggacgagtccagctcgccccgccagaccaccagcgtgtcgcagggcccggcggcacccctgcccggcctcttcgtccagaccgacgccgccgacgccatccccccgagccgcgcgtcgggaccccccagcgtagcccgcgtccgcagggcccgcaccgagctgggcagcggtagcagcgcgggttccgcagcccccgccgcgaccaccagcaggggccggaggcgccactgctgcagcagcgccgaggccgagactcagacctgctacaccagcgtgaagcaggtgtcttctgcggaggtgcgcatcgggcccatgagactgacgcaggaccctattcaggttttgctgatctttgcaaaggaagatagtcagagcgatggcttctggtgggcctgcgacagagctggttatagatgcaatattgctcggactccagagtcagcccttgaatgctttcttgataagcatcatgaaattattgtaattgatcatagacaaactcagaacttcgatgcagaagcagtgtgcaggtcgatccgggccacaaatccctccgagcacacggtgatcctcgcagtggtttcgcgagtatcggatgaccatgaagaggcgtcagtccttcctcttctccacgcaggcttcaacaggagatttatggagaatagcagcataattgcttgctataatgaactgattcaaatagaacatggggaagttcgctcccagttcaaattacgggcctgtaattcagtgtttacagcattagatcactgtcatgaagccatagaaataacaagcgatgaccacgtgattcagattcacaagattcatcgtgattcaggagacaattctcagacagagcctcattcattcagatataagaacaggaggaaagagtccattgacgtgaaatcgatatcatctcgaggcagtgatgcaccaagcctgcagaatcgtcgctatccgtccatggcgaggatccactccatgaccatcgaggctcccatcacaaaggttataaatataatcaatgcagcccaagaaaacagcccagtcacagtagcggaagccttggacagagttctagagattttacggaccacagaactgtactcccctcagctgggtaccaaagatgaagatcctcacaccagtgatcttgttggaggcctgatgactgacggcttgagaagactgtcaggaaacgagtatgtgtttactaagaatgtgcaccagagtcacagtcaccttgcaatgccaataaccatcaatgatgttcccccttgtatctctcaattacttgataatgaggagagttgggacttcaacatctttgaattggaagccattacgcataaaaggccattggtttatctgggcttaaaggtcttctctcggtttggagtatgtgaatttttaaactgttctgaaaccactcttcgggcctggttccaagtgatcgaagccaactaccactcttccaatgcctaccacaactccacccatgctgccgacgtcctgcacgccaccgctttctttcttggaaaggaaagagtaaagggaagcctcgatcagttggatgaggtggcagccctcattgctgccacagtccatgacgtggatcacccgggaaggaccaactctttcctctgcaatgcaggcagtgagcttgctgtgctctacaatgacactgctgttctggagagtcaccacaccgccctggccttccagctcacggtcaaggacaccaaatgcaacattttcaagaatattgacaggaaccattatcgaacgctgcgccaggctattattgacatggttttggcaacagagatgacaaaacactttgaacatgtgaataagtttgtgaacagcatcaacaagccaatggcagctgagattgaaggcagcgactgtgaatgcaaccctgctgggaagaacttccctgaaaaccaaatcctgatcaaacgcatgatgattaagtgtgctgacgtggccaacccatgccgccccttggacctgtgcattgaatgggctgggaggatctctgaggagtattttgcacagactgatgaagagaagagacagggactacctgtggtgatgccagtgtttgaccggaatacctgtagcatccccaagtctcagatctctttcattgactacttcataacagacatgtttgatgcttgggatgcctttgcacatctgccagccctgatgcaacatttggctgacaactacaaacactggaagacactagatgacctaaagtgcaaaagtttgaggcttccatctgacagctaaagccaagccacagagggggcctcttgaccgacaaaggacactgtgaatcacagtagcgtaaacgagaggccttcctttctaatgacaatgacaggtattggtgaaggagctaatgtttaatatttgaccttgaatcattcaagtccccaaatttcattcttagaaagttatgttccatgaagaaaaatatatgttcttttgaatacttaatgacagaacaaatacttggcaaactcctttgctctgctgtcatcctgtgtacccttgtcaatccatggagctggttcactgtaactagcaggccacaggaagcaaagccttggtgcctgtgagctcatctcccaggatggtgactaagtagcttagctagtgatcagctcatcctttaccataaaagtcatcattgctgtttagcttgactgttttcctcaagaacatcgatctgaaggattcataaggagcttatctgaacagatttatctaagaaaaaaaaaaaacgacataaaataagtgaaacaactaggaccaaattacagataaactagttagcttcacagcctctatggctacatggttcttctggccgatggtatgacacctaagttagaacacagccttggctggtgggtgccctctctagactggtatcagcagcctgtgtaacccctttcctgtaaaaggggttcatcttaacaaagtcatccatgatgagggaaaaagtggcatttcatttttggggaatccatgagcttcctttatttctggctcacagaggcagccacgaggcactacaccaagtattatataaaagccattaaatttgaatgcccttggacaagcttttcttaaaaaaaaaaaaaaaaagtttatatacatgtttaaaatttttattaaaatccaaattttctgggtgtaagcccatgcagtatgttgtgccatgcaccatctatacgtaatattttgggaggggataggggaagtttcaaggttcagatatttttaaccagtctatatttgaaatcatgccattagctttaacaatgttaaaattgtgtggtgtaaatatatcagaaaataggcatatggggaggcagtaaatactattttaagctattaattgtatgctaaaagcttctaaagcacaagtgcatatttttatactgctcttttcacaactccctgtgatctacataaagtcagactcgagattttcctttctcttttaccagctgatccttcctatgtattataaatattagactccgtaaacaaacttcatttttctttctctgtacttcatgctgcatttttaaaaggtataaacaaacagagactgaattaattgaatcagtaattacttttttccaatacaaattggaatgcagaatacttggaacttgtacatggggaaaaaatgacttatcactacataatgtgccaatgtttttttctatgttttgtaccaaaaatggaaaaatatgacaattccatgcaaagaaatgtatctaaattatttttgttagatgataagagaacttgcttggtcaggacagcagccagctttgtattgtaatgctatattatgtaaatgtgatgaaaatgtttttgtgaagtacttgtaactaaattcctacagccatttttcactcccaacagctgtttttattttacctctttggcctaaagttttcataatttcaaa

SEQ ID NO: 3470 - protein, 788 aa, Homo sapiens; identical to SEQ ID NO: 360

SEQ ID NO: 3471 - DNA, 4405 bp, Homo sapiens
gcggccgcgggcgcgggcgggcgcgcgggggagcccggccgagggatgggctgcgcccccagcatccatgtctcgcagagcggcgtgatctactgccgggactcggacgagtccagctcgccccgccagaccaccagcgtgtcgcagggcccggcggcacccctgcccggcctcttcgtccagaccgacgccgccgacgccatccccccgagccgcgcgtcgggaccccccagcgtagcccgcgtccgcagggcccgcaccgagctgggcagcggtagcagcgcgggttccgcagcccccgccgcgaccaccagcaggggccggaggcgccactgctgcagcagcgccgaggccgagactcagacctgctacaccagcgtgaagcaggtgtcttctgcggaggtgcgcatcgggcccatgagactgacgcaggaccctattcaggttttgctgatctttgcaaaggaagatagtcagagcgatggcttctggtgggcctgcgacagagctggttatagatgcaatattgctcggactccagagtcagcccttgaatgctttcttgataagcatcatgaaattattgtaattgatcatagacaaactcagaacttcgatgcagaagcagtgtgcaggtcgatccgggccacaaatccctccgagcacacggtgatcctcgcagtggtttcgcgagtatcggatgaccatgaagaggcgtcagtccttcctcttctccacgcaggcttcaacaggagatttatggagaatagcagcataattgcttgctataatgaactgattcaaatagaacatggggaagttcgctcccagttcaaattacgggcctgtaattcagtgtttacagcattagatcactgtcatgaagccatagaaataacaagcgatgaccacgtgattcagtatgtcaacccagccttcgaaaggatgatgggctaccacaaaggtgagctcctgggaaaagaactcgctgatctgcccaaaagcgataagaaccgggcagaccttctcgacaccatcaatacatgcatcaagaagggaaaggagtggcagggggtttactatgccagacggaaatccggggacagcatccaacagcacgtgaagatcaccccagtgattggccaaggagggaaaattaggcattttgtctcgctcaagaaactgtgttgtaccactgacaataataagcagattcacaagattcatcgtgattcaggagacaattctcagacagagcctcattcattcagatataagaacaggaggaaagagtccattgacgtgaaatcgatatcatctcgaggcagtgatgcaccaagcctgcagaatcgtcgctatccgtccatggcgaggatccactccatgaccatcgaggctcccatcacaaaggttataaatataatcaatgcagcccaagaaaacagcccagtcacagtagcggaagccttggacagagttctagagattttacggaccacagaactgtactcccctcagctgggtaccaaagatgaagatcctcacaccagtgatcttgttggaggcctgatgactgacggcttgagaagactgtcaggaaacgagtatgtgtttactaagaatgtgcaccagagtcacagtcaccttgcaatgccaataaccatcaatgatgttcccccttgtatctctcaattacttgataatgaggagagttgggacttcaacatctttgaattggaagccattacgcataaaaggccattggtttatctgggcttaaaggtcttctctcggtttggagtatgtgaatttttaaactgttctgaaaccactcttcgggcctggttccaagtgatcgaagccaactaccactcttccaatgcctaccacaactccacccatgctgccgacgtcctgcacgccaccgctttctttcttggaaaggaaagagtaaagggaagcctcgatcagttggatgaggtggcagccctcattgctgccacagtccatgacgtggatcacccgggaaggaccaactctttcctctgcaatgcaggcagtgagcttgctgtgctctacaatgacactgctgttctggagagtcaccacaccgccctggccttccagctcacggtcaaggacaccaaatgcaacattttcaagaatattgacaggaaccattatcgaacgctgcgccaggctattattgacatggttttggcaacagagatgacaaaacactttgaacatgtgaataagtttgtgaacagcatcaacaagccaatggcagctgagattgaaggcagcgactgtgaatgcaaccctgctgggaagaacttccctgaaaaccaaatcctgatcaaacgcatgatgattaagtgtgctgacgtggccaacccatgccgccccttggacctgtgcattgaatgggctgggaggatctctgaggagtattttgcacagactgatgaagagaagagacagggactacctgtggtgatgccagtgtttgaccggaatacctgtagcatccccaagtctcagatctctttcattgactacttcataacagacatgtttgatgcttgggatgcctttgcacatctgccagccctgatgcaacatttggctgacaactacaaacactggaagacactagatgacctaaagtgcaaaagtttgaggcttccatctgacagctaaagccaagccacagagggggcctcttgaccgacaaaggacactgtgaatcacagtagcgtaaacgagaggccttcctttctaatgacaatgacaggtattggtgaaggagctaatgtttaatatttgaccttgaatcattcaagtccccaaatttcattcttagaaagttatgttccatgaagaaaaatatatgttcttttgaatacttaatgacagaacaaatacttggcaaactcctttgctctgctgtcatcctgtgtacccttgtcaatccatggagctggttcactgtaactagcaggccacaggaagcaaagccttggtgcctgtgagctcatctcccaggatggtgactaagtagcttagctagtgatcagctcatcctttaccataaaagtcatcattgctgtttagcttgactgttttcctcaagaacatcgatctgaaggattcataaggagcttatctgaacagatttatctaagaaaaaaaaaaaacgacataaaataagtgaaacaactaggaccaaattacagataaactagttagcttcacagcctctatggctacatggttcttctggccgatggtatgacacctaagttagaacacagccttggctggtgggtgccctctctagactggtatcagcagcctgtgtaacccctttcctgtaaaaggggttcatcttaacaaagtcatccatgatgagggaaaaagtggcatttcatttttggggaatccatgagcttcctttatttctggctcacagaggcagccacgaggcactacaccaagtattatataaaagccattaaatttgaatgcccttggacaagcttttcttaaaaaaaaaaaaaaaaagtttatatacatgtttaaaatttttattaaaatccaaattttctgggtgtaagcccatgcagtatgttgtgccatgcaccatctatacgtaatattttgggaggggataggggaagtttcaaggttcagatatttttaaccagtctatatttgaaatcatgccattagctttaacaatgttaaaattgtgtggtgtaaatatatcagaaaataggcatatggggaggcagtaaatactattttaagctattaattgtatgctaaaagcttctaaagcacaagtgcatatttttatactgctcttttcacaactccctgtgatctacataaagtcagactcgagattttcctttctcttttaccagctgatccttcctatgtattataaatattagactccgtaaacaaacttcatttttctttctctgtacttcatgctgcatttttaaaaggtataaacaaacagagactgaattaattgaatcagtaattacttttttccaatacaaattggaatgcagaatacttggaacttgtacatggggaaaaaatgacttatcactacataatgtgccaatgtttttttctatgttttgtaccaaaaatggaaaaatatgacaattccatgcaaagaaatgtatctaaattatttttgttagatgataagagaacttgcttggtcaggacagcagccagctttgtattgtaatgctatattatgtaaatgtgatgaaaatgtttttgtgaagtacttgtaactaaattcctacagccatttttcactcccaacagctgtttttattttacctctttggcctaaagttttcataatttcaaa

SEQ ID NO: 3472 - protein, 885 aa, Homo sapiens; identical to SEQ ID NO: 368

SEQ ID NO: 3473 - DNA, 4264 bp, Homo sapiens
gcggccgcgggcgcgggcgggcgcgcgggggagcccggccgagggatgggctgcgcccccagcatccatgtctcgcagagcggcgtgatctactgccgggactcggacgagtccagctcgccccgccagaccaccagcgtgtcgcagggcccggcggcacccctgcccggcctcttcgtccagaccgacgccgccgacgccatccccccgagccgcgcgtcgggaccccccagcgtagcccgcgtccgcagggcccgcaccgagctgggcagcggtagcagcgcgggttccgcagcccccgccgcgaccaccagcaggggccggaggcgccactgctgcagcagcgccgaggccgagactcagacctgctacaccagcgtgaagcaggtgtcttctgcggaggtgcgcatcgggcccatgagactgacgcaggaccctattcaggttttgctgatctttgcaaaggaagatagtcagagcgatggcttctggtgggcctgcgacagagctggttatagatgcaatattgctcggactccagagtcagcccttgaatgctttcttgataagcatcatgaaattattgtaattgatcatagacaaactcagaacttcgatgcagaagcagtgtgcaggtcgatccgggccacaaatccctccgagcacacggtgatcctcgcagtggtttcgcgagtatcggatgaccatgaagaggcgtcagtccttcctcttctccacgcaggcttcaacaggagatttatggagaatagcagcataattgcttgctataatgaactgattcaaatagaacatggggaagttcgctcccagttcaaattacgggcctgtaattcagtgtttacagcattagatcactgtcatgaagccatagaaataacaagcgatgaccacgtgattcaggagtggcagggggtttactatgccagacggaaatccggggacagcatccaacagcacgtgaagatcaccccagtgattggccaaggagggaaaattaggcattttgtctcgctcaagaaactgtgttgtaccactgacaataataagcagattcacaagattcatcgtgattcaggagacaattctcagacagagcctcattcattcagatataagaacaggaggaaagagtccattgacgtgaaatcgatatcatctcgaggcagtgatgcaccaagcctgcagaatcgtcgctatccgtccatggcgaggatccactccatgaccatcgaggctcccatcacaaaggttataaatataatcaatgcagcccaagaaaacagcccagtcacagtagcggaagccttggacagagttctagagattttacggaccacagaactgtactcccctcagctgggtaccaaagatgaagatcctcacaccagtgatcttgttggaggcctgatgactgacggcttgagaagactgtcaggaaacgagtatgtgtttactaagaatgtgcaccagagtcacagtcaccttgcaatgccaataaccatcaatgatgttcccccttgtatctctcaattacttgataatgaggagagttgggacttcaacatctttgaattggaagccattacgcataaaaggccattggtttatctgggcttaaaggtcttctctcggtttggagtatgtgaatttttaaactgttctgaaaccactcttcgggcctggttccaagtgatcgaagccaactaccactcttccaatgcctaccacaactccacccatgctgccgacgtcctgcacgccaccgctttctttcttggaaaggaaagagtaaagggaagcctcgatcagttggatgaggtggcagccctcattgctgccacagtccatgacgtggatcacccgggaaggaccaactctttcctctgcaatgcaggcagtgagcttgctgtgctctacaatgacactgctgttctggagagtcaccacaccgccctggccttccagctcacggtcaaggacaccaaatgcaacattttcaagaatattgacaggaaccattatcgaacgctgcgccaggctattattgacatggttttggcaacagagatgacaaaacactttgaacatgtgaataagtttgtgaacagcatcaacaagccaatggcagctgagattgaaggcagcgactgtgaatgcaaccctgctgggaagaacttccctgaaaaccaaatcctgatcaaacgcatgatgattaagtgtgctgacgtggccaacccatgccgccccttggacctgtgcattgaatgggctgggaggatctctgaggagtattttgcacagactgatgaagagaagagacagggactacctgtggtgatgccagtgtttgaccggaatacctgtagcatccccaagtctcagatctctttcattgactacttcataacagacatgtttgatgcttgggatgcctttgcacatctgccagccctgatgcaacatttggctgacaactacaaacactggaagacactagatgacctaaagtgcaaaagtttgaggcttccatctgacagctaaagccaagccacagagggggcctcttgaccgacaaaggacactgtgaatcacagtagcgtaaacgagaggccttcctttctaatgacaatgacaggtattggtgaaggagctaatgtttaatatttgaccttgaatcattcaagtccccaaatttcattcttagaaagttatgttccatgaagaaaaatatatgttcttttgaatacttaatgacagaacaaatacttggcaaactcctttgctctgctgtcatcctgtgtacccttgtcaatccatggagctggttcactgtaactagcaggccacaggaagcaaagccttggtgcctgtgagctcatctcccaggatggtgactaagtagcttagctagtgatcagctcatcctttaccataaaagtcatcattgctgtttagcttgactgttttcctcaagaacatcgatctgaaggattcataaggagcttatctgaacagatttatctaagaaaaaaaaaaaacgacataaaataagtgaaacaactaggaccaaattacagataaactagttagcttcacagcctctatggctacatggttcttctggccgatggtatgacacctaagttagaacacagccttggctggtgggtgccctctctagactggtatcagcagcctgtgtaacccctttcctgtaaaaggggttcatcttaacaaagtcatccatgatgagggaaaaagtggcatttcatttttggggaatccatgagcttcctttatttctggctcacagaggcagccacgaggcactacaccaagtattatataaaagccattaaatttgaatgcccttggacaagcttttcttaaaaaaaaaaaaaaaaagtttatatacatgtttaaaatttttattaaaatccaaattttctgggtgtaagcccatgcagtatgttgtgccatgcaccatctatacgtaatattttgggaggggataggggaagtttcaaggttcagatatttttaaccagtctatatttgaaatcatgccattagctttaacaatgttaaaattgtgtggtgtaaatatatcagaaaataggcatatggggaggcagtaaatactattttaagctattaattgtatgctaaaagcttctaaagcacaagtgcatatttttatactgctcttttcacaactccctgtgatctacataaagtcagactcgagattttcctttctcttttaccagctgatccttcctatgtattataaatattagactccgtaaacaaacttcatttttctttctctgtacttcatgctgcatttttaaaaggtataaacaaacagagactgaattaattgaatcagtaattacttttttccaatacaaattggaatgcagaatacttggaacttgtacatggggaaaaaatgacttatcactacataatgtgccaatgtttttttctatgttttgtaccaaaaatggaaaaatatgacaattccatgcaaagaaatgtatctaaattatttttgttagatgataagagaacttgcttggtcaggacagcagccagctttgtattgtaatgctatattatgtaaatgtgatgaaaatgtttttgtgaagtacttgtaactaaattcctacagccatttttcactcccaacagctgtttttattttacctctttggcctaaagttttcataatttcaaa

SEQ ID NO: 3474 - protein, 838 aa, Homo sapiens; identical to SEQ ID NO: 366

SEQ ID NO: 3475 - DNA, 4300 bp, Homo sapiens
atgggctgcgcccccagcatccatgtctcgcagagcggcgtgatctactgccgggactcggacgagtccagctcgccccgccagaccaccagcgtgtcgcagggcccggcggcacccctgcccggcctcttcgtccagaccgacgccgccgacgccatccccccgagccgcgcgtcgggaccccccagcgtagcccgcgtccgcagggcccgcaccgagctgggcagcggtagcagcgcgggttccgcagcccccgccgcgaccaccagcaggggccggaggcgccactgctgcagcagcgccgaggccgagactcagacctgctacaccagcgtgaaggttttgctgatctttgcaaaggaagatagtcagagcgatggcttctggtgggcctgcgacagagctggttatagatgcaatattgctcggactccagagtcagcccttgaatgctttcttgataagcatcatgaaattattgtaattgatcatagacaaactcagaacttcgatgcagaagcagtgtgcaggtcgatccgggccacaaatccctccgagcacacggtgatcctcgcagtggtttcgcgagtatcggatgaccatgaagaggcgtcagtccttcctcttctccacgcaggcttcaacaggagatttatggagaatagcagcataattgcttgctataatgaactgattcaaatagaacatggggaagttcgctcccagttcaaattacgggcctgtaattcagtgtttacagcattagatcactgtcatgaagccatagaaataacaagcgatgaccacgtgattcagtatgtcaacccagccttcgaaaggatgatgggctaccacaaaggtgagctcctgggaaaagaactcgctgatctgcccaaaagcgataagaaccgggcagaccttctcgacaccatcaatacatgcatcaagaagggaaaggagtggcagggggtttactatgccagacggaaatccggggacagcatccaacagcacgtgaagatcaccccagtgattggccaaggagggaaaattaggcattttgtctcgctcaagaaactgtgttgtaccactgacaataataagcagattcacaagattcatcgtgattcaggagacaattctcagacagagcctcattcattcagatataagaacaggaggaaagagtccattgacgtgaaatcgatatcatctcgaggcagtgatgcaccaagcctgcagaatcgtcgctatccgtccatggcgaggatccactccatgaccatcgaggctcccatcacaaaggttataaatataatcaatgcagcccaagaaaacagcccagtcacagtagcggaagccttggacagagttctagagattttacggaccacagaactgtactcccctcagctgggtaccaaagatgaagatcctcacaccagtgatcttgttggaggcctgatgactgacggcttgagaagactgtcaggaaacgagtatgtgtttactaagaatgtgcaccagagtcacagtcaccttgcaatgccaataaccatcaatgatgttcccccttgtatctctcaattacttgataatgaggagagttgggacttcaacatctttgaattggaagccattacgcataaaaggccattggtttatctgggcttaaaggtcttctctcggtttggagtatgtgaatttttaaactgttctgaaaccactcttcgggcctggttccaagtgatcgaagccaactaccactcttccaatgcctaccacaactccacccatgctgccgacgtcctgcacgccaccgctttctttcttggaaaggaaagagtaaagggaagcctcgatcagttggatgaggtggcagccctcattgctgccacagtccatgacgtggatcacccgggaaggaccaactctttcctctgcaatgcaggcagtgagcttgctgtgctctacaatgacactgctgttctggagagtcaccacaccgccctggccttccagctcacggtcaaggacaccaaatgcaacattttcaagaatattgacaggaaccattatcgaacgctgcgccaggctattattgacatggttttggcaacagagatgacaaaacactttgaacatgtgaataagtttgtgaacagcatcaacaagccaatggcagctgagattgaaggcagcgactgtgaatgcaaccctgctgggaagaacttccctgaaaaccaaatcctgatcaaacgcatgatgattaagtgtgctgacgtggccaacccatgccgccccttggacctgtgcattgaatgggctgggaggatctctgaggagtattttgcacagactgatgaagagaagagacagggactacctgtggtgatgccagtgtttgaccggaatacctgtagcatccccaagtctcagatctctttcattgactacttcataacagacatgtttgatgcttgggatgcctttgcacatctgccagccctgatgcaacatttggctgacaactacaaacactggaagacactagatgacctaaagtgcaaaagtttgaggcttccatctgacagctaaagccaagccacagagggggcctcttgaccgacaaaggacactgtgaatcacagtagcgtaaacgagaggccttcctttctaatgacaatgacaggtattggtgaaggagctaatgtttaatatttgaccttgaatcattcaagtccccaaatttcattcttagaaagttatgttccatgaagaaaaatatatgttcttttgaatacttaatgacagaacaaatacttggcaaactcctttgctctgctgtcatcctgtgtacccttgtcaatccatggagctggttcactgtaactagcaggccacaggaagcaaagccttggtgcctgtgagctcatctcccaggatggtgactaagtagcttagctagtgatcagctcatcctttaccataaaagtcatcattgctgtttagcttgactgttttcctcaagaacatcgatctgaaggattcataaggagcttatctgaacagatttatctaagaaaaaaaaaaaacgacataaaataagtgaaacaactaggaccaaattacagataaactagttagcttcacagcctctatggctacatggttcttctggccgatggtatgacacctaagttagaacacagccttggctggtgggtgccctctctagactggtatcagcagcctgtgtaacccctttcctgtaaaaggggttcatcttaacaaagtcatccatgatgagggaaaaagtggcatttcatttttggggaatccatgagcttcctttatttctggctcacagaggcagccacgaggcactacaccaagtattatataaaagccattaaatttgaatgcccttggacaagcttttcttaaaaaaaaaaaaaaaaagtttatatacatgtttaaaatttttattaaaatccaaattttctgggtgtaagcccatgcagtatgttgtgccatgcaccatctatacgtaatattttgggaggggataggggaagtttcaaggttcagatatttttaaccagtctatatttgaaatcatgccattagctttaacaatgttaaaattgtgtggtgtaaatatatcagaaaataggcatatggggaggcagtaaatactattttaagctattaattgtatgctaaaagcttctaaagcacaagtgcatatttttatactgctcttttcacaactccctgtgatctacataaagtcagactcgagattttcctttctcttttaccagctgatccttcctatgtattataaatattagactccgtaaacaaacttcatttttctttctctgtacttcatgctgcatttttaaaaggtataaacaaacagagactgaattaattgaatcagtaattacttttttccaatacaaattggaatgcagaatacttggaacttgtacatggggaaaaaatgacttatcactacataatgtgccaatgtttttttctatgttttgtaccaaaaatggaaaaatatgacaattccatgcaaagaaatgtatctaaattatttttgttagatgataagagaacttgcttggtcaggacagcagccagctttgtattgtaatgctatattatgtaaatgtgatgaaaatgtttttgtgaagtacttgtaactaaattcctacagccatttttcactcccaacagctgtttttattttacctctttggcctaaagttttcataatttcaaa

SEQ ID NO: 3476 - protein, 865 aa, Homo sapiens; identical to SEQ ID NO: 364

SEQ ID NO: 3477 - DNA, 696 bp, Homo sapiens
ctttgaagatcatggactagtgacgtgctccgctgatcatctcattattttgtggaaaaatggagagcgagaatctggattgcgcagtttaagattatttcaaaaattagaggagaatggtgacttataccttgctgtctagtttaaggaattaaaaatacacatgcatgaaccttgaacatcaaatatcgggtactactctgaaaaccattaatatattgatcacttaaattggtaattttttttgtcagtccataaaattctacatgtttaaattttttgtggacctaccaaccaggaacatgttgcttctcaggtcctagtatatcctccaaagaatataccacaagtttttccatttgactttgagctgctgttgaagtgataaatctgttcagataagctccttatgaatccttcagatcgatgttcttgaggaaaacagtcaagctaaacagcaatgatgacttttatgagttttcctccaacgacagaaaaacactgcagtaagctttggcagcgtgtcctttgaagaggcagagactcgtttatccagctatcaaaaatccatcaagtcttctgcacacaagcttctgtgccagctgctggggatgcaaagaatgcaccccaccccacttggccacaaaaagctgacagccacatttttaaaaatatattttgtttacctttaggctc

SEQ ID NO: 3478 - protein, 53 aa, Homo sapiens
RGRDSFIQLSKIHQVFCTQASVPAAGDAKNAPHPTWPQKADSHIFKNIFCLPL

SEQ ID NO: 3479 - DNA, 1455 bp, Homo sapiens
agatgtttctatactttgaagatcatggactagtgacgtgctccgctgatcatctcattattttgtggaaaaatggagagcgagaatctggattgcgcagtttaagattatttcaaaaattagaggagaatggtgacttataccttgctgtctagtttaaggaattaaaaatacacatgcatgaaccttgaacatcaaatatcgggtactactctgaaaaccattaatatattgatcacttaaattggtaattttttttgtcagtccataaaattctacatgtttaaattttttgtggacctaccaaccaggaacatgttgcttctcaggtcctagtatatcctccaaagaatataccacaagtttttccatttgactttgagctgctgttgaagtgataaatctgttcagataagctccttatgaatccttcagatcgatgttcttgaggaaaacagtcaagctaaacagcaatgatgacttttatggtaaaggatgagctgatcactagctaagctacttagtcaccatcctgggagatgagctcacaggcaccaaggctttgcttcctgtggcctgctagttacagtgaaccagctccatggattgacaagggtacacaggatgacagcagagcaaaggagtttgccaagtatttgttctgtcattaagtattcaaaagaacatatatttttcttcatggaacataactttctaagaatgaaatttggggacttgaatgattcaaggtcaaatattaaacattagctccttcaccaatacctgtcattgtcattagaaaggaaggcctctcgtttacgctactgtgattcacagtgtcctttgtcggtcaagaggccccctctgtggcttggctttagctgtcagatggaagcctcaaacttttgcactttaggtcatctagtgtcttccagtgtttgtagttgtcagccaaatgttgcatcagggctggcagatgtgcaaaggctgcaaagacagaaaagaatcaaaagaaaccggtgaacttagaccccaggagcatttataagcctgggggtgtctgggacaagtttgggatcagaattagaggaggcacaccctgggcgaagcatgaggacaagtcattaaacactagtttctgaaatgcaaacaggtcctttttgaaaagctgcttatcagtgacattatcagaagaacctgtgattcagagtaaactaaatacattttgcattctttctagagttttcctccaacgacagaaaaacactgcagtaagctttggcagcgtgtcctttgaagaggcagagactcgtttatccagctatcaaaaatccatcaagtcttctgcacacaagcttctgtgccagctgctggggatgcaaagaatgcaccccaccccacttggccacaaaaagctgacagccacatttttaaaaatatattttgtttaccttt

SEQ ID NO: 3480 - protein, 50 aa, Homo sapiens [sequence omitted]

SEQ ID NO: 3481 - DNA, 778 bp, Homo sapiens
agatgtttctatactttgaagatcatggactagtgacgtgctccgctgatcatctcattattttgtggaaaaatggagagcgagaatctggattgcgcagtttaagattatttcaaaaattagaggagaatggtgacttataccttgctgtctagtttaaggaattaaaaatacacatgcatgaaccttgaacatcaaatatcgggtactactctgaaaaccattaatatattgatcacttaaattggtaattttttttgtcagtccataaaattctacatgtttaaattttttgtggacctaccaaccaggaacatgttgcttctcaggtcctagtatatcctccaaagaatataccacaagtttttccatttgactttgagctgctgttgaagtgataaatctgttcagataagctccttatgaatccttcagatcgatgttcttgaggaaaacagtcaagctaaacagcaatgatgacttttatggtaaaggatgagctgatcactagctaagctacttagtcaccatcctgggagatgagctcacaggcaccaaggctttgcttcctgtggcctgctagttacagtgaaccagctccatggattgacaagggtacacaggatgacagcagagcaaaggagtttgccaagtatttgttctgtcattaagtattcaaaagaacatatatttttcttcatggaacataactttctaagaatgaaatttggggacttgaatgattcaaggtcaaatattaaacattagctccttcacc

SEQ ID NO: 3482 - protein, 50 aa, Homo sapiens [sequence omitted]

SEQ ID NO: 3483 - DNA, 3868 bp, Homo sapiens
actcggagcagcgcgcgccccgcaatcgccgcagccgcccccgccgtcggccgccgcaccccaagcgactgcccaaactaagcctccgtggctgggtacgggagcgctttggggacaaaaattctccctcaactgtggtctgcattccttcggcccgtgggctgatctggggcgggaagtattagcgtctcagttgcgctgcagccggggaggaaggaggaggccgagcctggggcggagtttgggctgactggggctggaccgggcaagacgccgccgctgcccggatgttgcgatggctgatcgggggaggccgagaaccgcagggactggccgagaaatctcctttacagacaataggtgaagaacaaacccagaatccctacactgaactgctagtactgaaggctcatcatgatattgtacgatttctggtacagttagatgactacagatttgcatctgctggtgatgatggaattgtagttgtgtggaatgcccagacaggggaaaaacttttagaactgaatggacacactcaaaagataacagctattattacatttccttccttggaatcttgtgaagagaaaaatcaactcatcttgacagcctctgctgatagaacagttattgtgtgggatggtgatactaccagacaagttcagagaatatcatgcttccagtctactgtaaagtgtttaactgttcttcagagactagatgtttggctttctggtgggaatgacctgtgtgtgtggaaccgaaaattagatctcctgtgtaagactagccacctttctgatacaggtattagtgctttggttgaaatacctaagaactgtgttgtggcagcagttggcaaagaactgataattttcaggttggtagcacccacagaaggatcactagaatgggatattcttgaagttaagcgcctccttgatcaccaggataatattctctcattgattaatgtcaatgatttgagttttgtcaccggctcccacgtcggagagctgatcatctgggatgccctggactggaccatgcaggcctatgaacgcaacttctgggacccatctccacaactggacacccaacaagaaataaaactctgtcaaaaatcaaatgacatttctattcatcatttcacatgtgatgaagagaatgtatttgctgcagttggaaggggtttatacgtgtatagccttcaaatgaagcgtgtgattgcctgccagaaaactgcacatgactccaatgtcctgcacgttgccagacttccaaacaggcagttaatctcatgctcagaagatggcagtgtacgcatttgggagttaagagaaaaacagcagcttgcagctgagcctgtaccaacaggtttttttaacatgtggggatttggaagagtcagcaaacaagccagccaacctgttaaaaagcagcaagaaaatgctacttcatgttcactggagcttattggagatttgattggacactcatcatctgtggagatgtttctatactttgaagatcatggactagtgacgtgctccgctgatcatctcattattttgtggaaaaatggagagcgagaatctggattgcgcagtttaagattatttcaaaaattagaggagaatggtgacttataccttgctgtctagtttaaggaattaaaaatacacatgcatgaaccttgaacatcaaatatcgggtactactctgaaaaccattaatatattgatcacttaaattggtaattttttttgtcagtccataaaattctacatgtttaaattttttgtggacctaccaaccaggaacatgttgcttctcaggtcctagtatatcctccaaagaatataccacaagtttttccatttgactttgagctgctgttgaagtggtgagtgctgtgttttgagcttattttgaacctagatccttgtgaaaggtacaaatagaggtaatagttaagttatggcatttattagaagttttattatttggcttcctttagaattattgtgaagtttaaaaatagcctttctcctgcaaattttcctagtctttagtaactgttagtgttctatatagcacaaacttgaatctctcagccaaaaaagggaacatatatactgtttaagtatggcaagttttctttggtaccaatttgtttagataattttaaaaatgttttttagttctagctactaaaacctgtatgaactcaaatggataggcatcttgtgagggtgtgtttttcccagtgtgaattggcttgaagagccatgggctaaatgggtactagaacaacaactgcccctcatgtacgccaaggatgagctctagatcatttgagaggcacagtgtttccggagtcagggactgcagctgagcgcaactgccccatctgaccactgactcaaatacgaactgcttgagacagacttcttttatgtagttctttgcagtgtccattgagacactataaccagccttgtaacaatatgttttctccttttggtgctaaaaaatgaaaatattagaaagtagtctacacattaaagattgaaattcttaaactactgatgaagaaagggcaacgtgacagatgttagcagactgacccttcttacagaaaacctacagatttatttgttcattatacaaatatactacaaatataccctaaagggaatctccataagttcttttactagttttagctttgacagttgcttccacaactacctacaaagactggaagagttaaggtcatctgagtagaccagtggcataatgttacaaatgaggaaactgaggcccagtgcagtaaggccttgcaattaaatctgtagtgcccagtatcaccaagcagctctaaaaacaggaactgaagactgaatgagaaaaggcttatatgactactttaaatccaaacaacattgagtcatgaaaagttctatggagaaatattaaaacttaagctacctcaattacagaagactttctcccattattcacgtgctttttcctttagaaattctgcattggcccatacatttgtaaagttgttttctgaagttgtatgacacaagggagccatagacttaactgttttacttcctagcctgttctaggctagtattttgtgatagtaatctattcaaatggagtggtagaaatcacatgaattttggaagcaaatggtaccgtaagtaccacagcaaattccttctggtcattatacaggcgtacctcagagatactacaggttaggtttcagaccacatcaaaaaagcaactattgcaaatagagtgagtcacatctagtttttggtttcccagtgcctataaaacttgtgtttatactacagtcttaaatttctaaaaaatgtacataccttaagaatactttattgctaaaaaatgctaacaatcatctgagccttcagcgagtcataatctttttgctggtggagggtcttgatactgctggctgttgactaaggtggttactgaaggttggggtggctgtggcagttccttaaaataagatagcgatgaagttttccaaatcaattgacttcctttcacaaatgagatctctgtaacatgtaatactatttaatagcattttacccacagtagaacttctttcaaaatttagagtctgtcatctcaaatcctgatgctcctttatgaactaagtttatagaatattctaaatcctttgttgtcatttcaactatgtttacagcatcttcactgtggaaatgactgtctccagaaaccactttctatacacattcttaagcaacttctcatctattaaagtttgatcatgagattacagcaattc

SEQ ID NO: 3484 - protein, 459 aa, Homo sapiens; identical to SEQ ID NO: 370

SEQ ID NO: 3485 - DNA, 3276 bp, Homo sapiens
gtaaaatgttgaaattggggctgaaaagaatcttctgtgtgttcctggaaatagccacctcttattgcagtctccctttgttttgcaagttatgtttaagtactatatattaaatcattacaatactgccatttatcagtgtctcaagagttaacagaaggctttgagggtatctatgggaaagccttgagaaggccatgggttactattggtgagctgttcatcatttgggttttccaaattactggaggccagattgttaatagtgttattagatccttatgtcatgatgtcctttcataagccctgcttgatttatggactggtggagcttttacaagcagttattctgtgtttggaaataagcaaagacaatcttagtcaatgtgatacaatggaaggagccctggactaaaacacagggcatccgtgtcctttccagtaatatgttttgtgattctgagtattaggttgctacatctggattgttgggcttctagtattttcacatataatttagtgaaagatttttaaacaagctgttttctgcatttagaattcttctcttgctatccaccctgctgttctcccatgtcctctgccttctctgtaccattcctttgccttccttgcagcaccatttcctccttcttgtacatgggaaaatacaaaacctactgttaaaatatgcctatgtggagaaaaatcttggccagaaatactatccaaatcacaacagtcagtcctttgatggatgggaaggataagcaaatgactagaccgttttctacacttgcatatatattataaattacatatatatcataatggaaaaattaaacaggtttttttttttgccaacacgtggtggttctaatttatcaactcttttattcatactgacagaagcaaaattgtaacatgccttgtagaagttatagttacgctaaaatcattaacctctttacttaaataagtgaagtgtgttagaatgttgaatctgattctttcattaatagaagaaaaattttacatgtattagtggatcacaaacatgctatttgaaggctgctttcttagctgctgactgttggctagttcattcaatgccagggagcctgctcaggcttctaaagtttacatgaaggaaaaccccaattttacatcacttttgagctagccatcttgtaaatgggtgatggtgattatcttaagggatccctggtaaataagtgtgaattgctgaatctaccactttatcacaatagtaaaaaaaagtacaaaaaaacccaaccccatattctgctcttaataaatcaataatgtcttccaaaagtctcagaaacctacatttaacaatcattttccattagtaagcaagcaaggaagtgtgtgtggagctagttctgtgtgctttatcttctttatggaaaacgactgacataaaactgagaatgtttttgtttttgatataatctgtgagaaaaataatttgaactttgttttatatgtttttggaggtattagtgctttggttgaaatacctaagaactgtgttgtggcagcagttggcaaagaactgataattttcaggttggtagcacccacagaaggatcactagaatgggatattcttgaagttaagcgcctccttgatcaccaggataatattctctcattgattaatgtcaatgatttgagttttgtcaccggctcccacgtcggagagctgatcatctgggatgccctggactggaccatgcaggcctatgaacgcaacttctgggacccatctccacaactggacacccaacaagaaataaaactctgtcaaaaatcaaatgacatttctattcatcatttcacatgtgatgaagagaatgtatttgctgcagttggaaggggtttatacgtgtatagccttcaaatgaagcgtgtgattgcctgccagaaaactgcacatgactccaatgtcctgcacgttgccagacttccaaacaggcagttaatctcatgctcagaagatggcagtgtacgcatttgggagttaagagaaaaacagcagcttgcagctgagcctgtaccaacaggtttttttaacatgtggggatttggaagagtcagcaaacaagccagccaacctgttaaaaagcagcaagaaaatgctacttcatgttcactggagcttattggagatttgattggacactcatcatctgtggagatgtttctatactttgaagatcatggactagtgacgtgctccgctgatcatctcattattttgtggaaaaatggagagcgagaatctggattgcgcagtttaagattatttcaaaaattagaggagaatggtgacttataccttgctgtctagtttaaggaattaaaaatacacatgcatgaaccttgaacatcaaatatcgggtactactctgaaaaccattaatatattgatcacttaaattggtaattttttttgtcagtccataaaattctacatgtttaaattttttgtggacctaccaaccaggaacatgttgcttctcaggtcctagtatatcctccaaagaatataccacaagtttttccatttgactttgagctgctgttgaagtggtgagtgctgtgttttgagcttattttgaacctagatccttgtgaaaggtacaaatagaggtaatagttaagttatggcatttattagaagttttattatttggcttcctttagaattattgtgaagtttaaaaatagcctttctcctgcaaattttcctagtctttagtaactgttagtgttctatatagcacaaacttgaatctctcagccaaaaaagggaacatatatactgtttaagtatggcaagttttctttggtaccaatttgtttagataattttaaaaatgttttttagttctagctactaaaacctgtatgaactcaaatggataggcatcttgtgagggtgtgtttttcccagtgtgaattggcttgaagagccatgggctaaatgggtactagaacaacaactgcccctcatgtacgccaaggatgagctctagatcatttgagaggcacagtgtttccggagtcagggactgcagctgagcgcaactgccccatctgaccactgactcaaatacgaactgcttgagacagacttcttttatgtagttctttgcagtgtccattgagacactataaccagccttgtaacaatatgttttctccttttggtgctaaaaaatgaaaatattagaaagtagtctacac

SEQ ID NO: 3486 - protein, 205 aa, Homo sapiens
MQAYERNFWDPSPQLDTQQEIKLCQKSNDISIHHFTCDEENVFAAVGRGLYVYSLQMKRVIACQKTAHDSNVLHVARLPNRQLISCSEDGSVRIWELREKQQLAAEPVPTGFFNMWGFGRVSKQASQPVKKQQENATSCSLELIGDLIGHSSSVEMFLYFEDHGLVTCSADHLIILWKNGERESGLRSLRLFQKLEENGDLYLAV

SEQ ID NO: 3487 - DNA, 2566 bp, Homo sapiens
actcggagcagcgcgcgccccgcaatcgccgcagccgcccccgccgtcggccgccgcaccccaagcgactgcccaaactaagcctccgtggctgggtacgggagcgctttggggacaaaaattctccctcaactgtggtctgcattccttcggcccgtgggctgatctggggcgggaagtattagcgtctcagttgcgctgcagccggggaggaaggaggaggccgagcctggggcggagtttgggctgactggggctggaccgggcaagacgccgccgctgcccggatgttgcgatggctgatcgggggaggccgagaaccgcagggactggccgagaaatctcctttacagacaataggtgaagaacaaacccagaatccctacactgaactgctagtactgaaggctcatcatgatattgtacgatttctggtacagttagatgactacagatttgcatctgctggtgatgatggaattgtagttgtgtggaatgcccagacaggggaaaaacttttagaactgaatggacacactcaaaagataacagctattattacatttccttccttggaatcttgtgaagagaaaaatcaactcatcttgacagcctctgctgatagaacagttattgtgtgggatggtgatactaccagacaagttcagagaatatcatgcttccagtctactgtaaagtgtttaactgttcttcagagactagatgtttggctttctggtgggaatgacctgtgtgtgtggaaccgaaaattagatctcctgtgtaagactagccacctttctgatacaggtattagtgctttggttgaaatacctaagaactgtgttgtggcagcagttggcaaagaactgataattttcaggttggtagcacccacagaaggatcactagaatgggatattcttgaagttaagcgcctccttgatcaccaggataatattctctcattgattaatgtcaatgatttgagttttgtcaccggctcccacgtcggagagctgatcatctgggatgccctggactggaccatgcaggcctatgaacgcaacttctgggacccatctccacaactggacacccaacaagaaataaaactctgtcaaaaatcaaatgacatttctattcatcatttcacatgtgatgaagagaatgtatttgctgcagttggaaggggtttatacgtgtatagccttcaaatgaagcgtgtgattgcctgccagaaaactgcacatgactccaatgtcctgcacgttgccagacttccaaacaggcagttaatctcatgctcagaagatggcagtgtacgcatttgggagttaagagaaaaacagcagcttgcagctgagcctgtaccaacaggtttttttaacatgtggggatttggaagagtcagcaaacaagccagccaacctgttaaaaagcagcaagaaaatgctacttcatgttcactggagcttattggagatttgattggacactcatcatctgtggagatgtttctatactttgaagatcatggactagtgacgtgctccgctgatcatctcattattttgtggaaaaatggagagcgagaatctggattgcgcagtttaagattatttcaaaaattagaggagaatggtgacttataccttgctgtctagtttaaggaattaaaaatacacatgcatgaaccttgaacatcaaatatcgggtactactctgaaaaccattaatatattgatcacttaaattggtaattttttttgtcagtccataaaattctacatgtttaaattttttgtggacctaccaaccaggaacatgttgcttctcaggtcctagtatatcctccaaagaatataccacaagtttttccatttgactttgagctgctgttgaagtggtgagtgctgtgttttgagcttattttgaacctagatccttgtgaaaggtacaaatagaggtaatagttaagttatggcatttattagaagttttattatttggcttcctttagaattattgtgaagtttaaaaatagcctttctcctgcaaattttcctagtctttagtaactgttagtgttctatatagcacaaacttgaatctctcagccaaaaaagggaacatatatactgtttaagtatggcaagttttctttggtaccaatttgtttagataattttaaaaatgttttttagttctagctactaaaacctgtatgaactcaaatggataggcatcttgtgagggtgtgtttttcccagtgtgaattggcttgaagagccatgggctaaatgggtactagaacaacaactgcccctcatgtacgccaaggatgagctctagatcatttgagaggcacagtgtttccggagtcagggactgcagctgagcgcaactgccccatctgaccactgactcaaatacgaactgcttgagacagacttcttttatgtagttctttgcagtgtccattgagacactataaccagccttgtaacaatatgttttctccttttggtgctaaaaaatgaaaatattagaaagtagtctacac

SEQ ID NO: 3488 - protein, 459 aa, Homo sapiens; identical to SEQ ID NO: 370

SEQ ID NO: 3489 - DNA, 1708 bp, Homo sapiens
actcggagcagcgcgcgccccgcaatcgccgcagccgcccccgccgtcggccgccgcaccccaagcgactgcccaaactaagcctccgtggctgggtacgggagcgctttggggacaaaaattctccctcaactgtggtctgcattccttcggcccgtgggctgatctggggcgggaagtattagcgtctcagttgcgctgcagccggggaggaaggaggaggccgagcctggggcggagtttgggctgactggggctggaccgggcaagacgccgccgctgcccggatgttgcgatggctgatcgggggaggccgagaaccgcagggactggccgagaaatctcctttacagacaataggtgaagaacaaacccagaatccctacactgaactgctagtactgaaggctcatcatgatattgtacgatttctggtacagttagatgactacagatttgcatctgctggtgatgatggaattgtagttgtgtggaatgcccagacaggggaaaaacttttagaactgaatggacacactcaaaagataacagctattattacatttccttccttggaatcttgtgaagagaaaaatcaactcatcttgacagcctctgctgatagaacagttattgtgtgggatggtgatactaccagacaagttcagagaatatcatgcttccagtctactgtaaagtgtttaactgttcttcagagactagatgtttggctttctggtgggaatgacctgtgtgtgtggaaccgaaaattagatctcctgtgtaagactagccacctttctgatacaggtattagtgctttggttgaaatacctaagaactgtgttgtggcagcagttggcaaagaactgataattttcaggttggtagcacccacagaaggatcactagaatgggatattcttgaagttaagcgcctccttgatcaccaggataatattctctcattgattaatgtcaatgatttgagttttgtcaccggctcccacgtcggagagctgatcatctgggatgccctggactggaccatgcaggcctatgaacgcaacttctgggacccatctccacaactggacacccaacaagaaataaaactctgtcaaaaatcaaatgacatttctattcatcatttcacatgtgatgaagagaatgtatttgctgcagttggaaggggtttatacgtgtatagccttcaaatgaagcgtgtgattgcctgccagaaaactgcacatgactccaatgtcctgcacgttgccagacttccaaacaggcagttaatctcatgctcagaagatggcagtgtacgcatttgggagttaagagaaaaacagcagcttgcagctgagcctgtaccaacaggtttttttaacatgtggggatttggaagagtcagcaaacaagccagccaacctgttaaaaagcagcaagaaaatgctacttcatgttcactggagcttattggagatttgattggacactcatcatctgtggagatgtttctatactttgaagatcatggactagtgacgtgctccgctgatcatctcattattttgtggaaaaatggagagcgagaatctggattgcgcagtttaagattatttcaaaaattagaggagaatggtgacttataccttgctgtctagtttaaggaattaaaaatacacatgcatgaaccttgaacatc

SEQ ID NO: 3490 - protein, 459 aa, Homo sapiens; identical to SEQ ID NO: 370

SEQ ID NO: 3491 - DNA, 1230 bp, Homo sapiens
acttgcaggagctctgctcctttctcctcacccattaccaatgaaagatatggccagttgcttgggattgtacatcacagggcaaatctgttttcagaggggtggccccagggcaaccttagaattgtatgagagaataccaacaagtgtggataatgaataccagatttgctaaaaagattggaatgcccaggcagaaggttttctaagacagacaaaaaataactgataatctctccaggcagaaggctctgggtgctcctttattttattccttttcttgtattatgttgccagcatcttttggtaatcatgaagtactagtacttgtgagggatggatagacagataccaggtgagattttcatactaagtggcttttgacacaggatgaaaatccatccactaataatatataattgaggttgtttgtcatgaaacattttgaatgacctgtttgggaattagtttgccatgtgtaaactgcttaaaaatatgtgctgattggcaggtgtgagccaccgcacccggctttttttaaaggttttaaaaacttgtaaaagttatacatagtcatagtagaaaaatatgaaaatagtgaaaaacattaaaaatataaaagttaatattaaaatctttccactatccagtattaaacaccagtccacatctttctaggtgattttctgggcctatgtatgtgtgtacatgtgtattaatatggtttactgttttgtaacaatatgtcataaatatatttccatatctaagtttatattgttaagcatacttttataacttaatttttaataacagcattactatttcattttgttgatgtcttattcaattctcaattcgatgtgtagttatcttcagatttttaagattgtgtatttgtacatatatgtatgtaacaaccttgtacatttatgtatttccttcaggataaattcctagaagtggaattgttggatcgagatttacatttttcaaggttttgatacatattagcaaattaatctttgaaaaaaatactaatgtatagtagggcattaggcaatacaggaatgtgctgatttcttatgcttttgccagtactgtgttgggtattttcctgttttatatttcctgattcacaagtcaataaatggtatctccttgtttttagatttctttgattattaaaggagttgaacatcttttcacgtttactgaccatttgtattt

SEQ ID NO: 3492 - protein, 44 aa, Homo sapiens
MKDMASCLGLYITGQICFQRGGPRATLELYERIPTSVDNEYQIC

SEQ ID NO: 3493 - DNA, 901 bp, Homo sapiens
actcggagcagcgcgcgccccgcaatcgccgcagccgcccccgccgtcggccgccgcaccccaagcgactgcccaaactaagcctccgtggctgggtacgggagcgctttggggacaaaaattctccctcaactgtggtctgcattccttcggcccgtgggctgatctggggcgggaagtattagcgtctcagttgcgctgcagccggggaggaaggaggaggccgagcctggggcggagtttgggctgactggggctggaccgggcaagacgccgccgctgcccggatgttgcgatggctgatcgggggaggccgagaaccgcagggactggccgagaaatctcctttacagacaataggtgaagaacaaacccagaatccctacactgaactgctagtactgaaggctcatcatgatattgtacgatttctggtacagttagatgactacagatttgcatctgctggtgatgatggaattgtagttgtgtggaatgcccagacaggggaaaaacttttagaactgaatggacacactcaaaagataacagctattattacatttccttccttggaatcttgtgaagagaaaaatcaactcatcttgacagcctctgctgatagaacagttattgtgtgggatggtgatactaccagacaagttcagagaatatcatgcttccagtctactgtaaaggtaaaatcttaagtaaatatgagtttttatgacaatctatttttgtctcagaagacatggtttaaagagttagacgaaattacttttgtgggtcttatgaattatttctttccacacacttgtagtcatttgcttcgtgtaagatcagatttttgagagcacatgtattaagtgttagaatgtttcaatttgaaattagagca

SEQ ID NO: 3494 - protein, 140 aa, Homo sapiens [sequence omitted]

SEQ ID NO: 3495 - DNA, 349 bp, Homo sapiens
agaccaggaagtatctctgctcctaacctctctttatgtatgcatgaagctaattgttcaagtccaggggaaactggtgagttctggaggctgggaagtccgagatcaatacatcagcagattcagtttctggagagggcctgtctcctagaaagagacggagtttcaccatgttgcctgagaatcatgtgatcctcccagcaatttgaatggacacaaaactatgtttgaaatatacagcaagatggccacctgcaaaccaggaagagagcccctaccaggctggtaccttaatcttagacttctcagcctgcagatttgtgagaaataaatgcttgttgttaaagcc

SEQ ID NO: 3496 - protein, 50 aa, Homo sapiens
MHEANCSSPGETGEFWRLGSPRSIHQQIQFLERACLLERDGVSPCCLRIM

SEQ ID NO: 3497 - DNA, 837 bp, Homo sapiens
tcctctttttccggctggaaccatggagggtgtagaagagaagaagaaggaggttcctgctgtgccagaaacccttaagaaaaagcgaaggaatttcgtagagctgaagatcaagcgcctgagaaagaagtttgcccaaaagatgcttcgaaaggcaaggaggaagcttatctatgaaaaagcaaagcactatcacaaggaatataggcaaatgtacagaactgaaattcgagtggcgaggatggcaagaaaagctggcaacttctatgtacctgcagaacccaaattggcgtttgtcatcagaatcagaggtatcagtgctgtgagcccaaaggtccgaaaggtgttgcagcttcttcgccttcgtcaaatcttcaatggaacctttgtgaagctcaacaaggcttcgattaacatgctgaggattgtagagccatatatagcatgggggtaccccaatctgaagtcagtaaatgaactaatctacaagcgtggttatggcaaaatcaataagaagcgaattgctttgacagataacgctttgattgctcgatctcttggtaaatacggcattatctgcatggaggatttgattcatgagatctatactgttggaaaacgcttcaaagaggcaaataacttcctgtggcccttcaaattgtcttctccacgaggtggaatgaagaaaaagaccacccattttgtagaaggtagagatgctggcaacagggaggaccagatcaacaggcttactagaagaatgaactaaggtgtctaccatgattatttttctaagctggttggttaataaacagtacctgctctcaaattgaaata

SEQ ID NO: 3498 - protein, 248 aa, Homo sapiens
MEGVEEKKKEVPAVPETLKKKRRNFVELKIKRLRKKFAQKMLRKARRKLIYEKAKHYHKEYRQMYRTEIRVARMARKAGNFYVPAEPKLAFVIRIRGISAVSPKVRKVLQLLRLRQIFNGTFVKLNKASINMLRIVEPYIAWGYPNLKSVNELIYKRGYGKINKKRIALTDNALIARSLGKYGIICMEDLIHEIYTVGKRFKEANNFLWPFKLSSPRGGMKKKTTHFVEGRDAGNREDQINRLTRRMN

SEQ ID NO: 3499 - DNA, 2682 bp, Homo sapiens
ccccctttttaaccacaaaccgaattttctttcatttaggtgatctatatatatctatatcgtatagcttatagcttatatctattttaaataacttaaagccgctaaaatttgggggggaacagctttcgccctggagcggtgcgcgatgctgtctcatgccgacctcctggacgccaggctaggtatgaaagatgccgccgagcttctgggccaccgggaggcggtgaagtgtaggctgggcgtggggggctccgaccccgggggccatccgggggacctggcgcccaactctgacccagtggagggagccactctgctgcccggggaggacatcaccacagtgggctctactccggcctcgctggcggtgagcgccaaagacccggacaagcagcccgggccccagggcggcccgaaccccagccaagccggccagcagcagggccaacagaagcagaagcgccaccggacgcgcttcacccccgcacagctcaacgagttggagaggagcttcgccaagactcactaccccgacatctttatgcgtgaggagctggcactgcgtatcgggctgaccgagtcccgagtgcaggtctggttccagaaccgacgcgccaagtggaagaagcgcaaaaagacgaccaacgtgttccgtgcgcccggcacactgctgcccacgccaggcctgcctcagttcccgtcggctgccgccgccgctgccgccgccatgggcgacagcctgtgctctttccacgccaacgacacccgctgggcggcggccgccatgcctggcgtgtcacagctgcctctgccgccggcgctgggcaggcagcaggccatggcgcagtcgctgtcccagtgcagcctggcggccggtccgccgcccaactccatgggcctgtccaacagcctggcgggttccaacggcgcggggctgcagtcgcacctctaccagcccgccttccccggcatggtgcccgcctccctccccggccccagcaacgtctccggttcgccccagctctgcagctccccggacagcagcgacgtgtggcggggcaccagcatcgcctccctccgccgcaaggcgctagagcacacagtctctatgagcttcacttaatgcagccgcgccccggcccgctccgcccccagcaccgccccgggggccgccccgaggcccttccggcgcgcacccggaccccggcgccctgccccgtcccgccccggccttcgccccgtctcgtttcgtcctcgcctctctcctccactcgctcgggctcaccccaagccccagcccgcgaggcctcccctccgcctgatttcgatcgcccgcggtcccccgtctcccggccgcccctcttcccttcccacccagctgcgccctcggctcggtctccagcgcctcagcccacccttcccgccaccctggcctccctgcttgcgctggccgtgctcgcgccctcctcctggccttctgacgggcggcgttcccacccacaccttcgacgcgacgcctacgacccccctcgcccgccgcctcccctccggtcccctctttccccacacttcgcgaccctcctcccgcgcccggcaaaaagtatccttcccgccattttacgtaccagggagtcgactcaggatctgaaatcagacaccaatggactggtttgtgggcagaaacacacacactcgcactctcgctcacgctcagacgctacacacgcgcgcgcacagacacggtgcacctaggtcacacacggacgtgttcaagggacagcacaatgttagggatttttgtcttaaaggaggacaagcattgctaccaaccgcctcatctgagggcccaactgatatgatttgatttatccttgtactctccaagctcctgtctttctttcctctcccaccacgctacccttgcccagtccacccagtcacatccgtgcagccctctcttggcttgcaagataacgcttttatttttattttatcttattttcattttcttaagcacaactgtgtgagagtgtagaagggaaggcttctcaggaggaacgtgacagtggattgggtggctggagtagactaaagcagtcatgtgacgaggaagaggtgatctgacccattttgataagtctttataaggaagaataaaataaacgtgtaagcaaaattttcttttgtaaaagcaaaagccacatctcttttctggatccttcaggactggggtttgtttgcttccttttctgtttctgtcttctcgctgctctgtgcccttggttgttttgtggtggtcctgtcgtccctcgtgcccctcggccacctgctggcagccgatgggggcactcggacatctacaaccctgcaactttgtacagagaaacacaatcagctctttctgcatgtgctggtcaaatccaaacccagagaacagaagcgctttctaagaatgaacaaatatgtgaaataggatgttttgtgtagataaagcattcttgttacatactggtcaatttgtgatatgttttaacttaatgtctgtgtttatttatggaattcggttttcttaataaatgtttgagctaatataaagcatattatttgacttttccggacaagtttatatcaagttaaatgtaaatggataaaataaaatcattttcagtatgtgatata

SEQ ID NO: 3500 - protein, 325 aa, Homo sapiens; identical to SEQ ID NO: 378

SEQ ID NO: 3501 - DNA, 525 bp, Homo sapiens
aaagtgatgtatgaaaaagaggcaaaacaacaagaagaaaagattgaaaaaatgagagctgaagacggtgaaaattatgacattaaaaagcaggctggtcttcaactcctggcctccagtgatcctcccaccccagcctctcagagtcctgggatgataagcgcagagatcctacaagaatccaggatgatgatcccagattgccagcgcaggttggaagccgcatatttggatcttcaacggatactagaaaatgaaaaagacttggaagaagctgaggaatataaagaagcacgtttagtactggattcagtgaagttagaagcctgaaacttttctcgtatggggtggtttttgcattaaatcctggggtccattttacaatccattatttttgaccactgctatgtgttcaagtagtatgagaatgtgattgtttttatctggttacatatatatttctttgtctaatttaatatgtcaaataaatgagttcatctaataaaattgtttattttatacttt

SEQ ID NO: 3502 - protein, 107 aa, Homo sapiens
MYEKEAKQQEEKIEKMRAEDGENYDIKKQAGLQLLASSDPPTPASQSPGMISAEILQESRMMIPDCQRRLEAAYLDLQRILENEKDLEEAEEYKEARLVLDSVKLEA

SEQ ID NO: 3503 - DNA, 2393 bp, Homo sapiens
gcatgcgcgccggcgaccacgcctaaatagccgcagcctctgcgcgtcgccctccacggttaccccggctctccgcccctccttctcgcggcgctcgagggaccatggccgatcctcgcgtgagacagatcaagatcaagaccggcgtggtgaagcggttggtcaaagaaaaagtgatgtatgaaaaagaggcaaaacaacaagaagaaaagattgaaaaaatgagagctgaagacggtgaaaattatgacattaaaaagcaggcagagatcctacaagaatccaggatgatgatcccagattgccagcgcaggttggaagccgcatatttggatcttcaacggatactagtaagcaaagacttctgtgtcatgtttaaattttttttttcaatccaatacatggaaagccaaaagtttaaatatttaacactgagaactagttggcagtatttcttattcacttgccctttataccgctatattttaaaataattaatggagtttaaattgtgttttgaattatgcctccagtaaaagtactgttttctagcatgtttgttcagtttattaaaatttagctagttaaatttatttaagttatgatagtaccagtattgtccagcaatgtcttgattatttggttttcatacataaagatcttttgagacattgaggatgagttgactgattaaaattttaaaagatctaatgtttcaaaagaatttgggatcttattaaaaggatcttgaattctttcacattcaaacctagatcagtttgagagggggaaaaaacctggtaatctatgtagtcccctcatactaacttggagctgaataacacttatacttgctggtataaatgccttgtgatacagaaggtagataaagcaggaaataataactgttaaaatactatctaagacaggaagcatcatttgtatttcttgacagtttaaatgcttttttctctcatgaatctagtagctgagaaagtaatagaaattgcttggaaaaaaataatgttggccgccaggtgcagtggctcatgcctgtaatcccagcactttgggaggctgaggtgggtggatcacgagtcaggagttcaagaccagcctgaccaacatggtgaaatcctgtctctactaaaaataccaaaataataataataataataatgtatttggatgatatatttgtatgtgaagatgtattcaacaatatctctgcccttgaagagcttgtatttactaacagagaacaaagatgtgtttaaggtataacatggaggtttaagaaattcttacgtatagtttgagctaagcaaattctcagtcgttttgctttcagttttcatattaaatacacacatactttatttcctctactgtttgtatatctccatcttttattgacctgacataaattgctaaccatagcttcatttaaaaatcaaacaaaatttcctgtgtactttagataatattatttcatttgtctgttatcattacaatatattagtaaaagttgcctgtatatcagtattatggaaaaactcaatctttaaatatcagaaaatgaaagatgtattttgtttcctttagtgtagggtatgtaatacccattagcaagcaggcaattcatttgtttaattcaaagattatatttaactctgttgtgacatcagaagccttctttgtcattgtgaatagtcagtggattattttggcctgaatgctgtcatatatgtaacatgttagtaaatcttcctttttacttttctcttttgtatgatgatgatgggtcaacaaaatgagaataaactttttctgaggtttttatttaattaatgctggtagctttagaagactgttattcacttattttatgagaatatatacagtgaaacaaaaccaccagttatttcttcctttccttgtaaagaaggaacagaatgtgggaaacctgtggaattacaatatatttagatgaggcttgggattttttacttttaattttttagttattaacattaatggtttgtaatatttgagtaaataacaaagtactgaaacttgaaaaggataaacttaatttttattgtatttcattttaggaaaatgaaaaagacttggaagaagctgaggaatataaagaagcacgtttagtactggattcagtgaagttagaagcctgaaacttttctcgtatggggtggtttttgcattaaatcctggggtccattttacaatccattatttttgaccactgctatgtgttcaagtagtatgagaatgtgattgtttttatctggttacatatatatttctttgtctaatttaatatgtcaaataaatgagttcatctaataaaattgtttattttatacttt

SEQ ID NO: 3504 - protein, 129 aa, Homo sapiens
MADPRVRQIKIKTGVVKRLVKEKVMYEKEAKQQEEKIEKMRAEDGENYDIKKQAEILQESRMMIPDCQRRLEAAYLDLQRILVSKDFCVMFKFFFSIQYMESQKFKYLTLRTSWQYFLFTCPLYRYILK

SEQ ID NO: 3505 - DNA, 412 bp, Homo sapiens
gggagagaaaacacggagaggagtcccagggctgagcccagacctctgaacagaagaaggagtcatggagaaacccagaagaatgaggtgtcacaggcaaagaaaaattggatgctccggaaggagagaggtctgtctcacgaagagagataaaagcagctgggaccacatagagattttgtgaagctgtcccattcaaagccacccccagaggcccggaggagaccacaaagctgcgaacacagccgggacctgcccactgacacactgaagagtcaacacgattcaggaaagcactttcaaagagtgttttatcttggacagataatattccgttttgtttctgagaggcaatgacaatctctagttcgattgtaaaactatttccttcaaatatacatttttatctatg

SEQ ID NO: 3506 - protein, 39 aa, Homo sapiens
MEKPRRMRCHRQRKIGCSGRREVCLTKRDKSSWDHIEIL

SEQ ID NO: 3507 - DNA, 704 bp, Homo sapiens
cgaggggaaaaggatatattaatggaatcctaagctgcaaacactgaagtgaaaattaaggaagtttatttcacattttatccttatgaaaacaaaagacggaaaatgaaaagttttctgttttttcatgcacagcaccagaggagcacatttacatttttaaaaaagtgattgtttccaaatgctgttatgtgagtgattaaaaaatctcctctgctctttttcttattttcaatatttaagagagtttgaagggcttagcatggtttcagtgttccttttctggaagaatgaacaaaggccattgttgacagtcgtcagcttctcctgcgagggcagccttccattcagctggactggctgggctgggagctgtccagtgatgaatgaatcttccttggactgacctccagctatcctggaacctggagacaagaggtgacctgagagctttgccctcatcaacggccctcaggaacctcatgtgtagggccactaccctgctctggccacctggctctgtccaccccagaccctgggctgaggtcacattggagctgcagaggtggcttatccttcttgcccttgatgttaccaatcaccatatgtcttcaacagagcatgccaagacagggtcttgctctattgcccaggctggagtgcagtggcacaatctcagctcattgcagcctcgacctcccagg

SEQ ID NO: 3508 - protein, 105 aa, Homo sapiens
MNLPWTDLQLSWNLETRGDLRALPSSTALRNLMCRATTLLWPPGSVHPRPWAEVTLELQRWLILLALDVTNHHMSSTEHAKTGSCSIAQAGVQWHNLSSLQPRPP

SEQ ID NO: 3509 - DNA, 3446 bp, Homo sapiens
gctgaggcttagccgccaccgcgcgcttcggaaggccagagggagggggaggcctgtcagtctcgcgcgttgcctgggcgaagggggcggagctttggcgtggggcggccaatagtgggggtggctgcgtgggtcgccatggggacggggctgttcccggggaggctgtgatgggttgacaggtgcgtgacagtgggagctgctctcggcacaagcatgtacggcaaaggcaagagtaacagcagcgccgtcccgtccgacagccaggcccgggagaagttagcactctacgtatatgaatatctgctccatgtaggagctcagaaatcagctcaaacatttttatcagagataagatgggaaaaaaacatcacattgggggaaccaccaggattcttacattcttggtggtgtgtattttgggatctctactgtgcagctccagagagacgtgaaacatgtgaacactcaagtgaagcaaaagccttccatgattacagtgctgcagcagctcccagtccagtgctaggaaacattcccccaggagatggcatgccagtaggtcctgtaccaccagggttctttcagccttttatgtcacctcggtaccctggaggtccaaggcccccattgaggatacctaatcaggcacttggaggtgtcccaggaagtcagccattactccccagtggaatggatccaactcgacaacaaggacatccaaatatgggtgggccaatgcagagaatgactcctccaagaggaatggtgcccttaggaccacagaactatggaggtgcaatgagacccccactgaatgctttaggtggccctggaatgcctggaatgaacatgggtccaggtggtggtagaccttggccaaacccaacaaatgccaattcaataccatactcctcagcatctcctgggaattatgtaggtcctccaggaggtggagggccaccaggaacacccatcatgcctagtccagcagattcaaccaactctggtgataacatgtatactttaatgaatgcagtacctcctggacctaacagacctaattttccaatgggtcctgggtcagatggtcccatgggtggattaggaggaatggagtcacatcacatgaatggctctttaggctcaggagatatggacagtatttccaagaattctcccaataatatgagcctgagtaatcaaccgggcactccaagggatgatggcgaaatggggggaaatttcttaaatccttttcagagtgagagttactcccctagcatgacaatgagcgtgtgatccattaccaagtctcctcatgaaaaccacagtgagtcagcccttcacagaactactacggaagaaaattattcatcacagtgtacagttaaacaaaggaatctcagtcacaccaaaccaacctttttatttcctgctctctcccctcttttgtgaagaaagcgggtccaaatgtgattcaaacaactgtacggagtggcatattagaattgccctaaactgaactgcaaataattatgtgtgtatgtatatgtgtgggaaagagaatgtactgtatatgtgtatgttatacagacatatacacatacatacattgacccacaggacattgtaaaatattatcacatgacatcttaagtagaaataagtagggacttttattccatcctttttttcacgtttacattttaattattacaagttgctcctgccccctccctgaactattttgtgctgtgtatatcactgctttatataagttattttttaaggtgaactcagatgttatggttttgtaaatgtctgcaatcatggataggaataaaatcgcttatttgagagctttcattaaattgcgtctgatgcaagttatcctgtgaatcacaaagtgtactgtctcaaaaaatagaagaaaatgtgtcttcgtctttatgttgaatcaaacaatttctcagttaccttcagtgaaaagtatttttttaatttttatttgagaaaaacacttcaaatcagtaaaagcttaactggggcctcacacagtatatttctgcaataactgctttaaacggagttcttgatttgtttgtcttagatgatacagaaatcattaaatagcccaaatcatttagaccatagcaataaagtgaccggggttgtcatatatttagcaacatcttttctctttaacatgatgaagcccaaaagtgataacaaaagcatttgcttgaatttgtcacttctcaccaggagtactagaggtaaatttttaataacatactaatgtgaaatggtatctggtttttattcagactttttgtgagcatattcttatagacactagaaataaatacatagaaggagactttgagcacaagggagaagagagttattagcactcctgaggcctctggaatgctgcttttctatccaggtatcttgcttgctaccagcagaattgactggtattggttctcactggccagggagcctctgctctgttcctggaatataaggcttttattcaggagcaaatcattgatagtaactttgctttatctagccattgacttcagcaggctaaaactacattgtgtaactgactgttcaaaaaagaataagtaaattttttttaatctaattcccttatggaaagcaccttgctctatggcactttccagatcttttgggattttgtgcttaattatacatacatacaccaaaatcacaatagaaagatatgaagactttaattttagactctgaaagataactgggtgatcctttgtgttaaaattgtgatacaaacaaccattgataaataccaactatgaatccaaactctagagactttgaaaagcattgtttaattgcaggtaagaggaatcttctctttcctttaggcttatagtctctaaagtgaaaatttggcaggatatagtcatgcagctcataatgacattccaatcaaccacagactgcatatacagcagtggtcctataagattataataccatatttttagcatatcttttctatgcttagatacacaaataccattgtattacagttgcctttggtattcagtacagtaacatgctgtacaggtttgtagcctaggagcaatagtttatattatatagcctaggtgtgtaggagcctataccatctaggtttgtgtaagtacactctatgatgttcagacaaggacaatattgcctgacaatgcatttctcagaatgtatacttatcattaagtaacatatgactgtatgtactagttcctgatgacttacttctctcaaattcataatgatttagtccttgtaaaaataaagattttgcctgtgcctaaacagggatactaggcagaactgttgagaaaaaaaagctgaattaaatttatgttgcagatttaaactatcat

SEQ ID NO: 3510 - protein, 361 aa, Homo sapiens; identical to SEQ ID NO: 382

SEQ ID NO: 3511 - DNA, 1892 bp, Homo sapiens
gctgaggcttagccgccaccgcgcgcttcggaaggccagagggagggggaggcctgtcagtctcgcgcgttgcctgggcgaagggggcggagctttggcgtggggcggccaatagtgggggtggctgcgtgggtcgccatggggacggggctgttcccggggaggctgtgatgggttgacaggtgcgtgacagtgggagctgctctcggcacaagcatgtacggcaaaggcaagagtaacagcagcgccgtcccgtccgacagccaggcccgggagaagttagcactctacgtatatgaatatctgctccatgtaggagctcagaaatcagctcaaacatttttatcagagataagatgggaaaaaaacatcacattgggggaaccaccaggattcttacattcttggtggtgtgtattttgggatctctactgtgcagctccagagagacgtgaaacatgtgaacactcaagtgaagcaaaagccttccatgattacagtgctgcagcagctcccagtccagtgctaggaaacattcccccaggagatggcatgccagtaggtcctgtaccaccagggttctttcagccttttatgtcacctcggtaccctggaggtccaaggcccccattgaggatacctaatcaggcacttggaggtgtcccaggaagtcagccattactccccagtggaatggatccaactcgacaacaaggacatccaaatatgggtgggccaatgcagagaatgactcctccaagaggaatggtgcccttaggaccacagaactatggaggtgcaatgagacccccactgaatgctttaggtggccctggaatgcctggaatgaacatgggtccaggtggtggtagaccttggccaaacccaacaaatgccaattcaataccatactcctcagcatctcctgggaattatgtaggtcctccaggaggtggagggccaccaggaacacccatcatgcctagtccagcagattcaaccaactctggtgataacatgtatactttaatgaatgcagtacctcctggacctaacagacctaattttccaatgggtcctgggtcagatggtcccatgggtggattaggaggaatggagtcacatcacatgaatggctctttaggctcaggagatatggacagtatttccaagaattctcccaataatatgagcctgagtaatcaaccgggcactccaagggatgatggcgaaatggggggaaatttcttaaatccttttcagagtgagagttactcccctagcatgacaatgagcgtgtgatccattaccaagtctcctcatgaaaaccacagtgagtcagcccttcacagaactactacggaagaaaattattcatcacagtgtacagttaaacaaaggaatctcagtcacaccaaaccaacctttttatttcctgctctctcccctcttttgtgaagaaagcgggtccaaatgtgattcaaacaactgtacggagtggcatattagaattgccctaaactgaactgcaaataattatgtgtgtatgtatatgtgtgggaaagagaatgtactgtatatgtgtatgttatacagacatatacacatacatacattgacccacaggacattgtaaaatattatcacatgacatcttaagtagaaataagtagggacttttattccatcctttttttcacgtttacattttaattattacaagttgctcctgccccctccctgaactattttgtgctgtgtatatcactgctttatataagttattttttaaggtgaactcagatgttatggttttgtaaatgtctgcaatcatggataggaataaaatcgcttatttgagagctttcattaaattgcgtctgatgcaagtt

SEQ ID NO: 3512 - protein, 361 aa, Homo sapiens; identical to SEQ ID NO: 382

SEQ ID NO: 3513 - DNA, 327 bp, Homo sapiens
ggcaaaggcaagagtaacagcagcgccgtcccgtccgacagccaggcccgggagaagttagcactctacgtatatgaatatctgctccatgtaggagctcagaaatcagctcaaacatttttatcagagataagatgggaaaaaaacatcacattgggggaaccaccaggattcttacattcttggtggtgtgtattttgggatctctactgtgcagctccagagagacgtgaaacatgtgaacactcaagtgaagcaggcacttggaggtgtcccaggaagtcagccattactccccagtggaatggatccaactcgacaacaagg

SEQ ID NO: 3514 - protein, 32 aa, Homo sapiens
MGKKHHIGGTTRILTFLVVCILGSLLCSSRET

SEQ ID NO: 3515 - DNA, 1154 bp, Homo sapiens
gctgaggcttagccgccaccgcgcgcttcggaaggccagagggagggggaggcctgtcagtctcgcgcgttgcctgggcgaagggggcggagctttggcgtggggcggccaatagtgggggtggctgcgtgggtcgccatggggacggggctgttcccggggaggctgtgatgggttgacaggtgcgtgacagtgggagctgctctcggcacaagcatgtacggcaaaggcaagagtaacagcagcgccgtcccgtccgacagccaggcccgggagaagttagcactctacgtatatgaatatctgctccatgtaggagctcagaaatcagctcaaacatttttatcagagataagatgggaaaaaaacatcacattgggggaaccaccaggattcttacattcttggtggtgtgtattttgggatctctactgtgcagctccagagagacgtgaaacatgtgaacactcaagtgaagcaaaagccttccatgattacgtaagttaacatataattttacaaagttacactgtcagttttctgtttaaccactgctcttaaaaaatacactggctcatctattcttttgttttggtacttaagaaattgtttggtctcttttttcttgaaaagtaggttcataactttaaatgtgaaatagaaaggggcatttgagtcttgttaaagcttaggataaagcgtaggcctaattctaagctattaaagaaatttcttatctttaagcatgtctgatttgtgaaatttcagattttatgaaaattaaatatatagtaatttttttattctacaaaaacattcattataagatttctgtaaatgataaatttctcccttgcacataagatttttgattaaatatagaaatactctattcttctccttttataacttttggttatatatcataaggctaaatatcttccctgctgaattcacttccccaaataaaatttattgtggattaaaggaaataccagacaagagtagaagattctgtgcaaaaatgaaaatgtaattttttttttaattcttaaggaacggcagtggagtgtccttggcttgagcatttttttttagaaggactgcaaatctgattttagagagctgatagtatcagaaagtagaactgtgaa

SEQ ID NO: 3516 - protein, 96 aa, Homo sapiens [sequence omitted]

SEQ ID NO: 3517 - DNA, 256 bp, Homo sapiens
cagcgccgtcccgtccgacagccaggcccgggagaagttagcactctacgtatatgaatatctgctccatgtaggagctcagaaatcagctcaaacatttttatcagagataagatgggaaaaaaacatcacattgggggaaccaccaggattcttacattcttggtggtggtaagtatcctttattccatttttactggcttgatgatgcatttcaataggcctgtactatacctgtttatgatttcatgcttcc

SEQ ID NO: 3518 - protein, 46 aa, Homo sapiens
MGKKHHIGGTTRILTFLVVVSILYSIFTGLMMHFNRPVLYLFMISC

SEQ ID NO: 3519 - DNA, 4111 bp, Homo sapiens
cggcgcacgccgaggagagggagcccccgccaccgccgctgcctccgcgtgctcagcctgtccccgcccagggagccggagcctccaactaactccgcccgccgctccgccgcccgcaggctccggcttccgtcccggacagagcccgtggtcgcgcaggttctgaatgatgactgacgcgggtttgggtgatacccctcacagcccctgtcattccggagtcataaggcacccgcgcgtctagccccagcgccagggcacgcgagcggcgctggagggaggaaagcttccgcctgcgggccggacaaaagtcccgcctgcccacggctttttgcccgccgctcgtgaccgagacgcctcgccgcggccagctcgctgctctcgctggcggatggtgtgtggccgccgcaggacgcccgccgtgcccgggccatgaagtagcggctgctggcggcgccgctgcccaaccgccagccccagccccgcgctgcgctgcccggtcctctcccggcggggtcgtatcggcgtggacatggctggccgcgtccctagcctgctagttctccttgtttttccaagcagctgtttggctttccgaagcccactttctgtctttaagaggtttaaagaaactaccagaccattttccaatgaatgtcttggtaccaccagacccgtagttcctattgattcatcagattttgcattggatattcgcatgcctggggttacacctaaacagtccgatacatacttctgcatgtctatgcgaataccagtggatgaggaagccttcgtgattgacttcaagcctcgagccagcatggatactgtccatcacatgttactttttggatgcaatatgccttcatccactggaagttactggttttgtgatgaaggaacctgtacagataaagccaatattctgtatgcctgggcgagaaatgctccccctacccggctccccaaaggtgttggattcagagttggaggagagactggaagtaaatactttgtactacaggtacactatggggatattagtgcttttagagataataacaaggactgttctggtgtgtccttacacctcacacgtctgccacagcctttaattgctggcatgtaccttatgatgtctgttgacactgttatcccagcaggagaaaaagtggtgaattctgacatttcatgccattataaaaattatccaatgcatgtctttgcctatagagttcacactcaccatttaggtaaggtagtaagtggatacagagtaagaaatggacagtggacactgattggacggcagagccctcagctgccacaggctttctaccctgtggggcatccagttgatgtaagttttggtgacctactggctgcaagatgtgtattcactggtgaaggaaggacagaagccacacacattggtggcacgtctagtgatgaaatgtgcaacttatacattatgtattacatggaagccaagcatgcagtttctttcatgacctgtacccagaatgtagctccagatatgttcagaaccataccaccagaggccaacattccaattcccgtgaagtctgatatggttatgatgcatgaacatcataaagaaacagaatataaagataagattcctttactacagcagccaaaacgagaagaagaagaagtgttagaccagggtgatttctattcactactttccaagctgctaggagaaagggaagatgttgttcatgtgcacaaatataatcctacagaaaaggcagaatcagagtcagacctggtagctgagattgcaaatgtagtccaaaaaaaggatcttggtcgatctgatgccagagagggtgcagaacatgagaggggtaatgctattcttgtcagagacagaattcacaaattccacagactagtatctaccttgaggccaccagagagcagagttttctcattacagcagcccccacctggtgaaggcacctgggaaccagaacacacaggagatttccacatggaagaggcactggattggcctggagtatacttgttaccaggccaggtttctggggtggctctagaccctaagaataacctggtgattttccacagaggtgaccatgtctgggatggaaactcgtttgacagcaagtttgtttaccagcaaataggactcggaccaattgaagaagacactattcttgtcatagatccaaataatgctgcagtactccagtccagtggaaaaaatctgttttacttgccacatggcttgagtatagataaagatgggaattattgggtcacagacgtggctctccatcaggtgttcaaactggatccaaacaataaagaaggccctgtattaatcctgggaaggagcatgcaaccaggcagtgaccagaatcacttctgtcaacccactgatgtggctgtggatccaggcactggagccatttatgtatcagatggttactgcaacagcaggattgtgcagttttcaccaagtggaaagttcatcacacagtggggagaagagtcttcagggagcagtcctctgccaggccagttcactgttcctcacagcttggctcttgtgcctcttttgggccaattatgtgtggcagaccgggaaaatggtcggatccagtgttttaaaactgacaccaaagaatttgtgagagagattaagcattcatcatttggaagaaatgtatttgcaatttcatatataccaggcttgctctttgcagtgaatgggaagcctcattttggggaccaagaacctgtacaaggatttgtgatgaacttttccaatggggaaattatagacatcttcaagccagtgcgcaagcactttgatatgcctcatgatattgttgcatctgaagatgggactgtgtacattggagatgctcataccaacaccgtgtggaagttcaccttgactgagaaattggaacatcgatcagttaaaaaggctggcattgaggtccaggaaatcaaagaagccgaggcagttgttgaaaccaaaatggagaacaaacccacctcctcagaattgcagaagatgcaagagaaacagaaactgatcaaagagccaggctcgggagtgcctgttgttctcattacaacccttctggttattccggtggttgtcctgctggccattgccatatttattcggtggaaaaaatcaagggcctttggagattctgaacacaaactcgagacgagttcaggaagagtactgggaagatttagaggaaagggaagtggaggcttaaaccttggtaatttctttgcaagccgtaagggctacagtcgaaaagggtttgaccggcttagcactgagggcagtgaccaagagaaagaggatgatggaagtgaatcagaagaggagtattcagcacctctgcctgcgctcgcaccttcctcctcctgaaaaccaagctttgatttagattgagtaagatttacccagaatgtcagattcctttccctttagcacgtttaaagttctgtgtatttaattgtaaactgtactagtctgtgtgggactgtacacactttatttacttcgttttggttaagttggcttctgtttctagttgaggagtttcctaaaagttcataacagtgccattgtctttatatgaacatagactagagaaaccgtcctctttttccatcataattctaatctaacaatggaagatttgcccatttacacttttgagactttttggtggatgtaaataaccccattctttgcttgaacacagtattttcccaatagcactttcattgccagtgtctttctttggtgcctttcctgttcagcattcttagcctgtggcagtaaagagaaactttgtgctacatgacgacaaagctgctaaatctcctatttttttaaaatcactaacattatattgcaatgaaggaaataaaaaagtctctatttaaattcttttttaaattttcttcagttggtgtgtttttgggatgtcttatttttagatggttacactgttagaacactattttcagaatctgaatgtaatttgtgtaataaagtgttttcagagcattagctgtc

SEQ ID NO: 3520 - protein, 973 aa, Homo sapiens [sequence omitted]

SEQ ID NO: 3521 - DNA, 3907 bp, Homo sapiens
cggcgcacgccgaggagagggagcccccgccaccgccgctgcctccgcgtgctcagcctgtccccgcccagggagccggagcctccaactaactccgcccgccgctccgccgcccgcaggctccggcttccgtcccggacagagcccgtggtcgcgcaggttctgaatgatgactgacgcgggtttgggtgatacccctcacagcccctgtcattccggagtcataaggcacccgcgcgtctagccccagcgccagggcacgcgagcggcgctggagggaggaaagcttccgcctgcgggccggacaaaagtcccgcctgcccacggctttttgcccgccgctcgtgaccgagacgcctcgccgcggccagctcgctgctctcgctggcggatggtgtgtggccgccgcaggacgcccgccgtgcccgggccatgaagtagcggctgctggcggcgccgctgcccaaccgccagccccagccccgcgctgcgctgcccggtcctctcccggcggggtcgtatcggcgtggacatggctggccgcgtccctagcctgctagttctccttgtttttccaagcagctgtttggctttccgaagcccactttctgtctttaagaggtttaaagaaactaccagaccattttccaatgaatgtcttggtaccaccagacccgtagttcctattgattcatcagattttgcattggatattcgcatgcctggggttacacctaaacagtccgatacatacttctgcatgtctatgcgaataccagtggatgaggaagccttcgtgattgacttcaagcctcgagccagcatggatactgtccatcacatgttactttttggatgcaatatgccttcatccactggaagttactggttttgtgatgaaggaacctgtacagataaagccaatattctgtatgcctgggcgagaaatgctccccctacccggctccccaaaggtgttggattcagagttggaggagagactggaagtaaatactttgtactacaggtacactatggggatattagtgcttttagagataataacaaggactgttctggtgtgtccttacacctcacacgtctgccacagcctttaattgctggcatgtaccttatgatgtctgttgacactgttatcccagcaggagaaaaagtggtgaattctgacatttcatgccattataaaaattatccaatgcatgtctttgcctatagagttcacactcaccatttaggtaaggtagtaagtggatacagagtaagaaatggacagtggacactgattggacggcagagccctcagctgccacaggctttctaccctgtggggcatccagttgatgtaagttttggtgacctactggctgcaagatgtgtattcactggtgaaggaaggacagaagccacacacattggtggcacgtctagtgatgaaatgtgcaacttatacattatgtattacatggaagccaagcatgcagtttctttcatgacctgtacccagaatgtagctccagatatgttcagaaccataccaccagaggccaacattccaattcccgtgaagtctgatatggttatgatgcatgaacatcataaagaaacagaatataaagataagattcctttactacagcagccaaaacgagaagaagaagaagtgttagaccagggtgatttctattcactactttccaagctgctaggagaaagggaagatgttgttcatgtgcacaaatataatcctacagaaaaggcagaatcagagtcagacctggtagctgagattgcaaatgtagtccaaaaaaaggatcttggtcgatctgatgccagagagggtgcagaacatgagaggggtaatgctattcttgtcagagacagaattcacaaattccacagactagtatctaccttgaggccaccagagagcagagttttctcattacagcagcccccacctggtgaaggcacctgggaaccagaacacacaggagatttccacatggaagaggcactggattggcctggagtatacttgttaccaggccaggtttctggggtggctctagaccctaagaataacctggtgattttccacagaggtgaccatgtctgggatggaaactcgtttgacagcaagtttgtttaccagcaaataggactcggaccaattgaagaagacactattcttgtcatagatccaaataatgctgcagtactccagtccagtggaaaaaatctgttttacttgccacatggcttgagtatagataaagatgggaattattgggtcacagacgtggctctccatcaggtgttcaaactggatccaaacaataaagaaggccctgtattaatcctgggaaggagcatgcaaccaggcagtgaccagaatcacttctgtcaacccactgatgtggctgtggatccaggcactggagccatttatgtatcagatggttactgcaacagcaggattgtgcagttttcaccaagtggaaagttcatcacacagtggggagaagagtcttcagggagcagtcctctgccaggccagttcactgttcctcacagcttggctcttgtgcctcttttgggccaattatgtgtggcagaccgggaaaatggtcggatccagtgttttaaaactgacaccaaagaatttgtgagagagattaagcattcatcatttggaagaaatgtatttgcaatttcatatataccaggcttgctctttgcagtgaatgggaagcctcattttggggaccaagaacctgtacaaggatttgtgatgaacttttccaatggggaaattatagacatcttcaagccagtgcgcaagcactttgatatgcctcatgatattgttgcatctgaagatgggactgtgtacattggagatgctcataccaacaccgtgtggaagttcaccttgactgagaaattggaacatcgatcagttaaaaaggctggcattgaggtccaggaaatcaaagattctgaacacaaactcgagacgagttcaggaagagtactgggaagatttagaggaaagggaagtggaggcttaaaccttggtaatttctttgcaagccgtaagggctacagtcgaaaagggtttgaccggcttagcactgagggcagtgaccaagagaaagaggatgatggaagtgaatcagaagaggagtattcagcacctctgcctgcgctcgcaccttcctcctcctgaaaaccaagctttgatttagattgagtaagatttacccagaatgtcagattcctttccctttagcacgtttaaagttctgtgtatttaattgtaaactgtactagtctgtgtgggactgtacacactttatttacttcgttttggttaagttggcttctgtttctagttgaggagtttcctaaaagttcataacagtgccattgtctttatatgaacatagactagagaaaccgtcctctttttccatcataattctaatctaacaatggaagatttgcccatttacacttttgagactttttggtggatgtaaataaccccattctttgcttgaacacagtattttcccaatagcactttcattgccagtgtctttctttggtgcctttcctgttcagcattcttagcctgtggcagtaaagagaaactttgtgctacatgacgacaaagctgctaaatctcctatttttttaaaatcactaacattatattgcaatgaaggaaataaaaaagtctctatttaaattcttttttaaattttcttcagttggtgtgtttttgggatgtcttatttttagatggttacactgttagaacactattttcagaatctgaatgtaatttgtgtaataaagtgttttcagagcattagctgtc

SEQ ID NO: 3522 - protein, 905 aa, Homo sapiens
MAGRVPSLLVLLVFPSSCLAFRSPLSVFKRFKETTRPFSNECLGTTRPVVPIDSSDFALDIRMPGVTPKQSDTYFCMSMRIPVDEEAFVIDFKPRASMDTVHHMLLFGCNMPSSTGSYWFCDEGTCTDKANILYAWARNAPPTRLPKGVGFRVGGETGSKYFVLQVHYGDISAFRDNNKDCSGVSLHLTRLPQPLIAGMYLMMSVDTVIPAGEKVVNSDISCHYKNYPMHVFAYRVHTHHLGKVVSGYRVRNGQWTLIGRQSPQLPQAFYPVGHPVDVSFGDLLAARCVFTGEGRTEATHIGGTSSDEMCNLYIMYYMEAKHAVSFMTCTQNVAPDMFRTIPPEANIPIPVKSDMVMMHEHHKETEYKDKIPLLQQPKREEEEVLDQGDFYSLLSKLLGEREDVVHVHKYNPTEKAESESDLVAEIANVVQKKDLGRSDAREGAEHERGNAILVRDRIHKFHRLVSTLRPPESRVFSLQQPPPGEGTWEPEHTGDFHMEEALDWPGVYLLPGQVSGVALDPKNNLVIFHRGDHVWDGNSFDSKFVYQQIGLGPIEEDTILVIDPNNAAVLQSSGKNLFYLPHGLSIDKDGNYWVTDVALHQVFKLDPNNKEGPVLILGRSMQPGSDQNHFCQPTDVAVDPGTGAIYVSDGYCNSRIVQFSPSGKFITQWGEESSGSSPLPGQFTVPHSLALVPLLGQLCVADRENGRIQCFKTDTKEFVREIKHSSFGRNVFAISYIPGLLFAVNGKPHFGDQEPVQGFVMNFSNGEIIDIFKPVRKHFDMPHDIVASEDGTVYIGDAHTNTVWKFTLTEKLEHRSVKKAGIEVQEIKDSEHKLETSSGRVLGRFRGKGSGGLNLGNFFASRKGYSRKGFDRLSTEGSDQEKEDDGSESEEEYSAPLPALAPSSS

SEQ ID NO: 3523 - DNA, 3790 bp, Homo sapiens
cggcgcacgccgaggagagggagcccccgccaccgccgctgcctccgcgtgctcagcctgtccccgcccagggagccggagcctccaactaactccgcccgccgctccgccgcccgcaggctccggcttccgtcccggacagagcccgtggtcgcgcaggttctgaatgatgactgacgcgggtttgggtgatacccctcacagcccctgtcattccggagtcataaggcacccgcgcgtctagccccagcgccagggcacgcgagcggcgctggagggaggaaagcttccgcctgcgggccggacaaaagtcccgcctgcccacggctttttgcccgccgctcgtgaccgagacgcctcgccgcggccagctcgctgctctcgctggcggatggtgtgtggccgccgcaggacgcccgccgtgcccgggccatgaagtagcggctgctggcggcgccgctgcccaaccgccagccccagccccgcgctgcgctgcccggtcctctcccggcggggtcgtatcggcgtggacatggctggccgcgtccctagcctgctagttctccttgtttttccaagcagctgtttggctttccgaagcccactttctgtctttaagaggtttaaagaaactaccagaccattttccaatgaatgtcttggtaccaccagacccgtagttcctattgattcatcagattttgcattggatattcgcatgcctggggttacacctaaacagtccgatacatacttctgcatgtctatgcgaataccagtggatgaggaagccttcgtgattgacttcaagcctcgagccagcatggatactgtccatcacatgttactttttggatgcaatatgccttcatccactggaagttactggttttgtgatgaaggaacctgtacagataaagccaatattctgtatgcctgggcgagaaatgctccccctacccggctccccaaaggtgttggattcagagttggaggagagactggaagtaaatactttgtactacaggtacactatggggatattagtgcttttagagataataacaaggactgttctggtgtgtccttacacctcacacgtctgccacagcctttaattgctggcatgtaccttatgatgtctgttgacactgttatcccagcaggagaaaaagtggtgaattctgacatttcatgccattataaaaattatccaatgcatgtctttgcctatagagttcacactcaccatttaggtaaggtagtaagtggatacagagtaagaaatggacagtggacactgattggacggcagagccctcagctgccacaggctttctaccctgtggggcatccagttgatgtaagttttggtgacctactggctgcaagatgtgtattcactggtgaaggaaggacagaagccacacacattggtggcacgtctagtgatgaaatgtgcaacttatacattatgtattacatggaagccaagcatgcagtttctttcatgacctgtacccagaatgtagctccagatatgttcagaaccataccaccagaggccaacattccaattcccgtgaagtctgatatggttatgatgcatgaacatcataaagaaacagaatataaagataagattcctttactacagcagccaaaacgagaagaagaagaagtgttagaccaggatttccacatggaagaggcactggattggcctggagtatacttgttaccaggccaggtttctggggtggctctagaccctaagaataacctggtgattttccacagaggtgaccatgtctgggatggaaactcgtttgacagcaagtttgtttaccagcaaataggactcggaccaattgaagaagacactattcttgtcatagatccaaataatgctgcagtactccagtccagtggaaaaaatctgttttacttgccacatggcttgagtatagataaagatgggaattattgggtcacagacgtggctctccatcaggtgttcaaactggatccaaacaataaagaaggccctgtattaatcctgggaaggagcatgcaaccaggcagtgaccagaatcacttctgtcaacccactgatgtggctgtggatccaggcactggagccatttatgtatcagatggttactgcaacagcaggattgtgcagttttcaccaagtggaaagttcatcacacagtggggagaagagtcttcagggagcagtcctctgccaggccagttcactgttcctcacagcttggctcttgtgcctcttttgggccaattatgtgtggcagaccgggaaaatggtcggatccagtgttttaaaactgacaccaaagaatttgtgagagagattaagcattcatcatttggaagaaatgtatttgcaatttcatatataccaggcttgctctttgcagtgaatgggaagcctcattttggggaccaagaacctgtacaaggatttgtgatgaacttttccaatggggaaattatagacatcttcaagccagtgcgcaagcactttgatatgcctcatgatattgttgcatctgaagatgggactgtgtacattggagatgctcataccaacaccgtgtggaagttcaccttgactgagaaattggaacatcgatcagttaaaaaggctggcattgaggtccaggaaatcaaagaagccgaggcagttgttgaaaccaaaatggagaacaaacccacctcctcagaattgcagaagatgcaagagaaacagaaactgatcaaagagccaggctcgggagtgcctgttgttctcattacaacccttctggttattccggtggttgtcctgctggccattgccatatttattcggtggaaaaaatcaagggcctttggagattctgaacacaaactcgagacgagttcaggaagagtactgggaagatttagaggaaagggaagtggaggcttaaaccttggtaatttctttgcaagccgtaagggctacagtcgaaaagggtttgaccggcttagcactgagggcagtgaccaagagaaagaggatgatggaagtgaatcagaagaggagtattcagcacctctgcctgcgctcgcaccttcctcctcctgaaaaccaagctttgatttagattgagtaagatttacccagaatgtcagattcctttccctttagcacgtttaaagttctgtgtatttaattgtaaactgtactagtctgtgtgggactgtacacactttatttacttcgttttggttaagttggcttctgtttctagttgaggagtttcctaaaagttcataacagtgccattgtctttatatgaacatagactagagaaaccgtcctctttttccatcataattctaatctaacaatggaagatttgcccatttacacttttgagactttttggtggatgtaaataaccccattctttgcttgaacacagtattttcccaatagcactttcattgccagtgtctttctttggtgcctttcctgttcagcattcttagcctgtggcagtaaagagaaactttgtgctacatgacgacaaagctgctaaatctcctatttttttaaaatcactaacattatattgcaatgaaggaaataaaaaagtctctatttaaattcttttttaaattttcttcagttggtgtgtttttgggatgtcttatttttagatggttacactgttagaacactattttcagaatctgaatgtaatttgtgtaataaagtgttttcagagcattagctgtc

SEQ ID NO: 3524 - protein, 866 aa, Homo sapiens
MAGRVPSLLVLLVFPSSCLAFRSPLSVFKRFKETTRPFSNECLGTTRPVVPIDSSDFALDIRMPGVTPKQSDTYFCMSMRIPVDEEAFVIDFKPRASMDTVHHMLLFGCNMPSSTGSYWFCDEGTCTDKANILYAWARNAPPTRLPKGVGFRVGGETGSKYFVLQVHYGDISAFRDNNKDCSGVSLHLTRLPQPLIAGMYLMMSVDTVIPAGEKVVNSDISCHYKNYPMHVFAYRVHTHHLGKVVSGYRVRNGQWTLIGRQSPQLPQAFYPVGHPVDVSFGDLLAARCVFTGEGRTEATHIGGTSSDEMCNLYIMYYMEAKHAVSFMTCTQNVAPDMFRTIPPEANIPIPVKSDMVMMHEHHKETEYKDKIPLLQQPKREEEEVLDQDFHMEEALDWPGVYLLPGQVSGVALDPKNNLVIFHRGDHVWDGNSFDSKFVYQQIGLGPIEEDTILVIDPNNAAVLQSSGKNLFYLPHGLSIDKDGNYWVTDVALHQVFKLDPNNKEGPVLILGRSMQPGSDQNHFCQPTDVAVDPGTGAIYVSDGYCNSRIVQFSPSGKFITQWGEESSGSSPLPGQFTVPHSLALVPLLGQLCVADRENGRIQCFKTDTKEFVREIKHSSFGRNVFAISYIPGLLFAVNGKPHFGDQEPVQGFVMNFSNGEIIDIFKPVRKHFDMPHDIVASEDGTVYIGDAHTNTVWKFTLTEKLEHRSVKKAGIEVQEIKEAEAVVETKMENKPTSSELQKMQEKQKLIKEPGSGVPVVLITTLLVIPVVVLLAIAIFIRWKKSRAFGDSEHKLETSSGRVLGRFRGKGSGGLNLGNFFASRKGYSRKGFDRLSTEGSDQEKEDDGSESEEEYSAPLPALAPSSS

SEQ ID NO: 3525 - DNA, 3853 bp, Homo sapiens
cggcgcacgccgaggagagggagcccccgccaccgccgctgcctccgcgtgctcagcctgtccccgcccagggagccggagcctccaactaactccgcccgccgctccgccgcccgcaggctccggcttccgtcccggacagagcccgtggtcgcgcaggttctgaatgatgactgacgcgggtttgggtgatacccctcacagcccctgtcattccggagtcataaggcacccgcgcgtctagccccagcgccagggcacgcgagcggcgctggagggaggaaagcttccgcctgcgggccggacaaaagtcccgcctgcccacggctttttgcccgccgctcgtgaccgagacgcctcgccgcggccagctcgctgctctcgctggcggatggtgtgtggccgccgcaggacgcccgccgtgcccgggccatgaagtagcggctgctggcggcgccgctgcccaaccgccagccccagccccgcgctgcgctgcccggtcctctcccggcggggtcgtatcggcgtggacatggctggccgcgtccctagcctgctagttctccttgtttttccaagcagctgtttggctttccgaagcccactttctgtctttaagaggtttaaagaaactaccagaccattttccaatgaatgtcttggtaccaccagacccgtagttcctattgattcatcagattttgcattggatattcgcatgcctggggttacacctaaacagtccgatacatacttctgcatgtctatgcgaataccagtggatgaggaagccttcgtgattgacttcaagcctcgagccagcatggatactgtccatcacatgttactttttggatgcaatatgccttcatccactggaagttactggttttgtgatgaaggaacctgtacagataaagccaatattctgtatgcctgggcgagaaatgctccccctacccggctccccaaaggtgttggattcagagttggaggagagactggaagtaaatactttgtactacaggtacactatggggatattagtgcttttagagataataacaaggactgttctggtgtgtccttacacctcacacgtctgccacagcctttaattgctggcatgtaccttatgatgtctgttgacactgttatcccagcaggagaaaaagtggtgaattctgacatttcatgccattataaaaattatccaatgcatgtctttgcctatagagttcacactcaccatttaggtaaggtagtaagtggatacagagtaagaaatggacagtggacactgattggacggcagagccctcagctgccacaggctttctaccctgtggggcatccagttgatgtaagttttggtgacctactggctgcaagatgtgtattcactggtgaaggaaggacagaagccacacacattggtggcacgtctagtgatgaaatgtgcaacttatacattatgtattacatggaagccaagcatgcagtttctttcatgacctgtacccagaatgtagctccagatatgttcagaaccataccaccagaggccaacattccaattcccgtgaagtctgatatggttatgatgcatgaacatcataaagaaacagaatataaagataagattcctttactacagcagccaaaacgagaagaagaagaagtgttagaccagggtgatttctattcactactttccaagctgctaggagaaagggaagatgttgttcatgtgcacaaatataatcctacagaaaaggcagaatcagagtcagacctggtagctgagattgcaaatgtagtccaaaaaaaggatcttggtcgatctgatgccagagagggtgcagaacatgagaggggtaatgctattcttgtcagagacagaattcacaaattccacagactagtatctaccttgaggccaccagagagcagagttttctcattacagcagcccccacctggtgaaggcacctgggaaccagaacacacaggagatttccacatggaagaggcactggattggcctggagtatacttgttaccaggccaggtttctggggtggctctagaccctaagaataacctggtgattttccacagaggtgaccatgtctgggatggaaactcgtttgacagcaagtttgtttaccagcaaataggactcggaccaattgaagaagacactattcttgtcatagatccaaataatgctgcagtactccagtccagtggaaaaaatctgttttacttgccacatggcttgagtatagataaagatgggaattattgggtcacagacgtggctctccatcaggtgttcaaactggatccaaacaataaagaaggccctgtattaatcctgggaaggagcatgcaaccaggcagtgaccagaatcacttctgtcaacccactgatgtggctgtggatccaggcactggagccatttatgtatcagatggttactgcaacagcaggattgtgcagttttcaccaagtggaaagttcatcacacagtggggagaagagtcttcagggagcagtcctctgccaggccagttcactgttcctcacagcttggctcttgtgcctcttttgggccaattatgtgtggcagaccgggaaaatggtcggatccagtgttttaaaactgacaccaaagaatttgtgagagagattaagcattcatcatttggaagaaatgtatttgcaatttcatatataccaggcttgctctttgcagtgaatgggaagcctcattttggggaccaagaacctgtacaaggatttgtgatgaacttttccaatggggaaattatagacatcttcaagccagtgcgcaagcactttgatatgcctcatgatattgttgcatctgaagatgggactgtgtacattggagatgctcataccaacaccgtgtggaagttcaccttgactgagaaattggaacatcgatcagttaaaaaggctggcattgaggtccaggaaatcaaaggaaagggaagtggaggcttaaaccttggtaatttctttgcaagccgtaagggctacagtcgaaaagggtttgaccggcttagcactgagggcagtgaccaagagaaagaggatgatggaagtgaatcagaagaggagtattcagcacctctgcctgcgctcgcaccttcctcctcctgaaaaccaagctttgatttagattgagtaagatttacccagaatgtcagattcctttccctttagcacgtttaaagttctgtgtatttaattgtaaactgtactagtctgtgtgggactgtacacactttatttacttcgttttggttaagttggcttctgtttctagttgaggagtttcctaaaagttcataacagtgccattgtctttatatgaacatagactagagaaaccgtcctctttttccatcataattctaatctaacaatggaagatttgcccatttacacttttgagactttttggtggatgtaaataaccccattctttgcttgaacacagtattttcccaatagcactttcattgccagtgtctttctttggtgcctttcctgttcagcattcttagcctgtggcagtaaagagaaactttgtgctacatgacgacaaagctgctaaatctcctatttttttaaaatcactaacattatattgcaatgaaggaaataaaaaagtctctatttaaattcttttttaaattttcttcagttggtgtgtttttgggatgtcttatttttagatggttacactgttagaacactattttcagaatctgaatgtaatttgtgtaataaagtgttttcagagcattagctgtc

SEQ ID NO: 3526 - protein, 887 aa, Homo sapiens
MAGRVPSLLVLLVFPSSCLAFRSPLSVFKRFKETTRPFSNECLGTTRPVVPIDSSDFALDIRMPGVTPKQSDTYFCMSMRIPVDEEAFVIDFKPRASMDTVHHMLLFGCNMPSSTGSYWFCDEGTCTDKANILYAWARNAPPTRLPKGVGFRVGGETGSKYFVLQVHYGDISAFRDNNKDCSGVSLHLTRLPQPLIAGMYLMMSVDTVIPAGEKVVNSDISCHYKNYPMHVFAYRVHTHHLGKVVSGYRVRNGQWTLIGRQSPQLPQAFYPVGHPVDVSFGDLLAARCVFTGEGRTEATHIGGTSSDEMCNLYIMYYMEAKHAVSFMTCTQNVAPDMFRTIPPEANIPIPVKSDMVMMHEHHKETEYKDKIPLLQQPKREEEEVLDQGDFYSLLSKLLGEREDVVHVHKYNPTEKAESESDLVAEIANVVQKKDLGRSDAREGAEHERGNAILVRDRIHKFHRLVSTLRPPESRVFSLQQPPPGEGTWEPEHTGDFHMEEALDWPGVYLLPGQVSGVALDPKNNLVIFHRGDHVWDGNSFDSKFVYQQIGLGPIEEDTILVIDPNNAAVLQSSGKNLFYLPHGLSIDKDGNYWVTDVALHQVFKLDPNNKEGPVLILGRSMQPGSDQNHFCQPTDVAVDPGTGAIYVSDGYCNSRIVQFSPSGKFITQWGEESSGSSPLPGQFTVPHSLALVPLLGQLCVADRENGRIQCFKTDTKEFVREIKHSSFGRNVFAISYIPGLLFAVNGKPHFGDQEPVQGFVMNFSNGEIIDIFKPVRKHFDMPHDIVASEDGTVYIGDAHTNTVWKFTLTEKLEHRSVKKAGIEVQEIKGKGSGGLNLGNFFASRKGYSRKGFDRLSTEGSDQEKEDDGSESEEEYSAPLPALAPSSS

SEQ ID NO: 3527 - DNA, 506 bp, Homo sapiens
ggcttccgtcccggacagagcccgtggtcgcgcagagagcaggatgctgaaccatacttagaattaatcaggagaaacatgggaaacatgcagaaaacaacataattatatgtgcacttttaagctacaaagtgaaattagagtcttttaagtctgcatgtgatttcatcatttttaataataccaatcttaaagaatggccatcatgttctttggacattgattactccagaaggggaagaatataaaaaacaccaatgcccaagtttgtttgttgtgaaaatagccacacttgaagtctacttttatattgttcttgtaaaacatcaattattatacagtaaaagataaattcagctgaatatgtggggagaagggaaggaaagatttgaagattatttaataatgttttaacttttatgttcttcatgtatggcataaaaacttatttaaactcctgaggttttagttgagtgtatgttttaaataaatattattatttaagt

SEQ ID NO: 3528 - protein, 69 aa, Homo sapiens
SLLSLHVISSFLIIPILKNGHHVLWTLITPEGEEYKKHQCPSLFVVKIATLEVYFYIVLVKHQLLYSKR

SEQ ID NO: 3529 - DNA, 602 bp, Homo sapiens
acctgcgggctcaggcccgggagctgcggaccgaggttggctcgatgctgttcccaggtactgttgttggctgttggtgaggaaggtgaagcactcagttgccttctcgggcctcggcgccccctatgtacgcctccctgggctcgggtccggtcgcccctttgcccgcttctgtaccaccctcagttctcgggtcctggagcaccggcggcagcaggagctgcgtccggcaggagacgaagagcccgggcggcgctcgtacttctggccactgggcgagcgtctggcaggaagtacttaaacaactacaaggaagtattgaagatgaagctatggcttcttctggacagattgatttattagagcgtcttaaagagcttaacttagatagcagtaatttccctggagtaaaactgcggtcaaaaatgtccctccgttcttatggaagccgggaaggatctgtatcaagccgttctggagagtgcagtcctgttcctatgggttcatttccaagaagagggtttgtaaatggaagcagagaaagtactggatatttagaagaacttgagaaagagaggtcattgcttcttgctgatcttgac

SEQ ID NO: 3530 - protein, 158 aa, Homo sapiens
MYASLGSGPVAPLPASVPPSVLGSWSTGGSRSCVRQETKSPGGARTSGHWASVWQEVLKQLQGSIEDEAMASSGQIDLLERLKELNLDSSNFPGVKLRSKMSLRSYGSREGSVSSRSGECSPVPMGSFPRRGFVNGSRESTGYLEELEKERSLLLADL

SEQ ID NO: 3531 - DNA, 8192 bp, Homo sapiens
caggagacgaagagcccgggcggcgctcgtacttctggccactgggcgagcgtctggcaggtccaagggtagccaaggatggctgcagcttcatatgatcagttgttaaagcaagttgaggcactgaagatggagaactcaaatcttcgacaagagctagaagataattccaatcatcttacaaaactggaaactgaggcatctaatatgaaggaagtacttaaacaactacaaggaagtattgaagatgaagctatggcttcttctggacagattgatttattagagcgtcttaaagagcttaacttagatagcagtaatttccctggagtaaaactgcggtcaaaaatgtccctccgttcttatggaagccgggaaggatctgtatcaagccgttctggagagtgcagtcctgttcctatgggttcatttccaagaagagggtttgtaaatggaagcagagaaagtactggatatttagaagaacttgagaaagagaggtcattgcttcttgctgatcttgacaaagaagaaaaggaaaaagactggtattacgctcaacttcagaatctcactaaaagaatagatagtcttcctttaactgaaaatttttccttacaaacagatatgaccagaaggcaattggaatatgaagcaaggcaaatcagagttgcgatggaagaacaactaggtacctgccaggatatggaaaaacgagcacagcgaagaatagccagaattcagcaaatcgaaaaggacatacttcgtatacgacagcttttacagtcccaagcaacagaagcagagaggtcatctcagaacaagcatgaaaccggctcacatgatgctgagcggcagaatgaaggtcaaggagtgggagaaatcaacatggcaacttctggtaatggtcagggttcaactacacgaatggaccatgaaacagccagtgttttgagttctagtagcacacactctgcacctcgaaggctgacaagtcatctgggaaccaaggtggaaatggtgtattcattgttgtcaatgcttggtactcatgataaggatgatatgtcgcgaactttgctagctatgtctagctcccaagacagctgtatatccatgcgacagtctggatgtcttcctctcctcatccagcttttacatggcaatgacaaagactctgtattgttgggaaattcccggggcagtaaagaggctcgggccagggccagtgcagcactccacaacatcattcactcacagcctgatgacaagagaggcaggcgtgaaatccgagtccttcatcttttggaacagatacgcgcttactgtgaaacctgttgggagtggcaggaagctcatgaaccaggcatggaccaggacaaaaatccaatgccagctcctgttgaacatcagatctgtcctgctgtgtgtgttctaatgaaactttcatttgatgaagagcatagacatgcaatgaatgaactagggggactacaggccattgcagaattattgcaagtggactgtgaaatgtatgggcttactaatgaccactacagtattacactaagacgatatgctggaatggctttgacaaacttgacttttggagatgtagccaacaaggctacgctatgctctatgaaaggctgcatgagagcacttgtggcccaactaaaatctgaaagtgaagacttacagcaggttattgcgagtgttttgaggaatttgtcttggcgagcagatgtaaatagtaaaaagacgttgcgagaagttggaagtgtgaaagcattgatggaatgtgctttagaagttaaaaaggaatcaaccctcaaaagcgtattgagtgccttatggaatttgtcagcacattgcactgagaataaagctgatatatgtgctgtagatggtgcacttgcatttttggttggcactcttacttaccggagccagacaaacactttagccattattgaaagtggaggtgggatattacggaatgtgtccagcttgatagctacaaatgaggaccacaggcaaatcctaagagagaacaactgtctacaaactttattacaacacttaaaatctcatagtttgacaatagtcagtaatgcatgtggaactttgtggaatctctcagcaagaaatcctaaagaccaggaagcattatgggacatgggggcagttagcatgctcaagaacctcattcattcaaagcacaaaatgattgctatgggaagtgctgcagctttaaggaatctcatggcaaataggcctgcgaagtacaaggatgccaatattatgtctcctggctcaagcttgccatctcttcatgttaggaaacaaaaagccctagaagcagaattagatgctcagcacttatcagaaacttttgacaatatagacaatttaagtcccaaggcatctcatcgtagtaagcagagacacaagcaaagtctctatggtgattatgtttttgacaccaatcgacatgatgataataggtcagacaattttaatactggcaacatgactgtcctttcaccatatttgaatactacagtgttacccagctcctcttcatcaagaggaagcttagatagttctcgttctgaaaaagatagaagtttggagagagaacgcggaattggtctaggcaactaccatccagcaacagaaaatccaggaacttcttcaaagcgaggtttgcagatctccaccactgcagcccagattgccaaagtcatggaagaagtgtcagccattcatacctctcaggaagacagaagttctgggtctaccactgaattacattgtgtgacagatgagagaaatgcacttagaagaagctctgctgcccatacacattcaaacacttacaatttcactaagtcggaaaattcaaataggacatgttctatgccttatgccaaattagaatacaagagatcttcaaatgatagtttaaatagtgtcagtagtagtgatggttatggtaaaagaggtcaaatgaaaccctcgattgaatcctattctgaagatgatgaaagtaagttttgcagttatggtcaatacccagccgacctagcccataaaatacatagtgcaaatcatatggatgataatgatggagaactagatacaccaataaattatagtcttaaatattcagatgagcagttgaactctggaaggcaaagtccttcacagaatgaaagatgggcaagacccaaacacataatagaagatgaaataaaacaaagtgagcaaagacaatcaaggaatcaaagtacaacttatcctgtttatactgagagcactgatgataaacacctcaagttccaaccacattttggacagcaggaatgtgtttctccatacaggtcacggggagccaatggttcagaaacaaatcgagtgggttctaatcatggaattaatcaaaatgtaagccagtctttgtgtcaagaagatgactatgaagatgataagcctaccaattatagtgaacgttactctgaagaagaacagcatgaagaagaagagagaccaacaaattatagcataaaatataatgaagagaaacgtcatgtggatcagcctattgattatagtttaaaatatgccacagatattccttcatcacagaaacagtcattttcattctcaaagagttcatctggacaaagcagtaaaaccgaacatatgtcttcaagcagtgagaatacgtccacaccttcatctaatgccaagaggcagaatcagctccatccaagttctgcacagagtagaagtggtcagcctcaaaaggctgccacttgcaaagtttcttctattaaccaagaaacaatacagacttattgtgtagaagatactccaatatgtttttcaagatgtagttcattatcatctttgtcatcagctgaagatgaaataggatgtaatcagacgacacaggaagcagattctgctaataccctgcaaatagcagaaataaaagaaaagattggaactaggtcagctgaagatcctgtgagcgaagttccagcagtgtcacagcaccctagaaccaaatccagcagactgcagggttctagtttatcttcagaatcagccaggcacaaagctgttgaattttcttcaggagcgaaatctccctccaaaagtggtgctcagacacccaaaagtccacctgaacactatgttcaggagaccccactcatgtttagcagatgtacttctgtcagttcacttgatagttttgagagtcgttcgattgccagctccgttcagagtgaaccatgcagtggaatggtaagtggcattataagccccagtgatcttccagatagccctggacaaaccatgccaccaagcagaagtaaaacacctccaccacctcctcaaacagctcaaaccaagcgagaagtacctaaaaataaagcacctactgctgaaaagagagagagtggacctaagcaagctgcagtaaatgctgcagttcagagggtccaggttcttccagatgctgatactttattacattttgccacggaaagtactccagatggattttcttgttcatccagcctgagtgctctgagcctcgatgagccatttatacagaaagatgtggaattaagaataatgcctccagttcaggaaaatgacaatgggaatgaaacagaatcagagcagcctaaagaatcaaatgaaaaccaagagaaagaggcagaaaaaactattgattctgaaaaggacctattagatgattcagatgatgatgatattgaaatactagaagaatgtattatttctgccatgccaacaaagtcatcacgtaaagcaaaaaagccagcccagactgcttcaaaattacctccacctgtggcaaggaaaccaagtcagctgcctgtgtacaaacttctaccatcacaaaacaggttgcaaccccaaaagcatgttagttttacaccgggggatgatatgccacgggtgtattgtgttgaagggacacctataaacttttccacagctacatctctaagtgatctaacaatcgaatcccctccaaatgagttagctgctggagaaggagttagaggaggggcacagtcaggtgaatttgaaaaacgagataccattcctacagaaggcagaagtacagatgaggctcaaggaggaaaaacctcatctgtaaccatacctgaattggatgacaataaagcagaggaaggtgatattcttgcagaatgcattaattctgctatgcccaaagggaaaagtcacaagcctttccgtgtgaaaaagataatggaccaggtccagcaagcatctgcgtcttcttctgcacccaacaaaaatcagttagatggtaagaaaaagaaaccaacttcaccagtaaaacctataccacaaaatactgaatataggacacgtgtaagaaaaaatgcagactcaaaaaataatttaaatgctgagagagttttctcagacaacaaagattcaaagaaacagaatttgaaaaataattccaaggtcttcaatgataagctcccaaataatgaagatagagtcagaggaagttttgcttttgattcacctcatcattacacgcctattgaaggaactccttactgtttttcacgaaatgattctttgagttctctagattttgatgatgatgatgttgacctttccagggaaaaggctgaattaagaaaggcaaaagaaaataaggaatcagaggctaaagttaccagccacacagaactaacctccaaccaacaatcagctaataagacacaagctattgcaaagcagccaataaatcgaggtcagcctaaacccatacttcagaaacaatccacttttccccagtcatccaaagacataccagacagaggggcagcaactgatgaaaagttacagaattttgctattgaaaatactccggtttgcttttctcataattcctctctgagttctctcagtgacattgaccaagaaaacaacaataaagaaaatgaacctatcaaagagactgagccccctgactcacagggagaaccaagtaaacctcaagcatcaggctatgctcctaaatcatttcatgttgaagataccccagtttgtttctcaagaaacagttctctcagttctcttagtattgactctgaagatgacctgttgcaggaatgtataagctccgcaatgccaaaaaagaaaaagccttcaagactcaagggtgataatgaaaaacatagtcccagaaatatgggtggcatattaggtgaagatctgacacttgatttgaaagatatacagagaccagattcagaacatggtctatcccctgattcagaaaattttgattggaaagctattcaggaaggtgcaaattccatagtaagtagtttacatcaagctgctgctgctgcatgtttatctagacaagcttcgtctgattcagattccatcctttccctgaaatcaggaatctctctgggatcaccatttcatcttacacctgatcaagaagaaaaaccctttacaagtaataaaggcccacgaattctaaaaccaggggagaaaagtacattggaaactaaaaagatagaatctgaaagtaaaggaatcaaaggaggaaaaaaagtttataaaagtttgattactggaaaagttcgatctaattcagaaatttcaggccaaatgaaacagccccttcaagcaaacatgccttcaatctctcgaggcaggacaatgattcatattccaggagttcgaaatagctcctcaagtacaagtcctgtttctaaaaaaggcccaccccttaagactccagcctccaaaagccctagtgaaggtcaaacagccaccacttctcctagaggagccaagccatctgtgaaatcagaattaagccctgttgccaggcagacatcccaaataggtgggtcaagtaaagcaccttctagatcaggatctagagattcgaccccttcaagacctgcccagcaaccattaagtagacctatacagtctcctggccgaaactcaatttcccctggtagaaatggaataagtcctcctaacaaattatctcaacttccaaggacatcatcccctagtactgcttcaactaagtcctcaggttctggaaaaatgtcatatacatctccaggtagacagatgagccaacagaaccttaccaaacaaacaggtttatccaagaatgccagtagtattccaagaagtgagtctgcctccaaaggactaaatcagatgaataatggtaatggagccaataaaaaggtagaactttctagaatgtcttcaactaaatcaagtggaagtgaatctgatagatcagaaagacctgtattagtacgccagtcaactttcatcaaagaagctccaagcccaaccttaagaagaaaattggaggaatctgcttcatttgaatctctttctccatcatctagaccagcttctcccactaggtcccaggcacaaactccagttttaagtccttcccttcctgatatgtctctatccacacattcgtctgttcaggctggtggatggcgaaaactcccacctaatctcagtcccactatagagtataatgatggaagaccagcaaagcgccatgatattgcacggtctcattctgaaagtccttctagacttccaatcaataggtcaggaacctggaaacgtgagcacagcaaacattcatcatcccttcctcgagtaagcacttggagaagaactggaagttcatcttcaattctttctgcttcatcagaatccagtgaaaaagcaaaaagtgaggatgaaaaacatgtgaactctatttcaggaaccaaacaaagtaaagaaaaccaagtatccgcaaaaggaacatggagaaaaataaaagaaaatgaattttctcccacaaatagtacttctcagaccgtttcctcaggtgctacaaatggtgctgaatcaaagactctaatttatcaaatggcacctgctgtttctaaaacagaggatgtttgggtgagaattgaggactgtcccattaacaatcctagatctggaagatctcccacaggtaatactcccccggtgattgacagtgtttcagaaaaggcaaatccaaacattaaagattcaaaagataatcaggcaaaacaaaa

SEQ ID NO: 3532 - protein, 2843 aa, Homo sapiens; identical to SEQ ID NO: 384

SEQ ID NO: 3533 - DNA, 8192 bp, Homo sapiens; identical to SEQ ID NO: 3531

SEQ ID NO: 3534 - protein, 2843 aa, Homo sapiens; identical to SEQ ID NO: 384

SEQ ID NO: 3535 - DNA, 7388 bp, Homo sapiens
tggagacagaatggaggtgctgccggactcggaaatggggtccaagggtagccaaggatggctgcagcttcatatgatcagttgttaaagcaagttgaggcactgaagatggagaactcaaatcttcgacaagagctagaagataattccaatcatcttacaaaactggaaactgaggcatctaatatgaaggaagtacttaaacaactacaaggaagtattgaagatgaagctatggcttcttctggacagattgatttattagagcgtcttaaagagcttaacttagatagcagtaatttccctggagtaaaactgcggtcaaaaatgtccctccgttcttatggaagccgggaaggatctgtatcaagccgttctggagagtgcagtcctgttcctatgggttcatttccaagaagagggtttgtaaatggaagcagagaaagtactggatatttagaagaacttgagaaagagaggtcattgcttcttgctgatcttgacaaagaagaaaaggaaaaagactggtattacgctcaacttcagaatctcactaaaagaatagatagtcttcctttaactgaaaatttttccttacaaacagatatgaccagaaggcaattggaatatgaagcaaggcaaatcagagttgcgatggaagaacaactaggtacctgccaggatatggaaaaacgagcacagcgaagaatagccagaattcagcaaatcgaaaaggacatacttcgtatacgacagcttttacagtcccaagcaacagaagcagagaggtcatctcagaacaagcatgaaaccggctcacatgatgctgagcggcagaatgaaggtcaaggagtgggagaaatcaacatggcaacttctggtaatggtcagatagaaaagatgaggatgtttgaatgctgatgggaaggagccagtagagaagagagttgaagatccctaagatcaaagagaaatggagagagaaaggatccagagcacatctaaagggatggaccttagataggaggaggggaactctgatgtcacagcaaaaggtggcgatggatatatacgcagggttcaactacacgaatggaccatgaaacagccagtgttttgagttctagtagcacacactctgcacctcgaaggctgacaagtcatctgggaaccaaggtggaaatggtgtattcattgttgtcaatgcttggtactcatgataaggatgatatgtcgcgaactttgctagctatgtctagctcccaagacagctgtatatccatgcgacagtctggatgtcttcctctcctcatccagcttttacatggcaatgacaaagactctgtattgttgggaaattcccggggcagtaaagaggctcgggccagggccagtgcagcactccacaacatcattcactcacagcctgatgacaagagaggcaggcgtgaaatccgagtccttcatcttttggaacagatacgcgcttactgtgaaacctgttgggagtggcaggaagctcatgaaccaggcatggaccaggacaaaaatccaatgccagctcctgttgaacatcagatctgtcctgctgtgtgtgttctaatgaaactttcatttgatgaagagcatagacatgcaatgaatgaactagggggactacaggccattgcagaattattgcaagtggactgtgaaatgtatgggcttactaatgaccactacagtattacactaagacgatatgctggaatggctttgacaaacttgacttttggagatgtagccaacaaggctacgctatgctctatgaaaggctgcatgagagcacttgtggcccaactaaaatctgaaagtgaagacttacagcaggttattgcgagtgttttgaggaatttgtcttggcgagcagatgtaaatagtaaaaagacgttgcgagaagttggaagtgtgaaagcattgatggaatgtgctttagaagttaaaaaggaatcaaccctcaaaagcgtattgagtgccttatggaatttgtcagcacattgcactgagaataaagctgatatatgtgctgtagatggtgcacttgcatttttggttggcactcttacttaccggagccagacaaacactttagccattattgaaagtggaggtgggatattacggaatgtgtccagcttgatagctacaaatgaggaccacaggcaaatcctaagagagaacaactgtctacaaactttattacaacacttaaaatctcatagtttgacaatagtcagtaatgcatgtggaactttgtggaatctctcagcaagaaatcctaaagaccaggaagcattatgggacatgggggcagttagcatgctcaagaacctcattcattcaaagcacaaaatgattgctatgggaagtgctgcagctttaaggaatctcatggcaaataggcctgcgaagtacaaggatgccaatattatgtctcctggctcaagcttgccatctcttcatgttaggaaacaaaaagccctagaagcagaattagatgctcagcacttatcagaaacttttgacaatatagacaatttaagtcccaaggcatctcatcgtagtaagcagagacacaagcaaagtctctatggtgattatgtttttgacaccaatcgacatgatgataataggtcagacaattttaatactggcaacatgactgtcctttcaccatatttgaatactacagtgttacccagctcctcttcatcaagaggaagcttagatagttctcgttctgaaaaagatagaagtttggagagagaacgcggaattggtctaggcaactaccatccagcaacagaaaatccaggaacttcttcaaagcgaggtttgcagatctccaccactgcagcccagattgccaaagtcatggaagaagtgtcagccattcatacctctcaggaagacagaagttctgggtctaccactgaattacattgtgtgacagatgagagaaatgcacttagaagaagctctgctgcccatacacattcaaacacttacaatttcactaagtcggaaaattcaaataggacatgttctatgccttatgccaaattagaatacaagagatcttcaaatgatagtttaaatagtgtcagtagtagtgatggttatggtaaaagaggtcaaatgaaaccctcgattgaatcctattctgaagatgatgaaagtaagttttgcagttatggtcaatacccagccgacctagcccataaaatacatagtgcaaatcatatggatgataatgatggagaactagatacaccaataaattatagtcttaaatattcagatgagcagttgaactctggaaggcaaagtccttcacagaatgaaagatgggcaagacccaaacacataatagaagatgaaataaaacaaagtgagcaaagacaatcaaggaatcaaagtacaacttatcctgtttatactgagagcactgatgataaacacctcaagttccaaccacattttggacagcaggaatgtgtttctccatacaggtcacggggagccaatggttcagaaacaaatcgagtgggttctaatcatggaattaatcaaaatgtaagccagtctttgtgtcaagaagatgactatgaagatgataagcctaccaattatagtgaacgttactctgaagaagaacagcatgaagaagaagagagaccaacaaattatagcataaaatataatgaagagaaacgtcatgtggatcagcctattgattatagtttaaaatatgccacagatattccttcatcacagaaacagtcattttcattctcaaagagttcatctggacaaagcagtaaaaccgaacatatgtcttcaagcagtgagaatacgtccacaccttcatctaatgccaagaggcagaatcagctccatccaagttctgcacagagtagaagtggtcagcctcaaaaggctgccacttgcaaagtttcttctattaaccaagaaacaatacagacttattgtgtagaagatactccaatatgtttttcaagatgtagttcattatcatctttgtcatcagctgaagatgaaataggatgtaatcagacgacacaggaagcagattctgctaataccctgcaaatagcagaaataaaagaaaagattggaactaggtcagctgaagatcctgtgagcgaagttccagcagtgtcacagcaccctagaaccaaatccagcagactgcagggttctagtttatcttcagaatcagccaggcacaaagctgttgaattttcttcaggagcgaaatctccctccaaaagtggtgctcagacacccaaaagtccacctgaacactatgttcaggagaccccactcatgtttagcagatgtacttctgtcagttcacttgatagttttgagagtcgttcgattgccagctccgttcagagtgaaccatgcagtggaatggtaagtggcattataagccccagtgatcttccagatagccctggacaaaccatgccaccaagcagaagtaaaacacctccaccacctcctcaaacagctcaaaccaagcgagaagtacctaaaaataaagcacctactgctgaaaagagagagagtggacctaagcaagctgcagtaaatgctgcagttcagagggtccaggttcttccagatgctgatactttattacattttgccacggaaagtactccagatggattttcttgttcatccagcctgagtgctctgagcctcgatgagccatttatacagaaagatgtggaattaagaataatgcctccagttcaggaaaatgacaatgggaatgaaacagaatcagagcagcctaaagaatcaaatgaaaaccaagagaaagaggcagaaaaaactattgattctgaaaaggacctattagatgattcagatgatgatgatattgaaatactagaagaatgtattatttctgccatgccaacaaagtcatcacgtaaagcaaaaaagccagcccagactgcttcaaaattacctccacctgtggcaaggaaaccaagtcagctgcctgtgtacaaacttctaccatcacaaaacaggttgcaaccccaaaagcatgttagttttacaccgggggatgatatgccacgggtgtattgtgttgaagggacacctataaacttttccacagctacatctctaagtgatctaacaatcgaatcccctccaaatgagttagctgctggagaaggagttagaggaggggcacagtcaggtgaatttgaaaaacgagataccattcctacagaaggcagaagtacagatgaggctcaaggaggaaaaacctcatctgtaaccatacctgaattggatgacaataaagcagaggaaggtgatattcttgcagaatgcattaattctgctatgcccaaagggaaaagtcacaagcctttccgtgtgaaaaagataatggaccaggtccagcaagcatctgcgtcttcttctgcacccaacaaaaatcagttagatggtaagaaaaagaaaccaacttcaccagtaaaacctataccacaaaatactgaatataggacacgtgtaagaaaaaatgcagactcaaaaaataatttaaatgctgagagagttttctcagacaacaaagattcaaagaaacagaatttgaaaaataattccaaggtcttcaatgataagctcccaaataatgaagatagagtcagaggaagttttgcttttgattcacctcatcattacacgcctattgaaggaactccttactgtttttcacgaaatgattctttgagttctctagattttgatgatgatgatgttgacctttccagggaaaaggctgaattaagaaaggcaaaagaaaataaggaatcagaggctaaagttaccagccacacagaactaacctccaaccaacaatcagctaataagacacaagctattgcaaagcagccaataaatcgaggtcagcctaaacccatacttcagaaacaatccacttttccccagtcatccaaagacataccagacagaggggcagcaactgatgaaaagttacagaattttgctattgaaaatactccggtttgcttttctcataattcctctctgagttctctcagtgacattgaccaagaaaacaacaataaagaaaatgaacctatcaaagagactgagccccctgactcacagggagaaccaagtaaacctcaagcatcaggctatgctcctaaatcatttcatgttgaagataccccagtttgtttctcaagaaacagttctctcagttctcttagtattgactctgaagatgacctgttgcaggaatgtataagctccgcaatgccaaaaaagaaaaagccttcaagactcaagggtgataatgaaaaacatagtcccagaaatatgggtggcatattaggtgaagatctgacacttgatttgaaagatatacagagaccagattcagaacatggtctatcccctgattcagaaaattttgattggaaagctattcaggaaggtgcaaattccatagtaagtagtttacatcaagctgctgctgctgcatgtttatctagacaagcttcgtctgattcagattccatcctttccctgaaatcaggaatctctctgggatcaccatttcatcttacacctgatcaagaagaaaaaccctttacaagtaataaaggcccacgaattctaaaaccaggggagaaaagtacattggaaactaaaaagatagaatctgaaagtaaaggaatcaaaggaggaaaaaaagtttataaaagtttgattactggaaaagttcgatctaattcagaaatttcaggccaaatgaaacagccccttcaagcaaacatgccttcaatctctcgaggcaggacaatgattcatattccaggagttcgaaatagctcctcaagtacaagtcctgtttctaaaaaaggcccaccccttaagactccagcctccaaaagccctagtgaaggtcaaacagccaccacttctcctagaggagccaagccatctgtgaaatcagaattaagccctgttgccaggcagacatcccaaataggtgggtcaagtaaagcaccttctagatcaggatctagagattcgaccccttcaagacctgcccagcaaccattaagtagacctatacagtctcctggccgaaactcaatttcccctggtagaaatggaataagtcctcctaacaaattatctcaacttccaaggacatcatcccctagtactgcttcaactaagtcctcaggttctggaaaaatgtcatatacatctccaggtagacagatgagccaacagaaccttaccaaacaaac

SEQ ID NO: 3536 - protein, 2097 aa, Homo sapiens
MDHETASVLSSSSTHSAPRRLTSHLGTKVEMVYSLLSMLGTHDKDDMSRTLLAMSSSQDSCISMRQSGCLPLLIQLLHGNDKDSVLLGNSRGSKEARARASAALHNIIHSQPDDKRGRREIRVLHLLEQIRAYCETCWEWQEAHEPGMDQDKNPMPAPVEHQICPAVCVLMKLSFDEEHRHAMNELGGLQAIAELLQVDCEMYGLTNDHYSITLRRYAGMALTNLTFGDVANKATLCSMKGCMRALVAQLKSESEDLQQVIASVLRNLSWRADVNSKKTLREVGSVKALMECALEVKKESTLKSVLSALWNLSAHCTENKADICAVDGALAFLVGTLTYRSQTNTLAIIESGGGILRNVSSLIATNEDHRQILRENNCLQTLLQHLKSHSLTIVSNACGTLWNLSARNPKDQEALWDMGAVSMLKNLIHSKHKMIAMGSAAALRNLMANRPAKYKDANIMSPGSSLPSLHVRKQKALEAELDAQHLSETFDNIDNLSPKASHRSKQRHKQSLYGDYVFDTNRHDDNRSDNFNTGNMTVLSPYLNTTVLPSSSSSRGSLDSSRSEKDRSLERERGIGLGNYHPATENPGTSSKRGLQISTTAAQIAKVMEEVSAIHTSQEDRSSGSTTELHCVTDERNALRRSSAAHTHSNTYNFTKSENSNRTCSMPYAKLEYKRSSNDSLNSVSSSDGYGKRGQMKPSIESYSEDDESKFCSYGQYPADLAHKIHSANHMDDNDGELDTPINYSLKYSDEQLNSGRQSPSQNERWARPKHIIEDEIKQSEQRQSRNQSTTYPVYTESTDDKHLKFQPHFGQQECVSPYRSRGANGSETNRVGSNHGINQNVSQSLCQEDDYEDDKPTNYSERYSEEEQHEEEERPTNYSIKYNEEKRHVDQPIDYSLKYATDIPSSQKQSFSFSKSSSGQSSKTEHMSSSSENTSTPSSNAKRQNQLHPSSAQSRSGQPQKAATCKVSSINQETIQTYCVEDTPICFSRCSSLSSLSSAEDEIGCNQTTQEADSANTLQIAEIKEKIGTRSAEDPVSEVPAVSQHPRTKSSRLQGSSLSSESARHKAVEFSSGAKSPSKSGAQTPKSPPEHYVQETPLMFSRCTSVSSLDSFESRSIASSVQSEPCSGMVSGIISPSDLPDSPGQTMPPSRSKTPPPPPQTAQTKREVPKNKAPTAEKRESGPKQAAVNAAVQRVQVLPDADTLLHFATESTPDGFSCSSSLSALSLDEPFIQKDVELRIMPPVQENDNGNETESEQPKESNENQEKEAEKTIDSEKDLLDDSDDDDIEILEECIISAMPTKSSRKAKKPAQTASKLPPPVARKPSQLPVYKLLPSQNRLQPQKHVSFTPGDDMPRVYCVEGTPINFSTATSLSDLTIESPPNELAAGEGVRGGAQSGEFEKRDTIPTEGRSTDEAQGGKTSSVTIPELDDNKAEEGDILAECINSAMPKGKSHKPFRVKKIMDQVQQASASSSAPNKNQLDGKKKKPTSPVKPIPQNTEYRTRVRKNADSKNNLNAERVFSDNKDSKKQNLKNNSKVFNDKLPNNEDRVRGSFAFDSPHHYTPIEGTPYCFSRNDSLSSLDFDDDDVDLSREKAELRKAKENKESEAKVTSHTELTSNQQSANKTQAIAKQPINRGQPKPILQKQSTFPQSSKDIPDRGAATDEKLQNFAIENTPVCFSHNSSLSSLSDIDQENNNKENEPIKETEPPDSQGEPSKPQASGYAPKSFHVEDTPVCFSRNSSLSSLSIDSEDDLLQECISSAMPKKKKPSRLKGDNEKHSPRNMGGILGEDLTLDLKDIQRPDSEHGLSPDSENFDWKAIQEGANSIVSSLHQAAAAACLSRQASSDSDSILSLKSGISLGSPFHLTPDQEEKPFTSNKGPRILKPGEKSTLETKKIESESKGIKGGKKVYKSLITGKVRSNSEISGQMKQPLQANMPSISRGRTMIHIPGVRNSSSSTSPVSKKGPPLKTPASKSPSEGQTATTSPRGAKPSVKSELSPVARQTSQIGGSSKAPSRSGSRDSTPSRPAQQPLSRPIQSPGRNSISPGRNGISPPNKLSQLPRTSSPSTASTKSSGSGKMSYTSPGRQMSQQNLTK

SEQ ID NO: 3537 - DNA, 8192 bp, Homo sapiens; identical to SEQ ID NO: 383

SEQ ID NO: 3538 - protein, 2843 aa, Homo sapiens; identical to SEQ ID NO: 384

SEQ ID NO: 3539 - DNA, 8192 bp, Homo sapiens; identical to SEQ ID NO: 383

SEQ ID NO: 3540 - protein, 2843 aa, Homo sapiens; identical to SEQ ID NO: 384

SEQ ID NO: 3541 - DNA, 4363 bp, Homo sapiens
ggagacagaatggaggtgctgccggactcggaaatggggtccaagggtagccaaggatggctgcagcttcatatgatcagttgttaaagcaagttgaggcactgaagatggagaactcaaatcttcgacaagagctagaagataattccaatcatcttacaaaactggaaactgaggcatctaatatgaaggaagtacttaaacaactacaaggaagtattgaagatgaagctatggcttcttctggacagattgatttattagagcgtcttaaagagcttaacttagatagcagtaatttccctggaatcaggaatctctctgggatcaccatttcatcttacacctgatcaagaagaaaaaccctttacaagtaataaaggcccacgaattctaaaaccaggggagaaaagtacattggaaactaaaaagatagaatctgaaagtaaaggaatcaaaggaggaaaaaaagtttataaaagtttgattactggaaaagttcgatctaattcagaaatttcaggccaaatgaaacagccccttcaagcaaacatgccttcaatctctcgaggcaggacaatgattcatattccaggagttcgaaatagctcctcaagtacaagtcctgtttctaaaaaaggcccaccccttaagactccagcctccaaaagccctagtgaaggtcaaacagccaccacttctcctagaggagccaagccatctgtgaaatcagaattaagccctgttgccaggcagacatcccaaataggtgggtcaagtaaagcaccttctagatcaggatctagagattcgaccccttcaagacctgcccagcaaccattaagtagacctatacagtctcctggccgaaactcaatttcccctggtagaaatggaataagtcctcctaacaaattatctcaacttccaaggacatcatcccctagtactgcttcaactaagtcctcaggttctggaaaaatgtcatatacatctccaggtagacagatgagccaacagaaccttaccaaacaaacaggtttatccaagaatgccagtagtattccaagaagtgagtctgcctccaaaggactaaatcagatgaataatggtaatggagccaataaaaaggtagaactttctagaatgtcttcaactaaatcaagtggaagtgaatctgatagatcagaaagacctgtattagtacgccagtcaactttcatcaaagaagctccaagcccaaccttaagaagaaaattggaggaatctgcttcatttgaatctctttctccatcatctagaccagcttctcccactaggtcccaggcacaaactccagttttaagtccttcccttcctgatatgtctctatccacacattcgtctgttcaggctggtggatggcgaaaactcccacctaatctcagtcccactatagagtataatgatggaagaccagcaaagcgccatgatattgcacggtctcattctgaaagtccttctagacttccaatcaataggtcaggaacctggaaacgtgagcacagcaaacattcatcatcccttcctcgagtaagcacttggagaagaactggaagttcatcttcaattctttctgcttcatcagaatccagtgaaaaagcaaaaagtgaggatgaaaaacatgtgaactctatttcaggaaccaaacaaagtaaagaaaaccaagtatccgcaaaaggaacatggagaaaaataaaagaaaatgaattttctcccacaaatagtacttctcagaccgtttcctcaggtgctacaaatggtgctgaatcaaagactctaatttatcaaatggcacctgctgtttctaaaacagaggatgtttgggtgagaattgaggactgtcccattaacaatcctagatctggaagatctcccacaggtaatactcccccggtgattgacagtgtttcagaaaaggcaaatccaaacattaaagattcaaaagataatcaggcaaaacaaaatgtgggtaatggcagtgttcccatgcgtaccgtgggtttggaaaatcgcctgaactcctttattcaggtggatgcccctgaccaaaaaggaactgagataaaaccaggacaaaataatcctgtccctgtatcagagactaatgaaagttctatagtggaacgtaccccattcagttctagcagctcaagcaaacacagttcacctagtgggactgttgctgccagagtgactccttttaattacaacccaagccctaggaaaagcagcgcagatagcacttcagctcggccatctcagatcccaactccagtgaataacaacacaaagaagcgagattccaaaactgacagcacagaatccagtggaacccaaagtcctaagcgccattctgggtcttaccttgtgacatctgtttaaaagagaggaagaatgaaactaagaaaattctatgttaattacaactgctatatagacattttgtttcaaatgaaactttaaaagactgaaaaattttgtaaataggtttgattcttgttagagggtttttgttctggaagccatatttgatagtatactttgtcttcactggtcttattttgggaggcactcttgatggttaggaaaaaaatagtaaagccaagtatgtttgtacagtatgttttacatgtatttaaagtagcatcccatcccaacttcctttaattattgcttgtcttaaaataatgaacactacagatagaaaatatgatatattgctgttatcaatcatttctagattataaactgactaaacttacatcagggaaaaattggtatttatgcaaaaaaaaatgtttttgtccttgtgagtccatctaacatcataattaatcatgtggctgtgaaattcacagtaatatggttcccgatgaacaagtttacccagcctgctttgctttactgcatgaatgaaactgatggttcaatttcagaagtaatgattaacagttatgtggtcacatgatgtgcatagagatagctacagtgtaataatttacactattttgtgctccaaacaaaacaaaaatctgtgtaactgtaaaacattgaatgaaactattttacctgaactagattttatctgaaagtaggtagaatttttgctatgctgtaatttgttgtatattctggtatttgaggtgagatggctgctcttttattaatgagacatgaattgtgtctcaacagaaactaaatgaacatttcagaataaattattgctgtatgtaaactgttactgaaattggtatttgtttgaagggtcttgtttcacatttgtattaataattgtttaaaatgcctcttttaaaagcttatataaatttttttcttcagcttctatgcattaagagtaaaattcctcttactgtaataaaaacaattgaagaagactgttgccacttaaccattccatgcgttggcacttatctattcctgaaatttcttttatgtgattagctcatcttgatttttaatatttttccacttaaacttttttttcttactccactggagctcagtaaaagtaaattcatgtaatagcaatgcaagcagcctagcacagactaagcattgagcataataggcccacataatttcctctttcttaatattatagaattctgtacttgaaattgattcttagacattgcagtctcttcgaggctttacagtgtaaactgtcttgccccttcatcttcttgttgcaactgggtctgacatgaacactttttatcaccctgtatgttagggcaagatctcagcagtgaagtataatcagcactttgccatgctcagaaaattcaaatcacatggaactttagaggtagatttaatacgattaagatattcagaagtatattttagaatccctgcctgttaaggaaactttatttgtggtaggtacagttctggggtacatgttaagtgtccccttatacagtggagggaagtcttccttcctgaaggaaaataaactgacacttattaactaagataatttacttaatatatcttccctgatttgttttaaaagatcagagggtgactgatgatacatgcatacatatttgttgaataaatgaaaatttatttttagtgataagattcatacactctgtatttggggagggaaaacctttttaagcatggtggggcactcagataggagtgaatacacctacctggtgccttgaaaatcacatcaagtagttaattatctaccccttacctgtgtttataacttccaggtaatgagaatgattttttttaaagctaaaatgccagtaaataaaagtgctatgacttgagctaagat

SEQ ID NO: 3542 - protein, 97 aa, Homo sapiens
MAAASYDQLLKQVEALKMENSNLRQELEDNSNHLTKLETEASNMKEVLKQLQGSIEDEAMASSGQIDLLERLKELNLDSSNFPGIRNLSGITISSYT

SEQ ID NO: 3543 - DNA, 4536 bp, Homo sapiens
ggagacagaatggaggtgctgccggactcggaaatggggtccaagggtagccaaggatggctgcagcttcatatgatcagttgttaaagcaagttgaggcactgaagatggagaactcaaatcttcgacaagagctagaagataattccaatcatcttacaaaactggaaactgaggcatctaatatgaaggaagtacttaaacaactacaaggaagtattgaagatgaagctatggcttcttctggacagattgatttattagagcgtcttaaagagcttaacttagatagcagtaatttccctggaatcaggaatctctctgggatcaccatttcatcttacacctgatcaagaagaaaaaccctttacaagtaataaaggcccacgaattctaaaaccaggggagaaaagtacattggaaactaaaaagatagaatctgaaagtaaaggaatcaaaggaggaaaaaaagtttataaaagtttgattactggaaaagttcgatctaattcagaaatttcaggccaaatgaaacagccccttcaagcaaacatgccttcaatctctcgaggcaggacaatgattcatattccaggagttcgaaatagctcctcaagtacaagtcctgtttctaaaaaaggcccaccccttaagactccagcctccaaaagccctagtgaaggtcaaacagccaccacttctcctagaggagccaagccatctgtgaaatcagaattaagccctgttgccaggcagacatcccaaataggtgggtcaagtaaagcaccttctagatcaggatctagagattcgaccccttcaagacctgcccagcaaccattaagtagacctatacagtctcctggccgaaactcaatttcccctggtagaaatggaataagtcctcctaacaaattatctcaacttccaaggacatcatcccctagtactgcttcaactaagtcctcaggttctggaaaaatgtcatatacatctccaggtagacagatgagccaacagaaccttaccaaacaaacaggtttatccaagaatgccagtagtattccaagaagtgagtctgcctccaaaggactaaatcagatgaataatggtaatggagccaataaaaaggtagaactttctagaatgtcttcaactaaatcaagtggaagtgaatctgatagatcagaaagacctgtattagtacgccagtcaactttcatcaaagaagctccaagcccaaccttaagaagaaaattggaggaatctgcttcatttgaatctctttctccatcatctagaccagcttctcccactaggtcccaggcacaaactccagttttaagtccttcccttcctgatatgtctctatccacacattcgtctgttcaggctggtggatggcgaaaactcccacctaatctcagtcccactatagagtataatgatggaagaccagcaaagcgccatgatattgcacggtctcattctgaaagtccttctagacttccaatcaataggtcaggaacctggaaacgtgagcacagcaaacattcatcatcccttcctcgagtaagcacttggagaagaactggaagttcatcttcaattctttctgcttcatcagaatccagtgaaaaagcaaaaagtgaggatgaaaaacatgtgaactctatttcaggaaccaaacaaagtaaagaaaaccaagtatccgcaaaaggaacatggagaaaaataaaagaaaatgaattttctcccacaaatagtacttctcagaccgtttcctcaggtgctacaaatggtgctgaatcaaagactctaatttatcaaatggcacctgctgtttctaaaacagaggatgtttgggtgagaattgaggactgtcccattaacaatcctagatctggaagatctcccacaggtaatactcccccggtgattgacagtgtttcagaaaaggcaaatccaaacattaaagattcaaaagataatcaggcaaaacaaaatgtgggtaatggcagtgttcccatgcgtaccgtgggtttggaaaatcgcctgaactcctttattcaggtggatgcccctgaccaaaaaggaactgagataaaaccaggacaaaataatcctgtccctgtatcagagactaatgaaagttctatagtggaacgtaccccattcagttctagcagctcaagcaaacacagttcacctagtgggactgttgctgccagagtgactccttttaattacaacccaagccctaggaaaagcagcgcagatagcacttcagctcggccatctcagatcccaactccagtgaataacaacacaaagaagcgagattccaaaactgacagcacagaatccagtggaacccaaagtcctaagcgccattctgggtcttaccttgtgacatctgtttaaaagagaggaagaatgaaactaagaaaattctatgttaattacaactgctatatagacattttgtttcaaatgaaactttaaaagactgaaaaattttgtaaataggtttgattcttgttagagggtttttgttctggaagccatatttgatagtatactttgtcttcactggtcttattttgggaggcactcttgatggttaggaaaaaaatagtaaagccaagtatgtttgtacagtatgttttacatgtatttaaagtagcatcccatcccaacttcctttaattattgcttgtcttaaaataatgaacactacagatagaaaatatgatatattgctgttatcaatcatttctagattataaactgactaaacttacatcagggaaaaattggtatttatgcaaaaaaaaatgtttttgtccttgtgagtccatctaacatcataattaatcatgtggctgtgaaattcacagtaatatggttcccgatgaacaagtttacccagcctgctttgctttactgcatgaatgaaactgatggttcaatttcagaagtaatgattaacagttatgtggtcacatgatgtgcatagagatagctacagtgtaataatttacactattttgtgctccaaacaaaacaaaaatctgtgtaactgtaaaacattgaatgaaactattttacctgaactagattttatctgaaagtaggtagaatttttgctatgctgtaatttgttgtatattctggtatttgaggtgagatggctgctcttttattaatgagacatgaattgtgtctcaacagaaactaaatgaacatttcagaataaattattgctgtatgtaaactgttactgaaattggtatttgtttgaagggtcttgtttcacatttgtattaataattgtttaaaatgcctcttttaaaagcttatataaatttttttcttcagcttctatgcattaagagtaaaattcctcttactgtaataaaaacaattgaagaagactgttgccacttaaccattccatgcgttggcacttatctattcctgaaatttcttttatgtgattagctcatcttgatttttaatatttttccacttaaacttttttttcttactccactggagctcagtaaaagtaaattcatgtaatagcaatgcaagcagcctagcacagactaagcattgagcataataggcccacataatttcctctttcttaatattatagaattctgtacttgaaattgattcttagacattgcagtctcttcgaggctttacagtgtaaactgtcttgccccttcatcttcttgttgcaactgggtctgacatgaacactttttatcaccctgtatgttagggcaagatctcagcagtgaagtataatcagcactttgccatgctcagaaaattcaaatcacatggaactttagaggtagatttaatacgattaagatattcagaagtatattttagaatccctgcctgttaaggaaactttatttgtggtaggtacagttctggggtacatgttaagtgtccccttatacagtggagggaagtcttccttcctgaaggaaaataaactgacacttattaactaagataatttacttaatatatcttccctgatttgttttaaaagatcagagggtgactgatgatacatgcatacatatttgttgaataaatgaaaatttatttttagtgataagattcatacactctgtatttggggagggaaaacctttttaagcatggtggggcactcagataggagtgaatacacctacctggtgccttgaaaatcacatcaagtagttaattatctaccccttacctgtgtttataacttccaggtaatgagaatgattttttttaaagctaaaatgccagtaaataaaagtgctatgacttgagctaagatatttgactccaatgcctgtactgtgtctactgcaccactttgtaaacacttcaatttactatctttgaaatgattgacctttaaatttttgccaaatgttatctgaaattgtctatgaataccatctacttctgttgttttcccaggcttccataaacaatggagatacatgc

SEQ ID NO: 3544 - protein, 97 aa, Homo sapiens; identical to SEQ ID NO: 3542

SEQ ID NO: 3545 - DNA, 507 bp, Homo sapiens
ggagacagaatggaggtgctgccggactcggaaatggggtccaagggtagccaaggatggctgcagcttcatatgatcagttgttaaagcaagttgaggcactgaagatggagaactcaaatcttcgacaagagctagaagataattccaatcatcttacaaaactggaaactgaggcatctaatatgaaggaagtacttaaacaactacaaggaagtattgaagatgaagctatggcttcttctggacagattgatttattagagcgtcttaaagagcttaacttagatagcagtaatttccctggagtaaaactgcggtcaaaaatgtccctccgttcttatggaagccgggaaggatctgtatcaagccgttctggagagtgcagtcctgttcctatgggttcatttccaagaagagggtttgtaaatggaagcagagaaagtactggatatttagaagaacttgagaaagagaggtcattgcttcttgctgatcttgacaaag

SEQ ID NO: 3546 - protein, 149 aa, Homo sapiens
MAAASYDQLLKQVEALKMENSNLRQELEDNSNHLTKLETEASNMKEVLKQLQGSIEDEAMASSGQIDLLERLKELNLDSSNFPGVKLRSKMSLRSYGSREGSVSSRSGECSPVPMGSFPRRGFVNGSRESTGYLEELEKERSLLLADLD

SEQ ID NO: 3547 - DNA, 3274 bp, Homo sapiens
ggagacagaatggaggtgctgccggactcggaaatggggtccaagggtagccaaggatggctgcagcttcatatgatcagttgttaaagcaagttgaggcactgaagatggagaactcaaatcttcgacaagagctagaagataattccaatcatcttacaaaactggaaactgaggcatctaatatgaaggaagtacttaaacaactacaaggaagtattgaagatgaagctatggcttcttctggacagattgatttattagagcgtcttaaagagcttaacttagatagcagtaatttccctggaatcaggaatctctctgggatcaccatttcatcttacacctgatcaagaagaaaaaccctttacaagtaataaaggcccacgaattctaaaaccaggggagaaaagtacattggaaactaaaaagatagaatctgaaagtaaaggaatcaaaggaggaaaaaaagtttataaaagtttgattactggaaaagttcgatctaattcagaaatttcaggccaaatgaaacagccccttcaagcaaacatgccttcaatctctcgaggcaggacaatgattcatattccaggagttcgaaatagctcctcaagtacaagtcctgtttctaaaaaaggcccaccccttaagactccagcctccaaaagccctagtgaaggtcaaacagccaccacttctcctagaggagccaagccatctgtgaaatcagaattaagccctgttgccaggcagacatcccaaataggtgggtcaagtaaagcaccttctagatcaggatctagagattcgaccccttcaagacctgcccagcaaccattaagtagacctatacagtctcctggccgaaactcaatttcccctggtagaaatggaataagtcctcctaacaaattatctcaacttccaaggacatcatcccctagtactgcttcaactaagtcctcaggttctggaaaaatgtcatatacatctccaggtagacagatgagccaacagaaccttaccaaacaaacaggtttatccaagaatgccagtagtattccaagaagtgagtctgcctccaaaggactaaatcagatgaataatggtaatggagccaataaaaaggtagaactttctagaatgtcttcaactaaatcaagtggaagtgaatctgatagatcagaaagacctgtattagtacgccagtcaactttcatcaaagaagctccaagcccaaccttaagaagaaaattggaggaatctgcttcatttgaatctctttctccatcatctagaccagcttctcccactaggtcccaggcacaaactccagttttaagtccttcccttcctgatatgtctctatccacacattcgtctgttcaggctggtggatggcgaaaactcccacctaatctcagtcccactatagagtataatgatggaagaccagcaaagcgccatgatattgcacggtctcattctgaaagtccttctagacttccaatcaataggtcaggaacctggaaacgtgagcacagcaaacattcatcatcccttcctcgagtaagcacttggagaagaactggaagttcatcttcaattctttctgcttcatcagaatccagtgaaaaagcaaaaagtgaggatgaaaaacatgtgaactctatttcaggaaccaaacaaagtaaagaaaaccaagtatccgcaaaaggaacatggagaaaaataaaagaaaatgaattttctcccacaaatagtacttctcagaccgtttcctcaggtgctacaaatggtgctgaatcaaagactctaatttatcaaatggcacctgctgtttctaaaacagaggatgtttgggtgagaattgaggactgtcccattaacaatcctagatctggaagatctcccacaggtaatactcccccggtgattgacagtgtttcagaaaaggcaaatccaaacattaaagattcaaaagataatcaggcaaaacaaaatgtgggtaatggcagtgttcccatgcgtaccgtgggtttggaaaatcgcctgaactcctttattcaggtggatgcccctgaccaaaaaggaactgagataaaaccaggacaaaataatcctgtccctgtatcagagactaatgaaagttctatagtggaacgtaccccattcagttctagcagctcaagcaaacacagttcacctagtgggactgttgctgccagagtgactccttttaattacaacccaagccctaggaaaagcagcgcagatagcacttcagctcggccatctcagatcccaactccagtgaataacaacacaaagaagcgagattccaaaactgacagcacagaatccagtggaacccaaagtcctaagcgccattctgggtcttaccttgtgacatctgtttaaaagagaggaagaatgaaactaagaaaattctatgttaattacaactgctatatagacattttgtttcaaatgaaactttaaaagactgaaaaattttgtaaataggtttgattcttgttagagggtttttgttctggaagccatatttgatagtatactttgtcttcactggtcttattttgggaggcactcttgatggttaggaaaaaaatagtaaagccaagtatgtttgtacagtatgttttacatgtatttaaagtagcatcccatcccaacttcctttaattattgcttgtcttaaaataatgaacactacagatagaaaatatgatatattgctgttatcaatcatttctagattataaactgactaaacttacatcagggaaaaattggtatttatgcaaaaaaaaatgtttttgtccttgtgagtccatctaacatcataattaatcatgtggctgtgaaattcacagtaatatggttcccgatgaacaagtttacccagcctgctttgctttactgcatgaatgaaactgatggttcaatttcagaagtaatgattaacagttatgtggtcacatgatgtgcatagagatagctacagtgtaataatttacactattttgtgctccaaacaaaacaaaaatctgtgtaactgtaaaacattgaatgaaactattttacctgaactagattttatctgaaagtaggtagaatttttgctatgctgtaatttgttgtatattctggtatttgaggtgagatggctgctcttttattaatgagacatgaattgtgtctcaacagaaactaaatgaacatttcagaataaattattgctgtatgt

SEQ ID NO: 3548 - protein, 97 aa, Homo sapiens; identical to SEQ ID NO: 3542

SEQ ID NO: 3549 - DNA, 3449 bp, Homo sapiens
ggagacagaatggaggtgctgccggactcggaaatggggtccaagggtagccaaggatggctgcagcttcatatgatcagttgttaaagcaagttgaggcactgaagatggagaactcaaatcttcgacaagagctagaagataattccaatcatcttacaaaactggaaactgaggcatctaatatgaaggaagtacttaaacaactacaaggaagtattgaagatgaagctatggcttcttctggacagattgatttattagagcgtcttaaagagcttaacttagatagcagtaatttccctggaatcaggaatctctctgggatcaccatttcatcttacacctgatcaagaagaaaaaccctttacaagtaataaaggcccacgaattctaaaaccaggggagaaaagtacattggaaactaaaaagatagaatctgaaagtaaaggaatcaaaggaggaaaaaaagtttataaaagtttgattactggaaaagttcgatctaattcagaaatttcaggccaaatgaaacagccccttcaagcaaacatgccttcaatctctcgaggcaggacaatgattcatattccaggagttcgaaatagctcctcaagtacaagtcctgtttctaaaaaaggcccaccccttaagactccagcctccaaaagccctagtgaaggtcaaacagccaccacttctcctagaggagccaagccatctgtgaaatcagaattaagccctgttgccaggcagacatcccaaataggtgggtcaagtaaagcaccttctagatcaggatctagagattcgaccccttcaagacctgcccagcaaccattaagtagacctatacagtctcctggccgaaactcaatttcccctggtagaaatggaataagtcctcctaacaaattatctcaacttccaaggacatcatcccctagtactgcttcaactaagtcctcaggttctggaaaaatgtcatatacatctccaggtagacagatgagccaacagaaccttaccaaacaaacaggtttatccaagaatgccagtagtattccaagaagtgagtctgcctccaaaggactaaatcagatgaataatggtaatggagccaataaaaaggtagaactttctagaatgtcttcaactaaatcaagtggaagtgaatctgatagatcagaaagacctgtattagtacgccagtcaactttcatcaaagaagctccaagcccaaccttaagaagaaaattggaggaatctgcttcatttgaatctctttctccatcatctagaccagcttctcccactaggtcccaggcacaaactccagttttaagtccttcccttcctgatatgtctctatccacacattcgtctgttcaggctggtggatggcgaaaactcccacctaatctcagtcccactatagagtataatgatggaagaccagcaaagcgccatgatattgcacggtctcattctgaaagtccttctagacttccaatcaataggtcaggaacctggaaacgtgagcacagcaaacattcatcatcccttcctcgagtaagcacttggagaagaactggaagttcatcttcaattctttctgcttcatcagaatccagtgaaaaagcaaaaagtgaggatgaaaaacatgtgaactctatttcaggaaccaaacaaagtaaagaaaaccaagtatccgcaaaaggaacatggagaaaaataaaagaaaatgaattttctcccacaaatagtacttctcagaccgtttcctcaggtgctacaaatggtgctgaatcaaagactctaatttatcaaatggcacctgctgtttctaaaacagaggatgtttgggtgagaattgaggactgtcccattaacaatcctagatctggaagatctcccacaggtaatactcccccggtgattgacagtgtttcagaaaaggcaaatccaaacattaaagattcaaaagataatcaggcaaaacaaaatgtgggtaatggcagtgttcccatgcgtaccgtgggtttggaaaatcgcctgaactcctttattcaggtggatgcccctgaccaaaaaggaactgagataaaaccaggacaaaataatcctgtccctgtatcagagactaatgaaagttctatagtggaacgtaccccattcagttctagcagctcaagcaaacacagttcacctagtgggactgttgctgccagagtgactccttttaattacaacccaagccctaggaaaagcagcgcagatagcacttcagctcggccatctcagatcccaactccagtgaataacaacacaaagaagcgagattccaaaactgacagcacagaatccagtggaacccaaagtcctaagcgccattctgggtcttaccttgtgacatctgtttaaaagagaggaagaatgaaactaagaaaattctatgttaattacaactgctatatagacattttgtttcaaatgaaactttaaaagactgaaaaattttgtaaataggtttgattcttgttagagggtttttgttctggaagccatatttgatagtatactttgtcttcactggtcttattttgggaggcactcttgatggttaggaaaaaaatagtaaagccaagtatgtttgtacagtatgttttacatgtatttaaagtagcatcccatcccaacttcctttaattattgcttgtcttaaaataatgaacactacagatagaaaatatgatatattgctgttatcaatcatttctagattataaactgactaaacttacatcagggaaaaattggtatttatgcaaaaaaaaatgtttttgtccttgtgagtccatctaacatcataattaatcatgtggctgtgaaattcacagtaatatggttcccgatgaacaagtttacccagcctgctttgctttactgcatgaatgaaactgatggttcaatttcagaagtaatgattaacagttatgtggtcacatgatgtgcatagagatagctacagtgtaataatttacactattttgtgctccaaacaaaacaaaaatctgtgtaactgtaaaacattgaatgaaactattttacctgaactagattttatctgaaagtaggtagaatttttgctatgctgtaatttgttgtatattctggtatttgaggtgagatggctgctcttttattaatgagacatgaattgtgtctcaacagaaactaaatgaacatttcagaataaattattgctgtatgtaaactgttactgaaattggtatttgtttgaagggtcttgtttcacatttgtattaataattgtttaaaatgcctcttttaaaagcttatataaatttttttcttcagcttctatgcattaagagtaaaattcctcttactgtaataaaaacaattgaagaagactgttgccactt

SEQ ID NO: 3550 - protein, 97 aa, Homo sapiens; identical to SEQ ID NO: 3542

SEQ ID NO: 3551 - DNA, 8192 bp, Homo sapiens
aggtgctgccggactcggaaatggggacacatgcattggtggccaaaagagagaggagacaaaaccgctgcagatggctgatgtgaatctagtggaaagagctactggggatgagagaaagaggaggaggcaggtccaagggtagccaaggatggctgcagcttcatatgatcagttgttaaagcaagttgaggcactgaagatggagaactcaaatcttcgacaagagctagaagataattccaatcatcttacaaaactggaaactgaggcatctaatatgaaggaagtacttaaacaactacaaggaagtattgaagatgaagctatggcttcttctggacagattgatttattagagcgtcttaaagagcttaacttagatagcagtaatttccctggagtaaaactgcggtcaaaaatgtccctccgttcttatggaagccgggaaggatctgtatcaagccgttctggagagtgcagtcctgttcctatgggttcatttccaagaagagggtttgtaaatggaagcagagaaagtactggatatttagaagaacttgagaaagagaggtcattgcttcttgctgatcttgacaaagaagaaaaggaaaaagactggtattacgctcaacttcagaatctcactaaaagaatagatagtcttcctttaactgaaaatttttccttacaaacagatatgaccagaaggcaattggaatatgaagcaaggcaaatcagagttgcgatggaagaacaactaggtacctgccaggatatggaaaaacgagcacagcgaagaatagccagaattcagcaaatcgaaaaggacatacttcgtatacgacagcttttacagtcccaagcaacagaagcagagaggtcatctcagaacaagcatgaaaccggctcacatgatgctgagcggcagaatgaaggtcaaggagtgggagaaatcaacatggcaacttctggtaatggtcagggttcaactacacgaatggaccatgaaacagccagtgttttgagttctagtagcacacactctgcacctcgaaggctgacaagtcatctgggaaccaaggtggaaatggtgtattcattgttgtcaatgcttggtactcatgataaggatgatatgtcgcgaactttgctagctatgtctagctcccaagacagctgtatatccatgcgacagtctggatgtcttcctctcctcatccagcttttacatggcaatgacaaagactctgtattgttgggaaattcccggggcagtaaagaggctcgggccagggccagtgcagcactccacaacatcattcactcacagcctgatgacaagagaggcaggcgtgaaatccgagtccttcatcttttggaacagatacgcgcttactgtgaaacctgttgggagtggcaggaagctcatgaaccaggcatggaccaggacaaaaatccaatgccagctcctgttgaacatcagatctgtcctgctgtgtgtgttctaatgaaactttcatttgatgaagagcatagacatgcaatgaatgaactagggggactacaggccattgcagaattattgcaagtggactgtgaaatgtatgggcttactaatgaccactacagtattacactaagacgatatgctggaatggctttgacaaacttgacttttggagatgtagccaacaaggctacgctatgctctatgaaaggctgcatgagagcacttgtggcccaactaaaatctgaaagtgaagacttacagcaggttattgcgagtgttttgaggaatttgtcttggcgagcagatgtaaatagtaaaaagacgttgcgagaagttggaagtgtgaaagcattgatggaatgtgctttagaagttaaaaaggaatcaaccctcaaaagcgtattgagtgccttatggaatttgtcagcacattgcactgagaataaagctgatatatgtgctgtagatggtgcacttgcatttttggttggcactcttacttaccggagccagacaaacactttagccattattgaaagtggaggtgggatattacggaatgtgtccagcttgatagctacaaatgaggaccacaggcaaatcctaagagagaacaactgtctacaaactttattacaacacttaaaatctcatagtttgacaatagtcagtaatgcatgtggaactttgtggaatctctcagcaagaaatcctaaagaccaggaagcattatgggacatgggggcagttagcatgctcaagaacctcattcattcaaagcacaaaatgattgctatgggaagtgctgcagctttaaggaatctcatggcaaataggcctgcgaagtacaaggatgccaatattatgtctcctggctcaagcttgccatctcttcatgttaggaaacaaaaagccctagaagcagaattagatgctcagcacttatcagaaacttttgacaatatagacaatttaagtcccaaggcatctcatcgtagtaagcagagacacaagcaaagtctctatggtgattatgtttttgacaccaatcgacatgatgataataggtcagacaattttaatactggcaacatgactgtcctttcaccatatttgaatactacagtgttacccagctcctcttcatcaagaggaagcttagatagttctcgttctgaaaaagatagaagtttggagagagaacgcggaattggtctaggcaactaccatccagcaacagaaaatccaggaacttcttcaaagcgaggtttgcagatctccaccactgcagcccagattgccaaagtcatggaagaagtgtcagccattcatacctctcaggaagacagaagttctgggtctaccactgaattacattgtgtgacagatgagagaaatgcacttagaagaagctctgctgcccatacacattcaaacacttacaatttcactaagtcggaaaattcaaataggacatgttctatgccttatgccaaattagaatacaagagatcttcaaatgatagtttaaatagtgtcagtagtagtgatggttatggtaaaagaggtcaaatgaaaccctcgattgaatcctattctgaagatgatgaaagtaagttttgcagttatggtcaatacccagccgacctagcccataaaatacatagtgcaaatcatatggatgataatgatggagaactagatacaccaataaattatagtcttaaatattcagatgagcagttgaactctggaaggcaaagtccttcacagaatgaaagatgggcaagacccaaacacataatagaagatgaaataaaacaaagtgagcaaagacaatcaaggaatcaaagtacaacttatcctgtttatactgagagcactgatgataaacacctcaagttccaaccacattttggacagcaggaatgtgtttctccatacaggtcacggggagccaatggttcagaaacaaatcgagtgggttctaatcatggaattaatcaaaatgtaagccagtctttgtgtcaagaagatgactatgaagatgataagcctaccaattatagtgaacgttactctgaagaagaacagcatgaagaagaagagagaccaacaaattatagcataaaatataatgaagagaaacgtcatgtggatcagcctattgattatagtttaaaatatgccacagatattccttcatcacagaaacagtcattttcattctcaaagagttcatctggacaaagcagtaaaaccgaacatatgtcttcaagcagtgagaatacgtccacaccttcatctaatgccaagaggcagaatcagctccatccaagttctgcacagagtagaagtggtcagcctcaaaaggctgccacttgcaaagtttcttctattaaccaagaaacaatacagacttattgtgtagaagatactccaatatgtttttcaagatgtagttcattatcatctttgtcatcagctgaagatgaaataggatgtaatcagacgacacaggaagcagattctgctaataccctgcaaatagcagaaataaaagaaaagattggaactaggtcagctgaagatcctgtgagcgaagttccagcagtgtcacagcaccctagaaccaaatccagcagactgcagggttctagtttatcttcagaatcagccaggcacaaagctgttgaattttcttcaggagcgaaatctccctccaaaagtggtgctcagacacccaaaagtccacctgaacactatgttcaggagaccccactcatgtttagcagatgtacttctgtcagttcacttgatagttttgagagtcgttcgattgccagctccgttcagagtgaaccatgcagtggaatggtaagtggcattataagccccagtgatcttccagatagccctggacaaaccatgccaccaagcagaagtaaaacacctccaccacctcctcaaacagctcaaaccaagcgagaagtacctaaaaataaagcacctactgctgaaaagagagagagtggacctaagcaagctgcagtaaatgctgcagttcagagggtccaggttcttccagatgctgatactttattacattttgccacggaaagtactccagatggattttcttgttcatccagcctgagtgctctgagcctcgatgagccatttatacagaaagatgtggaattaagaataatgcctccagttcaggaaaatgacaatgggaatgaaacagaatcagagcagcctaaagaatcaaatgaaaaccaagagaaagaggcagaaaaaactattgattctgaaaaggacctattagatgattcagatgatgatgatattgaaatactagaagaatgtattatttctgccatgccaacaaagtcatcacgtaaagcaaaaaagccagcccagactgcttcaaaattacctccacctgtggcaaggaaaccaagtcagctgcctgtgtacaaacttctaccatcacaaaacaggttgcaaccccaaaagcatgttagttttacaccgggggatgatatgccacgggtgtattgtgttgaagggacacctataaacttttccacagctacatctctaagtgatctaacaatcgaatcccctccaaatgagttagctgctggagaaggagttagaggaggggcacagtcaggtgaatttgaaaaacgagataccattcctacagaaggcagaagtacagatgaggctcaaggaggaaaaacctcatctgtaaccatacctgaattggatgacaataaagcagaggaaggtgatattcttgcagaatgcattaattctgctatgcccaaagggaaaagtcacaagcctttccgtgtgaaaaagataatggaccaggtccagcaagcatctgcgtcttcttctgcacccaacaaaaatcagttagatggtaagaaaaagaaaccaacttcaccagtaaaacctataccacaaaatactgaatataggacacgtgtaagaaaaaatgcagactcaaaaaataatttaaatgctgagagagttttctcagacaacaaagattcaaagaaacagaatttgaaaaataattccaaggtcttcaatgataagctcccaaataatgaagatagagtcagaggaagttttgcttttgattcacctcatcattacacgcctattgaaggaactccttactgtttttcacgaaatgattctttgagttctctagattttgatgatgatgatgttgacctttccagggaaaaggctgaattaagaaaggcaaaagaaaataaggaatcagaggctaaagttaccagccacacagaactaacctccaaccaacaatcagctaataagacacaagctattgcaaagcagccaataaatcgaggtcagcctaaacccatacttcagaaacaatccacttttccccagtcatccaaagacataccagacagaggggcagcaactgatgaaaagttacagaattttgctattgaaaatactccggtttgcttttctcataattcctctctgagttctctcagtgacattgaccaagaaaacaacaataaagaaaatgaacctatcaaagagactgagccccctgactcacagggagaaccaagtaaacctcaagcatcaggctatgctcctaaatcatttcatgttgaagataccccagtttgtttctcaagaaacagttctctcagttctcttagtattgactctgaagatgacctgttgcaggaatgtataagctccgcaatgccaaaaaagaaaaagccttcaagactcaagggtgataatgaaaaacatagtcccagaaatatgggtggcatattaggtgaagatctgacacttgatttgaaagatatacagagaccagattcagaacatggtctatcccctgattcagaaaattttgattggaaagctattcaggaaggtgcaaattccatagtaagtagtttacatcaagctgctgctgctgcatgtttatctagacaagcttcgtctgattcagattccatcctttccctgaaatcaggaatctctctgggatcaccatttcatcttacacctgatcaagaagaaaaaccctttacaagtaataaaggcccacgaattctaaaaccaggggagaaaagtacattggaaactaaaaagatagaatctgaaagtaaaggaatcaaaggaggaaaaaaagtttataaaagtttgattactggaaaagttcgatctaattcagaaatttcaggccaaatgaaacagccccttcaagcaaacatgccttcaatctctcgaggcaggacaatgattcatattccaggagttcgaaatagctcctcaagtacaagtcctgtttctaaaaaaggcccaccccttaagactccagcctccaaaagccctagtgaaggtcaaacagccaccacttctcctagaggagccaagccatctgtgaaatcagaattaagccctgttgccaggcagacatcccaaataggtgggtcaagtaaagcaccttctagatcaggatctagagattcgaccccttcaagacctgcccagcaaccattaagtagacctatacagtctcctggccgaaactcaatttcccctggtagaaatggaataagtcctcctaacaaattatctcaacttccaaggacatcatcccctagtactgcttcaactaagtcctcaggttctggaaaaatgtcatatacatctccaggtagacagatgagccaacagaaccttaccaaacaaacaggtttatccaagaatgccagtagtattccaagaagtgagtctgcctccaaaggactaaatcagatgaataatggtaatggagccaataaaaaggtagaactttctagaatgtcttcaactaaatcaagtggaagtgaatctgatagatcagaaagacctgtattagtacgccagtcaactttcatcaaagaagctccaagcccaaccttaagaagaaaattggaggaatctgcttcatttgaatctctttctccatcatctagaccagcttctcccactaggtcccaggcacaaactccagttttaagtccttcccttcctgatatgtctctatccacacattcgtctgttcaggctggtggatggcgaaaactcccacctaatctcagtcccactatagagtataatgatggaagaccagcaaagcgccatgatattgcacggtctcattctgaaagtccttctagacttccaatcaataggtcaggaacctggaaacgtgagcacagcaaacattcatcatcccttcctcgagtaagcacttggagaagaactggaagttcatcttcaattctttctgcttcatcagaatccagtgaaaaagcaaaaagtgaggatgaaaaacatgtgaactctatttcaggaaccaaacaaagtaaagaaaaccaagtatccgcaaaaggaacatggagaaaaataaaagaaaatgaattttctcccacaaatagtacttctcagaccgtttcctcaggtgctacaaatggtgctgaatcaaagactctaatttatcaaatggcacctgctgtttctaaaacagaggatgtttgggtgagaattgaggactgtcccattaacaatcctagatctggaagatctcccacaggtaatactcccc

SEQ ID NO: 3552 - protein, 2843 aa, Homo sapiens; identical to SEQ ID NO: 384

SEQ ID NO: 3553 - DNA, 8192 bp, Homo sapiens; identical to SEQ ID NO: 3551

SEQ ID NO: 3554 - protein, 2843 aa, Homo sapiens; identical to SEQ ID NO: 384

SEQ ID NO: 3555 - DNA, 1196 bp, Homo sapiens
tgacaaacttgacttttggagatgtagccaacaaggctacgctatgctctatgaaaggctgcatgagagcacttgtggcccaactaaaatctgaaagtgaagacttacagcaggttattgcgagtgttttgaggaatttgtcttggcgagcagatgtaaatagtaaaaagacgttgcgagaagttggaagtgtgaaagcattgatggaatgtgctttagaagttaaaaaggtacctttgaaaacatttagtactataatatgaatttcatgtttggcttttttttgctgccttcttttagccatgagatttcctaatttcttacctgtgtattattcagtactataatatgaatttcatgtttagctttttttgctgccttcttttagccatgagattccctaatttcttttttgagatggggtctctttctctcgcccaggctggagtgcagtggtctgatcttggctcactgcaacctccgtctcccatgttcaagtgattctcctgcctcagcctcctgagtagctgggattacagtgcacgccaccactcccggctatttgtatttttagtagagatggggtttcaccatgttggtaaggctggtctcgaactactcctgactttgtgatctgcccaactcggcctcccaaagtgctgggattataggcgcaagccatcacgcccagcctagattccctaatttcttacctgtttatctcaccagtccatagttttagagtaccgcaaactcctaaagtactaaggtagaaaagattatataaggggatttaatgtatatcagggtttctctgcctcagcactatagacatttttgaccagataattcttcgttttgctggggctgacctgtgcactgtagattgtttagcagcatccctggcctttgccaactggctgccagtataccctccccctagttatgccgatcaaaattgtctccagatactgtcagatgtctgtgggagggaggaaggacaacgtcaccaccaattaagaatcactggtataagtgtacctttgtgctctccaaacctcaatcccctcaaattttgatggtcaacttatcaagaggtgatcagagccaagggtgaggaatcatcaaataataatttgtttacagaaggaaatatctccaggcagtccatctgcttcagaaactaggctaaattt

SEQ ID NO: 3556 - protein, 70 aa, Homo sapiens
MKGCMRALVAQLKSESEDLQQVIASVLRNLSWRADVNSKKTLREVGSVKALMECALEVKKVPLKTFSTII

SEQ ID NO: 3557 - DNA, 1020 bp, Homo sapiens
tgacaaacttgacttttggagatgtagccaacaaggctacgctatgctctatgaaaggctgcatgagagcacttgtggcccaactaaaatctgaaagtgaagacttacagcaggttattgcgagtgttttgaggaatttgtcttggcgagcagatgtaaatagtaaaaagacgttgcgagaagttggaagtgtgaaagcattgatggaatgtgctttagaagttaaaaagatggctctacaaaaacaattccatggtttatttgtatctatcctgcttatttaaataataagaagaccatcgcagagggaaggcgaatccccataagtaaggctgttgaaaatcctacagctacagagattcaagatgtatgttcagcagttggacttaacgtatttcttgagaaaaataaaatgtactctagagaatggaatcgtgatgtccaatacagaggcagagtccgggtccagctcaaacaggaagatgggagcctctgccttgtacagttcccatcacgtaagtcagtaatgttgtatgcagcagaaatgatacctaaactaaaaacaaggacacaaaaaacaggaggtgctgaccaaagtcttcaacaaggagagggaagtaaaaaagggaaaggaaagaaaaagaagtaacctagtatcagcatcaagtatgtggtactactgtaagagacatgaatggagacttctaatttgtatcggagggaaacagaagctttttgtttgcatcatttaactgaactgtgaacccttgtgcctctcatctttatcatcggagttgacagtgaaacaaatttacatcagaagtttgcatctcgcgtatatgccgtataaaagaatttttttgtctttcaatgcagttttttggaagaaaatatttttaaatggacaatggactgtacaataagttacttgaaataagttgtttcagataaatttcaattagatttaaaataaacattttgtccaccttttaagttaatgaaataaaatttgaaactgac

SEQ ID NO: 3558 - protein, 78 aa, Homo sapiens
MYSREWNRDVQYRGRVRVQLKQEDGSLCLVQFPSRKSVMLYAAEMIPKLKTRTQKTGGADQSLQQGEGSKKGKGKKKK

SEQ ID NO: 3559 - DNA, 2770 bp, Homo sapiens
tgacaaacttgacttttggagatgtagccaacaaggctacgctatgctctatgaaaggctgcatgagagcacttgtggcccaactaaaatctgaaagtgaagacttacagcaggttattgcgagtgttttgaggaatttgtcttggcgagcagatgtaaatagtaaaaagacgttgcgagaagttggaagtgtgaaagcattgatggaatgtgctttagaagttaaaaagatggctctacaaaaacaattccatggtttatttgtatctatcctgcttatttaaataataagaagaccatcgcagagggaaggcgaatccccataagtaaggctgttgaaaatcctacagctacagagattcaagatgtatgttcagcagttggacttaacgtatttcttgagaaaaataaaatgtactctagagaatggaatcgtgatgtccaatacagaggcagagtccgggtccagctcaaacaggaagatgggagcctctgccttgtacagttcccatcacgtaagtcagtaatgttgtatgcagcagaaatgatacctaaactaaaaacaaggacacaaaaaacaggaggtgctgaccaaagtcttcaacaaggagagggaagtaaaaaagggaaaggaaagaaaaagaagtaacctagtatcagcatcaagtatgtggtactactgtaagagacatgaatggagacttctaatttgtatcggagggaaacagaagctttttgtttgcatcatttaactgaactgtgaacccttgtgcctctcatctttatcatcggagttgacagtgaaacaaatttacatcagaagtttgcatctcgcgtatatgccgtataaaagaatttttttgtctttcaatgcagttttttggaagaaaatatttttaaatggacaatggactgtacaataagttacttgaaataagttgtttcagataaatttcaattagatttaaaataaacattttgtccaccttttaagttaatgaaataaaatttgaaactgacttttgcagcttttgcttatatactaatgctaggagaggagggataattaagaataaaatatgtagtgaaagtttccatagtgtgaggctaaaactagaagaaactgtggtaggtccttttgtgggtgggggacaggggagtctgtaaaaagccagtctgtagatgatattttaatatattattgtaatcgaatcgttcagttgttttttgacatggaaagtcctggattttaagctttaaatttgcttattttgtaggtttaagaacatgattttcatgggagttgtaaaattaactgtgctttagcaccttgaggtacactttccttcaacaaatgaaattggattggtgctccagaatttcagagcggtttctgaaagtagtgattttgagctatcccaattcctgttcttcctgaggcctggtttagctcttccttgaattctgcaagctatctcatattttcagtaaattccattttttttaagtttgtttgtttgtttgtttttgagatggagtttcactcttgttgcctaggctggagtgcaatggcacgatatcggcgtaccacaacctctgcatcccaggttcaagagattctcctgcctcagcctccctaggagctgggattacaggcatgtgccaccacacccggctaattttgtatttttagtagagacagggtttttccatgttggtcaggctggtctcgaactcccgacctcaggtgatctgcccacctcagcctcccaaagtgctgggattacaggcatgagccaccgtgcccggccttctttacatttttattgctcacagtcaaacattcctattgattgtaaaataagcaaacctagagttgtggagatttatatgtatttatttatttgaattgagacagggtcttaaactcccaggctcaagtgatcctcctgcctcaacctcccaaagtgctgggattacaggcatgagctagctggcctgttgactttttttttttaactctaacaatttctgttttatagtgaacataatagtataagacttagtttatatatttgacttacaaataaatcctggggagaggggagtatgtgtaaaacataattcagagcagccttctttgagaaagtgggtgtgtttggctgtgtaacaaaacaataaggggatgtgtttgctgtgtaacaaaacaatgaaggatttaagcaggatatttttgcctcatatgttaaatccaagtgaggttgctgtggtggttggtttagctctcagtgatgccttttttgtatttttccgctctgctgtccatgacatatttctaacacctttatgattattgttcctgcttgtaaaagggctgatatttacatgagtgcaaggcaggaagaaaaggtagctgtgccagccacttctggcaagcagttctcccaccttagcctcccaagtagctgagaccataggcatgagatttctcaaaattcctcccagcaggctttcacttagtttcattgttgagaactgtgacaggtccatctctagctgcaaaggaggctgagaaagtgaacacagcagtcctccttatccttggggaatacattccaagagtggatccctgaaacagcagatagtactgaaccctatatatactatgtttttgcctatgtatatatacttgatatggtttggctgctacccaacccaaaatctcatcttgaattataatccccaaatccctatgtgttaagggtgggac

SEQ ID NO: 3560 - protein, 78 aa, Homo sapiens; identical to SEQ ID NO: 3558

SEQ ID NO: 3561 - DNA, 373 bp, Homo sapiens
gaggaatttgtcttggcgagcagatgtaaatagtaaaaagacgttgcgagaagttggaagtgtgaaagcattgatggaatgtgctttagaagttaaaaagatggagtcttgctctgctgccaggctggagtgcagtggcaggatctcggctaactgcaacctccaactccctggttcaagcgattatcctgcctcagcctcccaagtagctgggattataggcatgcgccaccatgcccagctagtttttgtatttttagtagagacggggtttcaccatgttggccaggatggtcttcatctcctgacctcatgacccgcctgccttggccttccaaagtgctgggattacaggcatgatataatgcatggt

SEQ ID NO: 3562 - protein, 80 aa, Homo sapiens
MECALEVKKMESCSAARLECSGRISANCNLQLPGSSDYPASASQVAGIIGMRHHAQLVFVFLVETGFHHVGQDGLHLLTS

SEQ ID NO: 3563 - DNA, 574 bp, Homo sapiens
attcaaagcacaaaatgattgctatgggaagtgctgcagctttaaggaatctcatggcaaataggcctgcgaagtacaaggatgccaatattatgtctcctggctcaagcttgccatctcttcatgttaggaaacaaaaagccctagaagcagaattagatgctcagcacttatcagaaacttttgacaatatagacaatttaagtcccaaggcatctcatcgtagtaagcagagacacaagcaaagtctctatggtgattatgtttttgacaccaatcgacatgatgataataggtcagacaattttaatactggcaacatgactgtcctttcaccatatttgaatactacagtgttacccagctcctcttcatcaagaggaagcttagatagttctcgttctgaaaaagatagaaaagaagctctgctgcccatacacattcaaacacttacaatttcactaagtcggaaaattcaaataggacatgttctatgccttatgccaaattagaatacaagagatcttcaaatgatagtttaaatagtgtcagtagtagtgatggttatggtaaa

SEQ ID NO: 3564 - protein, 165 aa, Homo sapiens
MIAMGSAAALRNLMANRPAKYKDANIMSPGSSLPSLHVRKQKALEAELDAQHLSETFDNIDNLSPKASHRSKQRHKQSLYGDYVFDTNRHDDNRSDNFNTGNMTVLSPYLNTTVLPSSSSSRGSLDSSRSEKDRKEALLPIHIQTLTISLSRKIQIGHVLCLMPN

SEQ ID NO: 3565 - DNA, 4104 bp, Homo sapiens
acaagcaataattaaaggaagttgggatgggatgctactttaaatacatgtaaaacatactgtacaaacatacttggctttactatttttttcctaaccatcaagagtgcctcccaaaataagaccagtgaagacaaagtatactatcaaatatggcttccagaacaaaaaccctctaacaagaatcaaacctatttacaaaaattttcttagtttcattcttcctctcttttaaacagatgtcacaaggtaagacccagaatggcgcttaggactttgggttccactggattctgtgctgtcagttttggaatctcgcttctttgtgttgttattcactggagttgggatctgagatggccgagctgaagtgctatctgcgctgcttttcctagggcttgggttgtaattaaaaggagtcactctggcagcaacagtcccactaggtgaactgtgtttgcttgagctgctagaactgaatggggtacgttccactatagaactttcattagtctctgatacagggacaggattattttgtcctggttttatctcagttcctttttggtcaggggcatccacctgaataaaggagttcaggcgattttccaaacccacggtacgcatgggaacactgccattacccacattttgttttgcctgattatcttttgaatctttaatgtttggatttgccttttctgaaacactgtcaatcaccgggggagtattacctgtgggagatcttccagatctaggattgttaatgggacagtcctcaattctcacccaaacatcctctgttttagaaacagcaggtgccatttgataaattagagtctttgattcagcaccatttgtagcacctgaggaaacggtctgagaagtactatttgtgggagaaaattcattttcttttatttttctccatgttccttttgcggatacttggttttctttactttgtttggttcctgaaatagagttcacatgtttttcatcctcactttttgctttttcactggattctgatgaagcagaaagaattgaagatgaacttccagttcttctccaagtgcttactcgaggaagggatgatgaatgtttgctgtgctcacgtttccaggttcctgacctattgattggaagtctagaaggactttcagaatgagaccgtgcaatatcatggcgctttgctggtcttccatcattatactctatagtgggactgagattaggtgggagttttcgccatccaccagcctgaacagacgaatgtgtggatagagacatatcaggaagggaaggacttaaaactggagtttgtgcctgggacctagtgggagaagctggtctagatgatggagaaagagattcaaatgaagcagattcctccaattttcttcttaaggttgggcttggagcttctttgatgaaagttgactggcgtactaatacaggtctttctgatctatcagattcacttccacttgatttagttgaagacattctagaaagttctacctttttattggctccattaccattattcatctgatttagtcctttggaggcagactcacttcttggaatactactggcattcttggataaacctgtttgtttggtaaggttctgttggctcatctgtctacctggagatgtatatgacatttttccagaacctgaggacttagttgaagcagtactaggggatgatgtccttggaagttgagataatttgttaggaggacttattccatttctaccaggggaaattgagtttcggccaggagactgtataggtctacttaatggttgctgggcaggtcttgaaggggtcgaatctctagatcctgatctagaaggtgctttacttgacccacctatttgggatgtctgcctggcaacagggcttaattctgatttcacagatggcttggctcctctaggagaagtggtggctgtttgaccttcactagggcttttggaggctggagtcttaaggggtgggccttttttagaaacaggacttgtacttgaggagctatttcgaactcctggaatatgaatcattgtcctgcctcgagagattgaaggcatgtttgcttgaaggggctgtttcatttggcctgaaatttctgaattagatcgaacttttccagtaatcaaacttttataaactttttttcctcctttgattcctttactttcagattctatctttttagtttccaatgtacttttctcccctggttttagaattcgtgggcctttattacttgtaaagggtttttcttcttgatcaggtgtaagatgaaatggtgatcccagagagattcctgatttcagggaaaggatggaatctgaatcagacgaagcttgtctagataaacatgcagcagcagcagcttgatgtaaactacttactatggaatttgcaccttcctgaatagctttccaatcaaaattttctgaatcaggggatagaccatgttctgaatctggtctctgtatatctttcaaatcaagtgtcagatcttcacctaatatgccacccatatttctgggactatgtttttcattatcacccttgagtcttgaaggctttttcttttttggcattgcggagcttatacattcctgcaacaggtcatcttcagagtcaatactaagagaactgagagaactgtttcttgagaaacaaactggggtatcttcaacatgaaatgatttaggagcatagcctgatgcttgaggtttacttggttctccctgtgagtcagggggctcagtctctttgataggttcattttctttattgttgttttcttggtcaatgtcactgagagaactcagagaggaattatgagaaaagcaaaccggagtattttcaatagcaaaattctgtaacttttcatcagttgctgcccctctgtctggtatgtctttggatgactggggaaaagtggattgtttctgaagtatgggtttaggctgacctcgatttattggctgctttgcaatagcttgtgtcttattagctgattgttggttggaggttagttctgtgtggctggtaactttagcctctgattccttattttcttttgcctttcttaattcagccttttccctggaaaggtcaacatcatcatcatcaaaatctagagaactcaaagaatcatttcgtgaaaaacagtaaggagttccttcaataggcgtgtaatgatgaggtgaatcaaaagcaaaacttcctctgactctatcttcattatttgggagcttatcattgaagaccttggaattatttttcaaattctgtttctttgaatctttgttgtctgagaaaactctctcagcatttaaattattttttgagtctgcattttttcttacacgtgtcctatattcagtattttgtggtataggttttactggtgaagttggtttctttttcttaccatctaactgatttttgttgggtgcagaagaagacgcagatgcttgctggacctggtccattatctttttcacacggaaaggcttgtgacttttccctttgggcatagcagaattaatgcattctgcaagaatatcaccttcctctgctttattgtcatccaattcaggtatggttacagatgaggtttttcctccttgagcctcatctgtacttctgccttctgtaggaatggtatctcgtttttcaaattcacctgactgtgcccctcctctaactccttctccagcagctaactcatttggaggggattcgattgttagatcacttagagatgtagctgtggaaaagtttataggtgtcccttcaacacaatacacccgtggcatatcatcccccggtgtaaaactaacatgcttttggggttgcaacctgttttgtgatggtagaagtttgtacacaggcagctgacttggtttccttgccacaggtggaggtaattttgaagcagtctgggctggcttttttgctttacgtgatgactttgttggcatggcagaaataatacattcttctagtatttcaatatcatcatcatctgaatcatctaataggtccttttcagaatcaatagttttttc

SEQ ID NO: 3566 - protein, 79 aa, Homo sapiens
MVSRFSNSPDCAPPLTPSPAANSFGGDSIVRSLRDVAVEKFIGVPSTQYTRGISSPGVKLTCFWGCNLFCDGRSLYTGS

SEQ ID NO: 3567 - DNA, 907 bp, Homo sapiens
ggcggaaaagcgggctgtctcggaaactcagagccgggttcctcccgggtttctgccgggtttctccctgcggctcctgggttgttgagactcttgtgaagatggcttgcgctgccgcgcggtccccggccgaccaggacaggtttatttgtatctatcctgcttatttaaataataagaagaccatcgcagagggaaggcgaatccccataagtaaggctgttgaaaatcctacagctacagagattcaagatgtatgttcagcagttggacttaacgtatttcttgagaaaaataaaatgtactctagagaatggaatcgtgatgtccaatacagaggcagagtccgggtccagctcaaacaggaagatgggagcctctgccttgtacagttcccatcacgtaagtcagtaatgttgtatgcagcagaaatgatacctaaactaaaaacaaggacacaaaaaacaggaggtgctgaccaaagtcttcaacaaggagagggaagtaaaaaagggaaaggaaagaaaaagaagtaacctagtatcagcatcaagtatgtggtactactgtaagagacatgaatggagacttctaatttgtatcggagggaaacagaagctttttgtttgcatcatttaactgaactgtgaacccttgtgcctctcatctttatcatcggagttgacagtgaaacaaatttacatcagaagtttgcatctcgcgtatatgccgtataaaagaatttttttgtctttcaatgcagttttttggaagaaaatatttttaaatggacaatggactgtacaataagttacttgaaataagttgtttcagataaatttcaattagatttaaaataaacattttgtccaccttttaagttaatgaaataaaatttgaaactgac

SEQ ID NO: 3568 - protein, 144 aa, Homo sapiens; identical to SEQ ID NO: 386

SEQ ID NO: 3569 - DNA, 2657 bp, Homo sapiens
ggcggaaaagcgggctgtctcggaaactcagagccgggttcctcccgggtttctgccgggtttctccctgcggctcctgggttgttgagactcttgtgaagatggcttgcgctgccgcgcggtccccggccgaccaggacaggtttatttgtatctatcctgcttatttaaataataagaagaccatcgcagagggaaggcgaatccccataagtaaggctgttgaaaatcctacagctacagagattcaagatgtatgttcagcagttggacttaacgtatttcttgagaaaaataaaatgtactctagagaatggaatcgtgatgtccaatacagaggcagagtccgggtccagctcaaacaggaagatgggagcctctgccttgtacagttcccatcacgtaagtcagtaatgttgtatgcagcagaaatgatacctaaactaaaaacaaggacacaaaaaacaggaggtgctgaccaaagtcttcaacaaggagagggaagtaaaaaagggaaaggaaagaaaaagaagtaacctagtatcagcatcaagtatgtggtactactgtaagagacatgaatggagacttctaatttgtatcggagggaaacagaagctttttgtttgcatcatttaactgaactgtgaacccttgtgcctctcatctttatcatcggagttgacagtgaaacaaatttacatcagaagtttgcatctcgcgtatatgccgtataaaagaatttttttgtctttcaatgcagttttttggaagaaaatatttttaaatggacaatggactgtacaataagttacttgaaataagttgtttcagataaatttcaattagatttaaaataaacattttgtccaccttttaagttaatgaaataaaatttgaaactgacttttgcagcttttgcttatatactaatgctaggagaggagggataattaagaataaaatatgtagtgaaagtttccatagtgtgaggctaaaactagaagaaactgtggtaggtccttttgtgggtgggggacaggggagtctgtaaaaagccagtctgtagatgatattttaatatattattgtaatcgaatcgttcagttgttttttgacatggaaagtcctggattttaagctttaaatttgcttattttgtaggtttaagaacatgattttcatgggagttgtaaaattaactgtgctttagcaccttgaggtacactttccttcaacaaatgaaattggattggtgctccagaatttcagagcggtttctgaaagtagtgattttgagctatcccaattcctgttcttcctgaggcctggtttagctcttccttgaattctgcaagctatctcatattttcagtaaattccattttttttaagtttgtttgtttgtttgtttttgagatggagtttcactcttgttgcctaggctggagtgcaatggcacgatatcggcgtaccacaacctctgcatcccaggttcaagagattctcctgcctcagcctccctaggagctgggattacaggcatgtgccaccacacccggctaattttgtatttttagtagagacagggtttttccatgttggtcaggctggtctcgaactcccgacctcaggtgatctgcccacctcagcctcccaaagtgctgggattacaggcatgagccaccgtgcccggccttctttacatttttattgctcacagtcaaacattcctattgattgtaaaataagcaaacctagagttgtggagatttatatgtatttatttatttgaattgagacagggtcttaaactcccaggctcaagtgatcctcctgcctcaacctcccaaagtgctgggattacaggcatgagctagctggcctgttgactttttttttttaactctaacaatttctgttttatagtgaacataatagtataagacttagtttatatatttgacttacaaataaatcctggggagaggggagtatgtgtaaaacataattcagagcagccttctttgagaaagtgggtgtgtttggctgtgtaacaaaacaataaggggatgtgtttgctgtgtaacaaaacaatgaaggatttaagcaggatatttttgcctcatatgttaaatccaagtgaggttgctgtggtggttggtttagctctcagtgatgccttttttgtatttttccgctctgctgtccatgacatatttctaacacctttatgattattgttcctgcttgtaaaagggctgatatttacatgagtgcaaggcaggaagaaaaggtagctgtgccagccacttctggcaagcagttctcccaccttagcctcccaagtagctgagaccataggcatgagatttctcaaaattcctcccagcaggctttcacttagtttcattgttgagaactgtgacaggtccatctctagctgcaaaggaggctgagaaagtgaacacagcagtcctccttatccttggggaatacattccaagagtggatccctgaaacagcagatagtactgaaccctatatatactatgtttttgcctatgtatatatacttgatatggtttggctgctacccaacccaaaatctcatcttgaattataatccccaaatccctatgtgttaagggtgggac

SEQ ID NO: 3570 - protein, 144 aa, Homo sapiens; identical to SEQ ID NO: 386

SEQ ID NO: 3571 - DNA, 877 bp, Homo sapiens
ggaaaagcgggctgtctcggaaactcagagccgggttcctcccgggtttctgccgggtttctccctgcggctcctgggttgttgagactcttgtgaagatggcttgcgctgccgcgcggtccccggccgaccaggacaggtttatttgtatctatcctgcttatttaaataataagaagaccatcgcagagggaaggcgaatccccataagtaaggctgttgaaaatcctacagctacagagattcaagatgtatgttcagcagttggacttaacgtatttcttgaggtatgacgtggttcttcactattttccatactcatctaattgatgtaataactttcttaagtcctgtttttcttttgtttcgtttatgttagaaaaataaaatgtactctagagaatggaatcgtgatgtccaatacagaggcagagtccgggtccagctcaaacaggaagatgggagcctctgccttgtacagttcccatcacgtaagcttgtttaaatgaatcagtggggctcagggataggtttctcctacacaacacaaaaaaggttctaaaactgaaaggtaaaagtcagaatttgcattctgaagattaatttaaagacaggactactgctcatggagagaagcagtagttctaatttctttgaggtgaatgacctctttgaaaatgtaatgagacccactaaacatttttcaaaaaaattgttgtgtgaacattttataaacctctggaagtctgtcattgctcccaggttaagaatataaaattattaaatcgttggatgttaattgccatttcagatcctagaggtccttgaggtctgttaatatctataatatctaatgattctatcattaataaatctg

SEQ ID NO: 3572 - protein, 64 aa, Homo sapiens
MACAAARSPADQDRFICIYPAYLNNKKTIAEGRRIPISKAVENPTATEIQDVCSAVGLNVFLEV

SEQ ID NO: 3573 - DNA, 1763 bp, Homo sapiens
tcggaaactcagagccgggttcctcccgggtttctgccgggtttctccctgcggctcctgggttgttgagactcttgtgaagatggcttgcgctgccgcgcggtccccggccgaccaggacaggtttatttgtatctatcctgcttatttaaataataagaagaccatcgcagagggaaggcgaatccccataagtaaggctgttgaaaatcctacagctacagagattcaagatgtatgttcagcagttggacttaacgtatttcttgaggttaagaatgtctgaggggtcaggcggtgctggcaagatggctgcacttgagaagatgacgtttcccaagaagatgacatttccagagaaaccaagccacaaaaagtacagggccgccctgaagaaggagaaacgaaagaaacgtcggcaggaacttgctcgactgagagactcaggactctcacaggaggaggaagaggacacttttattgaagaacaacaactagaagaagagaagctattggaaagagagagggaaagattacatgaggagtggttgctgagggagcagaaggcacaagaagaattcagaataaagaaggaaaaggaagaggcggctaaaaaatggctagaagaacaagagagaaagttaaaggaacaatggaaagaacagcagaggaaagagagagaagaggaggagcagaaacaacaggagaagaaagaaaaagaggaagctgtgcagaagatgctggatcaggctgaaaatgatttagaaaatagtaccacatggcaaaacccagaaccacccgtggatttcagagtaatggagaaggatcgagctaattgtcccttctacagtaaaacaggagcttgcagatttggagacagatgttcacgtaaacataatttcccaacatctagtcctacccttcttattaagagcatgtttacaacgtttggaatggagcagtgcaggagggatgactatgaccctgacgcaagcctggagtacagcgaggaagaaacctaccaacagttcctagatttctatgaggatgtgttgcccgagttcaagaacgtggggaaagtgattcagttcaaggtcagctgcaatttggaacctcacctgaggggcaatgtatatgttcagtaccagtcggaagaagaatgccaagcagccctttctctgtttaacggacgatggtatgcaggacgacagctgcaatgtgaattctgcccagtgacccggtggaaaatggcgatttgtggtttatttgaaatacaacaatgtccaagaggaaaacactgcaactttcttcatgtgttcagaaatcccaacaatgaattctgggaagctaatagagacatctacttgtcttcagatcagactggctcctcctttggcaagaactccgagaggagggagaagatgggccaccacgaccactactacagcaggcagcggggaaggagaaaccctagtccagaccacacctacaaaagaaatggggaatccgagagaaaaaagagtagtcatagggggaagaaatctcacaaacgcacatcaaagagtcgggagaggcacaattcaccaagcagaggaagaaataggcaccgcagctgggaccagggccgccggagccagagccgcaggagccaccgcagccggagccaaagttcctctaggtgccgaagtcgtgggaggaggaagtcgggtaatagagacagaactgttcagagtccccaatccaaataaactagttttgttctt

SEQ ID NO: 3574 - protein, 504 aa, Homo sapiens
MYVQQLDLTYFLRLRMSEGSGGAGKMAALEKMTFPKKMTFPEKPSHKKYRAALKKEKRKKRRQELARLRDSGLSQEEEEDTFIEEQQLEEEKLLERERERLHEEWLLREQKAQEEFRIKKEKEEAAKKWLEEQERKLKEQWKEQQRKEREEEEQKQQEKKEKEEAVQKMLDQAENDLENSTTWQNPEPPVDFRVMEKDRANCPFYSKTGACRFGDRCSRKHNFPTSSPTLLIKSMFTTFGMEQCRRDDYDPDASLEYSEEETYQQFLDFYEDVLPEFKNVGKVIQFKVSCNLEPHLRGNVYVQYQSEEECQAALSLFNGRWYAGRQLQCEFCPVTRWKMAICGLFEIQQCPRGKHCNFLHVFRNPNNEFWEANRDIYLSSDQTGSSFGKNSERREKMGHHDHYYSRQRGRRNPSPDHTYKRNGESERKKSSHRGKKSHKRTSKSRERHNSPSRGRNRHRSWDQGRRSQSRRSHRSRSQSSSRCRSRGRRKSGNRDRTVQSPQSK

SEQ ID NO: 3575 - DNA, 1354 bp, Homo sapiens
gagccgggttcctcccgggtttctgccgggtttctccctgcggctcctgggttgttgagactcttgtgaagatggcttgcgctgccgcgcggtccccggccgaccaggacaggtttatttgtatctatcctgcttatttaaataataagaagaccatcgcagagggaaggcgaatccccataagtaaggctgttgaaaatcctacagctacagagattcaagatgtatgttcagcagttggacttaacgtatttcttgagaaaaataaaatgtactctagagaatggaatcgtgatgtccaatacagaggcagagtccgggtccagctcaaacaggaagatgggagcctctgccttgtacagttcccatcacgtaagcttgtttaaatgaatcagtggggctcagggataggtttctcctacacaacacaaaaaaggttctaaaactgaaaggtaaaagtcagaatttgcattctgaagattaatttaaagacaggactactgctcatggagagaagcagtagttctaatttctttgaggtgaatgacctctttgaaaatgtaatgagacccactaaacatttttcaaaaaaattgttgtgtgaacattttataaacctctggaagtctgtcattgctcccaggttaagaatataaaattattaaatcgttggatgttaattgccatttcagatcctagaggtccttgaggtctgttaatatctataatatctaatgattctatcattaataaatctgaaaagcaatattgactgaaaaaagcaagagatatacatagtgtggtaccacttaggtaaatttaaatacaaaatattactatttattgatagatgcatatgtaatgttgcttattggcatttttttgaaatgctctgtaaggaaacactcattcttaagagagtagtcacctaatggtgagcggggtagagagtagagacacgggttgatggtcatagaagactgttgcatcatctctagtgttttattttatgaaaaacaatagcaaaacgacatcaatataacagaatgttctgaatattaggaagataagtttttgtttgcatgttgtttatttttctgaattttcatctctgaaaattttaattttttaaaacagagctattaattttttctttcagtttaataaccccctcagtttaattaaactgtcattaaatttacttaaaaataatgaaatcgtcagacgaactgacagcttgtttgattttttttttttttgagatggagtctcgctctggctggagtacagtggcgcgatctcagctcactgcaacctccgactccctggttcaagcgattctcctgtctcagcc

SEQ ID NO: 3576 - protein, 104 aa, Homo sapiens
MACAAARSPADQDRFICIYPAYLNNKKTIAEGRRIPISKAVENPTATEIQDVCSAVGLNVFLEKNKMYSREWNRDVQYRGRVRVQLKQEDGSLCLVQFPSRKLV

SEQ ID NO: 3577 - DNA, 801 bp, Homo sapiens
gagccgggttcctcccgggtttctgccgggtttctccctgcggctcctgggttgttgagactcttgtgaagatggcttgcgctgccgcgcggtccccggccgaccaggacaggctgttgaaaatcctacagctacagagattcaagatgtatgttcagcagttggacttaacgtatttcttgagaaaaataaaatgtactctagagaatggaatcgtgatgtccaatacagaggcagagtccgggtccagctcaaacaggaagatgggagcctctgccttgtacagttcccatcacgtaagtcagtaatgttgtatgcagcagaaatgatacctaaactaaaaacaaggacacaaaaaacaggaggtgctgaccaaagtcttcaacaaggagagggaagtaaaaaagggaaaggaaagaaaaagaagtaacctagtatcagcatcaagtatgtggtactactgtaagagacatgaatggagacttctaatttgtatcggagggaaacagaagctttttgtttgcatcatttaactgaactgtgaacccttgtgcctctcatctttatcatcggagttgacagtgaaacaaatttacatcagaagtttgcatctcgcgtatatgccgtataaaagaatttttttgtctttcaatgcagttttttggaagaaaatatttttaaatggacaatggactgtacaataagttacttgaaataagttgtttcagataaatttcaattagatttaaaataaacattttgtccaccttttaagttaatgaaataaaatttgaaactgac

SEQ ID NO: 3578 - protein, 78 aa, Homo sapiens; identical to SEQ ID NO: 3558

SEQ ID NO: 3579 - DNA, 2551 bp, Homo sapiens
gagccgggttcctcccgggtttctgccgggtttctccctgcggctcctgggttgttgagactcttgtgaagatggcttgcgctgccgcgcggtccccggccgaccaggacaggctgttgaaaatcctacagctacagagattcaagatgtatgttcagcagttggacttaacgtatttcttgagaaaaataaaatgtactctagagaatggaatcgtgatgtccaatacagaggcagagtccgggtccagctcaaacaggaagatgggagcctctgccttgtacagttcccatcacgtaagtcagtaatgttgtatgcagcagaaatgatacctaaactaaaaacaaggacacaaaaaacaggaggtgctgaccaaagtcttcaacaaggagagggaagtaaaaaagggaaaggaaagaaaaagaagtaacctagtatcagcatcaagtatgtggtactactgtaagagacatgaatggagacttctaatttgtatcggagggaaacagaagctttttgtttgcatcatttaactgaactgtgaacccttgtgcctctcatctttatcatcggagttgacagtgaaacaaatttacatcagaagtttgcatctcgcgtatatgccgtataaaagaatttttttgtctttcaatgcagttttttggaagaaaatatttttaaatggacaatggactgtacaataagttacttgaaataagttgtttcagataaatttcaattagatttaaaataaacattttgtccaccttttaagttaatgaaataaaatttgaaactgacttttgcagcttttgcttatatactaatgctaggagaggagggataattaagaataaaatatgtagtgaaagtttccatagtgtgaggctaaaactagaagaaactgtggtaggtccttttgtgggtgggggacaggggagtctgtaaaaagccagtctgtagatgatattttaatatattattgtaatcgaatcgttcagttgttttttgacatggaaagtcctggattttaagctttaaatttgcttattttgtaggtttaagaacatgattttcatgggagttgtaaaattaactgtgctttagcaccttgaggtacactttccttcaacaaatgaaattggattggtgctccagaatttcagagcggtttctgaaagtagtgattttgagctatcccaattcctgttcttcctgaggcctggtttagctcttccttgaattctgcaagctatctcatattttcagtaaattccattttttttaagtttgtttgtttgtttgtttttgagatggagtttcactcttgttgcctaggctggagtgcaatggcacgatatcggcgtaccacaacctctgcatcccaggttcaagagattctcctgcctcagcctccctaggagctgggattacaggcatgtgccaccacacccggctaattttgtatttttagtagagacagggtttttccatgttggtcaggctggtctcgaactcccgacctcaggtgatctgcccacctcagcctcccaaagtgctgggattacaggcatgagccaccgtgcccggccttctttacatttttattgctcacagtcaaacattcctattgattgtaaaataagcaaacctagagttgtggagatttatatgtatttatttatttgaattgagacagggtcttaaactcccaggctcaagtgatcctcctgcctcaacctcccaaagtgctgggattacaggcatgagctagctggcctgttgactttttttttttaactctaacaatttctgttttatagtgaacataatagtataagacttagtttatatatttgacttacaaataaatcctggggagaggggagtatgtgtaaaacataattcagagcagccttctttgagaaagtgggtgtgtttggctgtgtaacaaaacaataaggggatgtgtttgctgtgtaacaaaacaatgaaggatttaagcaggatatttttgcctcatatgttaaatccaagtgaggttgctgtggtggttggtttagctctcagtgatgccttttttgtatttttccgctctgctgtccatgacatatttctaacacctttatgattattgttcctgcttgtaaaagggctgatatttacatgagtgcaaggcaggaagaaaaggtagctgtgccagccacttctggcaagcagttctcccaccttagcctcccaagtagctgagaccataggcatgagatttctcaaaattcctcccagcaggctttcacttagtttcattgttgagaactgtgacaggtccatctctagctgcaaaggaggctgagaaagtgaacacagcagtcctccttatccttggggaatacattccaagagtggatccctgaaacagcagatagtactgaaccctatatatactatgtttttgcctatgtatatatacttgatatggtttggctgctacccaacccaaaatctcatcttgaattataatccccaaatccctatgtgttaagggtgggac

SEQ ID NO: 3580 - protein, 78 aa, Homo sapiens; identical to SEQ ID NO: 3558

SEQ ID NO: 3581 - DNA, 911 bp, Homo sapiens
gccacgcagaaaaaggaggggttgaaaagggagtacccatctgatatctaggcagcatgaattggcctttggttccctgccacccgacccttttctcctgcctcttactgctctagtgataccacttatgctattgtctatggcaggtttatttgtatctatcctgcttatttaaataataagaagaccatcgcagagggaaggcgaatccccataagtaaggctgttgaaaatcctacagctacagagattcaagatgtatgttcagcagttggacttaacgtatttcttgagaaaaataaaatgtactctagagaatggaatcgtgatgtccaatacagaggcagagtccgggtccagctcaaacaggaagatgggagcctctgccttgtacagttcccatcacgtaagtcagtaatgttgtatgcagcagaaatgatacctaaactaaaaacaaggacacaaaaaacaggaggtgctgaccaaagtcttcaacaaggagagggaagtaaaaaagggaaaggaaagaaaaagaagtaacctagtatcagcatcaagtatgtggtactactgtaagagacatgaatggagacttctaatttgtatcggagggaaacagaagctttttgtttgcatcatttaactgaactgtgaacccttgtgcctctcatctttatcatcggagttgacagtgaaacaaatttacatcagaagtttgcatctcgcgtatatgccgtataaaagaatttttttgtctttcaatgcagttttttggaagaaaatatttttaaatggacaatggactgtacaataagttacttgaaataagttgtttcagataaatttcaattagatttaaaataaacattttgtccaccttttaagttaatgaaataaaatttgaaactgac

SEQ ID NO: 3582 - protein, 78 aa, Homo sapiens; identical to SEQ ID NO: 3558

SEQ ID NO: 3583 - DNA, 2661 bp, Homo sapiens
gccacgcagaaaaaggaggggttgaaaagggagtacccatctgatatctaggcagcatgaattggcctttggttccctgccacccgacccttttctcctgcctcttactgctctagtgataccacttatgctattgtctatggcaggtttatttgtatctatcctgcttatttaaataataagaagaccatcgcagagggaaggcgaatccccataagtaaggctgttgaaaatcctacagctacagagattcaagatgtatgttcagcagttggacttaacgtatttcttgagaaaaataaaatgtactctagagaatggaatcgtgatgtccaatacagaggcagagtccgggtccagctcaaacaggaagatgggagcctctgccttgtacagttcccatcacgtaagtcagtaatgttgtatgcagcagaaatgatacctaaactaaaaacaaggacacaaaaaacaggaggtgctgaccaaagtcttcaacaaggagagggaagtaaaaaagggaaaggaaagaaaaagaagtaacctagtatcagcatcaagtatgtggtactactgtaagagacatgaatggagacttctaatttgtatcggagggaaacagaagctttttgtttgcatcatttaactgaactgtgaacccttgtgcctctcatctttatcatcggagttgacagtgaaacaaatttacatcagaagtttgcatctcgcgtatatgccgtataaaagaatttttttgtctttcaatgcagttttttggaagaaaatatttttaaatggacaatggactgtacaataagttacttgaaataagttgtttcagataaatttcaattagatttaaaataaacattttgtccaccttttaagttaatgaaataaaatttgaaactgacttttgcagcttttgcttatatactaatgctaggagaggagggataattaagaataaaatatgtagtgaaagtttccatagtgtgaggctaaaactagaagaaactgtggtaggtccttttgtgggtgggggacaggggagtctgtaaaaagccagtctgtagatgatattttaatatattattgtaatcgaatcgttcagttgttttttgacatggaaagtcctggattttaagctttaaatttgcttattttgtaggtttaagaacatgattttcatgggagttgtaaaattaactgtgctttagcaccttgaggtacactttccttcaacaaatgaaattggattggtgctccagaatttcagagcggtttctgaaagtagtgattttgagctatcccaattcctgttcttcctgaggcctggtttagctcttccttgaattctgcaagctatctcatattttcagtaaattccattttttttaagtttgtttgtttgtttgtttttgagatggagtttcactcttgttgcctaggctggagtgcaatggcacgatatcggcgtaccacaacctctgcatcccaggttcaagagattctcctgcctcagcctccctaggagctgggattacaggcatgtgccaccacacccggctaattttgtatttttagtagagacagggtttttccatgttggtcaggctggtctcgaactcccgacctcaggtgatctgcccacctcagcctcccaaagtgctgggattacaggcatgagccaccgtgcccggccttctttacatttttattgctcacagtcaaacattcctattgattgtaaaataagcaaacctagagttgtggagatttatatgtatttatttatttgaattgagacagggtcttaaactcccaggctcaagtgatcctcctgcctcaacctcccaaagtgctgggattacaggcatgagctagctggcctgttgactttttttttttaactctaacaatttctgttttatagtgaacataatagtataagacttagtttatatatttgacttacaaataaatcctggggagaggggagtatgtgtaaaacataattcagagcagccttctttgagaaagtgggtgtgtttggctgtgtaacaaaacaataaggggatgtgtttgctgtgtaacaaaacaatgaaggatttaagcaggatatttttgcctcatatgttaaatccaagtgaggttgctgtggtggttggtttagctctcagtgatgccttttttgtatttttccgctctgctgtccatgacatatttctaacacctttatgattattgttcctgcttgtaaaagggctgatatttacatgagtgcaaggcaggaagaaaaggtagctgtgccagccacttctggcaagcagttctcccaccttagcctcccaagtagctgagaccataggcatgagatttctcaaaattcctcccagcaggctttcacttagtttcattgttgagaactgtgacaggtccatctctagctgcaaaggaggctgagaaagtgaacacagcagtcctccttatccttggggaatacattccaagagtggatccctgaaacagcagatagtactgaaccctatatatactatgtttttgcctatgtatatatacttgatatggtttggctgctacccaacccaaaatctcatcttgaattataatccccaaatccctatgtgttaagggtgggac

SEQ ID NO: 3584 - protein, 78 aa, Homo sapiens; identical to SEQ ID NO: 3558

SEQ ID NO: 3585 - DNA, 774 bp, Homo sapiens
catgaattggcctttggttccctgccacccgacccttttctcctgcctcttactgctctagtgataccacttatgctattgtctatggcaggtttatttgtatctatcctgcttatttaaataataagaagaccatcgcagagggaaggcgaatccccataagtaaggctgttgaaaatcctacagctacagagattcaagatgtatgttcagcagttggacttaacgtatttcttgagaaaaataaaatgtactctagagaatggaatcgtgatgtccaatacagaggcagagtccgggtccagctcaaacaggaagatgggagcctctgccttgtacagttcccatcacgttaagaatgtctgaggggtcaggcggtgctggcaagatggctgcacttgagaagatgacgtttcccaagaagatgacatttccagagaaaccaagccacaaaaagtacagggccgccctgaagaaggagaaacgaaagaaacgtcggcaggaacttgctcgactgagagactcaggactctcacaggaggaggaagaggacacttttattgaagaacaacaactagaagaagagaagctattggaaagagagagggaaagattacatgaggagtggttgctgagggagcagaaggcacaagaagaattcagaataaagaaggaaaaggaagaggcggctaaaaaatggctagaagaacaagagagaaagttaaaggaacaatggaaagaacagcagaggaaagagagagaagaggaggagca

SEQ ID NO: 3586 - protein, 54 aa, Homo sapiens
MYVQQLDLTYFLRKIKCTLENGIVMSNTEAESGSSSNRKMGASALYSSHHVKNV

SEQ ID NO: 3587 - DNA, 963 bp, Homo sapiens
tccactcttggaatgtattccccaaggataaggaggactgctgtgttcactttctcagcctcctttgcagctagagatggacctgtcacagttctcaacaatgaaactaagtgaaagcctgctgggaggaattttgagaaatctcatgcctatggtctcagctcacttggatttaacatatgaggcaaaaatatcctgcttaaatccttcattgttttgttacacagcaaacacatccccttattgttttgttacacagccaaacacacccactttctcaaagaaggctgctctgaattatgttttacacatactcccctctccccaggatttatttgtaagtcaaatatataaactaagtcttatactattatgttcactataaaacagaaattgttagagttaaaaaaaaaaagtcaacaggccagctagctcatgcctgtaatcccagcactttgggaggttgaggcaggaggatcacttgagcctgggagtttaagaccctgtctcaattcaaataaataaatacatataaatctccacaactctaggtttgcttattttacaatcaataggaatgtttgactgtgagcaataaaaatgtaaagaaggccgggcacggtggctcatgcctgtaatcccagcactttgggaggctgaggtgggcagatcacctgaggtcgggagttcgagaccagcctgaccaacatggaaaaaccctgtctctactaaaaatacaaaattagccgggtgtggtggcacatgcctgtaatcccagctcctagggaggctgaggcaggagaatctcttgaacctgggatgcagaggttgtggtacgccgatatcgtgccattgcactccagcctaggcaacaagagtgaaactccatctcaaaaacaaacaaacaaacaaacttaaaaaaaatggaatttactgaaaatatgagatagcttgcagaattca

SEQ ID NO: 3588 - protein, 102 aa, Homo sapiens
MDLSQFSTMKLSESLLGGILRNLMPMVSAHLDLTYEAKISCLNPSLFCYTANTSPYCFVTQPNTPTFSKKAALNYVLHILPSPQDLFVSQIYKLSLILLCSL

SEQ ID NO: 3589 - DNA, 1705 bp, Homo sapiens
attttatataattctgaaatgtttttaatgtatttgtgcacatgtacatatggaaatgttactgtctgactacaacatgcatcatgctcatggggagggagcaggggaaggttgtatgtgtcatttataacttctgtacagtaagaccacctgccaaaagctggaggaaccattgtgctggtgtggtctactaaataatactttaggaaatacgtgattaatatgcaagtgaacaaagtgagaaatgaaatcgaatggagattggcctggttgtttccgtagtatatggcatatgaataccaggatagctttataaagcagttagttagttagttactcactctagtgataaatcgggaaatttacacacacacacacacacacacacacacacacacacacacagagtaacctgtaactctcaattccctgaaaaactagtaatactgtcttatctgctataaactttacatatttgtctattgtcaagatgctacaatggaaaccatttctggttttatcttcaaagcggagaaacatgttgatttagtcttctttcccaatcttcttttttaaaccagtttaaggaacttctgaagatttgtccacctctgattacatgtatgttcttgtttgtatcattagcaacaacatgctaatgacgacacctagctctaagagcaattctgggagaatgaaaggaagtataaagtaacccataatctgcttggcaatagttaagtcaatctatcttcagtttttctctggcctttaaggtcaaacacaagaggcttccctagtttacaagtcagagtcacttgtagtccatttaaatgccctcatccgtattctttgtgtaagtgacagtatcactctaatataatatggatcagagcatttattttggggaggaaaacagtggtgattaccggcattttattaaacttaaaactttgtagaaagcaaacaaaattgttcttgggagaaaatcaacttttagattaaaaaaattttaagtatctaggagtatttaaatccttttcccataaataaaagtacagttttcttggtggcagaatgaaaatcagcaacttctagcatatagactatataatcagattgacagcatatagaatatattatcagacaagatgaggaggtacaaaagttactattgctcataatgacttacaggctaaaattagttttaaaatactatattaaattctgaatgcaatttttttttgttcccttgagaccaaaatttaagttaactgttgctggcagtctaagtgtaaatgttaacagcaggagaagttaagaattgagcagttctgttgcatgatttcccaaatgaaatactgccttggctagagtttgaaaaactaattgagcctgtgcctggctagaaaacaagcgtttatttgaatgtgaatagtgtttcaaaggtatgtagttacagaattcctaccaaacagcttaaattcttcaagaaagaattcctgcagcagttattcccttacctgaaggcttcaatcatttggatcaacaactgctactctcgggaagactcctctactcacagctgaagaaaatgagcacacccttcacactgttatcacctatcctgaagatgtgatacactgaatggaaataaatagatgtaaataaaattgagttctcatttaactgttatatttcattt

SEQ ID NO: 3590 - protein, 50 aa, Homo sapiens
MYIWKCYCLTTTCIMLMGREQGKVVCVIYNFCTVRPPAKSWRNHCAGVVY

SEQ ID NO: 3591 - DNA, 3064 bp, Homo sapiens
tgataaacttaccaagataagcctaccaagcacaggcctcctagatattaggcttatctgtacagggctttatacatgcagataagtactatattttcttaaattgatttctaagagttatgattaataaaagcctcttacagctatatactaaaacgtggtccaagttaggaagatagttaagctcctggacctggtgtgttttaccttttgttttttagtctcagcttttccttaccagctcattactcatcatgttttttccatctaaagaaagcccacctttaacctgcagaaaacactggtaatgcctttggggaaaataacagaggcatctcccatccccagagtagtgaaagacagtgtgtattctcagaatgtgccccctccaccctcctgttacccatgctggctctttttctgtgcagtgtggcttcctgttgtggtgcatggccccgagcccttctaatggggctgaactgctctacaagcgcatcatccgtcctttcttcctgaagcacgagtcccagatggacagtgtggtcaaggaccttaaagacaaggccaaagagactgcagatgccatcactaaagaagcgaagaaagctaccgtgaatttactgggtgaagaaaagaagagcacctaaaccagactggatggaaacttcctgccctctctgtaccttcctactggagcttgatgttatattagggactgtggtataattattttaataatgttgccttggaaacatttttgagatattaaagattggaatgtgttgtaagtttctttgcttacttttactgtctatatatatagggagcactttaaacttaatgcagtgggcagtgtccacgtttttggaaaatgtattttgcctctgggtaggaaaagatgtatgttgctatcctgcaggaaatataaacttaaaataaaattatataccccacaggctgtgtactttactgggctctccctgcacgcattttctctgtagttacatttaggataatctttatggttctacttcctgtaatgtacaattttatataattctgaaatgtttttaatgtatttgtgcacatgtacatatggaaatgttactgtctgactacaacatgcatcatgctcatggggagggagcaggggaaggttgtatgtgtcatttataacttctgtacagtaagaccacctgccaaaagctggaggaaccattgtgctggtgtggtctactaaataatactttaggaaatacgtgattaatatgcaagtgaacaaagtgagaaatgaaatcgaatggagattggcctggttgtttccgtagtatatggcatatgaataccaggatagctttataaagcagttagttagttagttactcactctagtgataaatcgggaaatttacacacacacacacacacacacacacacacacacacacacagagtaacctgtaactctcaattccctgaaaaactagtaatactgtcttatctgctataaactttacatatttgtctattgtcaagatgctacaatggaaaccatttctggttttatcttcaaagcggagaaacatgttgatttagtcttctttcccaatcttcttttttaaaccagtttaaggaacttctgaagatttgtccacctctgattacatgtatgttcttgtttgtatcattagcaacaacatgctaatgacgacacctagctctaagagcaattctgggagaatgaaaggaagtataaagtaacccataatctgcttggcaatagttaagtcaatctatcttcagtttttctctggcctttaaggtcaaacacaagaggcttccctagtttacaagtcagagtcacttgtagtccatttaaatgccctcatccgtattctttgtgttgataagctgcacatgactacatagtaagtacagaacagtaaagttaaaacggatgtctccattgatctgccaaatcgttatagagagcaatttgtctggactagaaaatctgagttttacaccatactgttaagagtccttttgaattaaactcgactaaaacaagtgtataactaaactaacaagattaaatatccagccagtacagtattttttaaggcaaataaagatgattagctcaccttgagataacaatcaggtaagatcataacaatgtctcatgatgtaaaaaatattaaagatatcaatactaagtgacagtatcactctaatataatatggatcagagcatttattttggggaggaaaacagtggtgattaccggcattttattaaacttaaaactttgtagaaagcaaacaaaattgttcttgggagaaaatcaacttttagattaaaaaaattttaagtatctaggagtatttaaatccttttcccataaataaaagtacagttttcttggtggcagaatgaaaatcagcaacttctagcatatagactatataatcagattgacagcatatagaatatattatcagacaagatgaggaggtacaaaagttactattgctcataatgacttacaggctaaaattagttttaaaatactatattaaattctgaatgcaatttttttttgttcccttgagaccaaaatttaagttaactgttgctggcagtctaagtgtaaatgttaacagcaggagaagttaagaattgagcagttctgttgcatgatttcccaaatgaaatactgccttggctagagtttgaaaaactaattgagcctgtgcctggctagaaaacaagcgtttatttgaatgtgaatagtgtttcaaaggtatgtagttacagaattcctaccaaacagcttaaattcttcaagaaagaattcctgcagcagttattcccttacctgaaggcttcaatcatttggatcaacaactgctactctcgggaagactcctctactcacagctgaagaaaatgagcacacccttcacactgttatcacctatcctgaagatgtgatacactgaatggaaataaatagatgtaaataaaattgagttctcatttaactgttatatttcattt

SEQ ID NO: 3592 - protein, 89 aa, Homo sapiens [sequence omitted]

SEQ ID NO: 3593 - DNA, 3166 bp, Homo sapiens
gggggaggaggggcgcgcggcggccgaggaggggcgcgcggcggccgggcggggcgagcggaggcgagtggaggacgcgtagacgcgccgcggtccccgcctgccgctgctccgccgcagtcgccgctccagtctatccggcactaggaacagccccgagcggcgagacggtccccgccatgtctgcggccatgagggagaggttcgaccggttcctgcacgagaagaactgcatgactgaccttctggccaagctcgaggccaaaaccggcgtgaacaggagcttcatcgctcttggtgtcatcggactggtggccttgtacctggtgttcggttatggagcctctctcctctgcaacctgataggatttggctacccagcctacatctcaattaaagctatagagagtcccaacaaagaagatgatacccagtggctgacctactgggtagtgtatggtgtgttcagcattgctgaattcttctctgatatcttcctgtcatggttccccttctactacatgctgaagtgtggcttcctgttgtggtgcatggccccgagcccttctaatggggctgaactgctctacaagcgcatcatccgtcctttcttcctgaagcacgagtcccagatggacagtgtggtcaaggaccttaaagacaaggccaaagagactgcagatgccatcactaaagaagcgaagaaagctaccgtgaatttactgggtgaagaaaagaagagcacctaaaccagactggatggaaacttcctgccctctctgtaccttcctactggagcttgatgttatattagggactgtggtataattattttaataatgttgccttggaaacatttttgagatattaaagattggaatgtgttgtaagtttctttgcttacttttactgtctatatatatagggagcactttaaacttaatgcagtgggcagtgtccacgtttttggaaaatgtattttgcctctgggtaggaaaagatgtatgttgctatcctgcaggaaatataaacttaaaataaaattatataccccacaggctgtgtactttactgggctctccctgcacgcattttctctgtagttacatttaggataatctttatggttctacttcctgtaatgtacaattttatataattctgaaatgtttttaatgtatttgtgcacatgtacatatggaaatgttactgtctgactacaacatgcatcatgctcatggggagggagcaggggaaggttgtatgtgtcatttataacttctgtacagtaagaccacctgccaaaagctggaggaaccattgtgctggtgtggtctactaaataatactttaggaaatacgtgattaatatgcaagtgaacaaagtgagaaatgaaatcgaatggagattggcctggttgtttccgtagtatatggcatatgaataccaggatagctttataaagcagttagttagttagttactcactctagtgataaatcgggaaatttacacacacacacacacacacacacacacacacacacacacagagtaacctgtaactctcaattccctgaaaaactagtaatactgtcttatctgctataaactttacatatttgtctattgtcaagatgctacaatggaaaccatttctggttttatcttcaaagcggagaaacatgttgatttagtcttctttcccaatcttcttttttaaaccagtttaaggaacttctgaagatttgtccacctctgattacatgtatgttcttgtttgtatcattagcaacaacatgctaatgacgacacctagctctaagagcaattctgggagaatgaaaggaagtataaagtaacccataatctgcttggcaatagttaagtcaatctatcttcagtttttctctggcctttaaggtcaaacacaagaggcttccctagtttacaagtcagagtcacttgtagtccatttaaatgccctcatccgtattctttgtgttgataagctgcacatgactacatagtaagtacagaacagtaaagttaaaacggatgtctccattgatctgccaaatcgttatagagagcaatttgtctggactagaaaatctgagttttacaccatactgttaagagtccttttgaattaaactcgactaaaacaagtgtataactaaactaacaagattaaatatccagccagtacagtattttttaaggcaaataaagatgattagctcaccttgagataacaatcaggtaagatcataacaatgtctcatgatgtaaaaaatattaaagatatcaatactaagtgacagtatcactctaatataatatggatcagagcatttattttggggaggaaaacagtggtgattaccggcattttattaaacttaaaactttgtagaaagcaaacaaaattgttcttgggagaaaatcaacttttagattaaaaaaattttaagtatctaggagtatttaaatccttttcccataaataaaagtacagttttcttggtggcagaatgaaaatcagcaacttctagcatatagactatataatcagattgacagcatatagaatatattatcagacaagatgaggaggtacaaaagttactattgctcataatgacttacaggctaaaattagttttaaaatactatattaaattctgaatgcaatttttttttgttcccttgagaccaaaatttaagttaactgttgctggcagtctaagtgtaaatgttaacagcaggagaagttaagaattgagcagttctgttgcatgatttcccaaatgaaatactgccttggctagagtttgaaaaactaattgagcctgtgcctggctagaaaacaagcgtttatttgaatgtgaatagtgtttcaaaggtatgtagttacagaattcctaccaaacagcttaaattcttcaagaaagaattcctgcagcagttattcccttacctgaaggcttcaatcatttggatcaacaactgctactctcgggaagactcctctactcacagctgaagaaaatgagcacacccttcacactgttatcacctatcctgaagatgtgatacactgaatggaaataaatagatgtaaataaaattgagttctcatttaactgttatatttcattt

SEQ ID NO: 3594 - protein, 189 aa, Homo sapiens
MSAAMRERFDRFLHEKNCMTDLLAKLEAKTGVNRSFIALGVIGLVALYLVFGYGASLLCNLIGFGYPAYISIKAIESPNKEDDTQWLTYWVVYGVFSIAEFFSDIFLSWFPFYYMLKCGFLLWCMAPSPSNGAELLYKRIIRPFFLKHESQMDSVVKDLKDKAKETADAITKEAKKATVNLLGEEKKST

SEQ ID NO: 3595 - DNA, 1087 bp, Homo sapiens
aaagtaacccataatctgcttggcaatagttaagtcaatctatcttcagtttttctctggcctttaaggtcaaacacaagaggcttccctagtttacaagtcagagtcacttgtagtccatttaaatgccctcatccgtattctttgtgttgataagctgcacatgactacatagtaagtacagaacagtaaagttaaaacggatgtctccattgatctgccaaatcgttatagagagcaatttgtctggactagaaaatctgagttttacaccatactgttaagagtccttttgaattaaactcgactaaaacaagtgtataactaaactaacaagattaaatatccagccagtacagtattttttaaggcaaataaagatgattagctcaccttgagataacaatcaggtaagatcataacaatgtctcatgatgtaaaaaatattaaagatatcaatactaagtgacagtatcactctaatataatatggatcagagcatttattttggggaggaaaacagtggtgattaccggcattttattaaacttaaaactttgtagaaagcaaacaaaattgttcttgggagaaaatcaacttttagattaaaaaaattttaagtatctaggagtatttaaatccttttcccataaataaaagtacagttttcttggtggcagaatgaaaatcagcaacttctagcatatagactatataatcagattgacagcatatagaatatattatcagacaagatgaggaggtacaaaagttactattgctcataatgacttacaggctaaaattaaaaacaagcgtttatttgaatgtgaatagtgtttcaaaggtatgtagttacagaattcctaccaaacagcttaaattcttcaagaaagaattcctgcagcagttattcccttacctgaaggcttcaatcatttggatcaacaactgctactctcgggaagactcctctactcacagctgaagaaaatgagcacacccttcacactgttatcacctatcctgaagatgtgatacactgaatggaaataaatagatgtaaataaaattgagttctcattt

SEQ ID NO: 3596 - protein, 66 aa, Homo sapiens [sequence omitted]

SEQ ID NO: 3597 - DNA, 954 bp, Homo sapiens
tgataaacttaccaagataagcctaccaagcacaggcctcctagatattaggcttatctgtacagggctttatacatgcagataagtactatattttcttaaattgatttctaagagttatgattaataaaagcctcttacagctatatactaaaacgtggtccaagttaggaagatagttaagctcctggacctggtgtgttttaccttttgttttttagtctcagcttttccttaccagctcattactcatcatgttttttccatctaaagaaagcccacctttaacctgcagaaaacactggtaatgcctttggggaaaataacagaggcatctcccatccccagagtagtgaaagacagtgtgtattctcagaatgtgccccctccaccctcctgttacccatgctggctctttttctgtgcagtgtggcttcctgttgtggtgcatggccccgagcccttctaatggggctgaactgctctacaagcgcatcatccgtcctttcttcctgaagcacgagtcccagatggacagtgtggtcaaggaccttaaagacaaggccaaagagactgcagatgccatcactaaagaagcgaagaaagctaccgtgaatttactgggtgaagaaaagaagagcacctaaaccagactggatggaaacttcctgccctctctgtaccttcctactggagcttgatgttatattagggactgtggtataattattttaataatgttgccttggaaacatttttgagatattaaagattggaatgtgttgtaagtttctttgcttacttttactgtctatatatatagggagcactttaaacttaatgcagtgggcagtgtccacgtttttggaaaatgtattttgcctctgggtaggaaaagatgtatgttgctatcctgcaggaaatataaacttaaaataaaattatataccccac

SEQ ID NO: 3598 - protein, 89 aa, Homo sapiens [sequence omitted]

SEQ ID NO: 3599 - DNA, 1056 bp, Homo sapiens
gggggaggaggggcgcgcggcggccgaggaggggcgcgcggcggccgggcggggcgagcggaggcgagtggaggacgcgtagacgcgccgcggtccccgcctgccgctgctccgccgcagtcgccgctccagtctatccggcactaggaacagccccgagcggcgagacggtccccgccatgtctgcggccatgagggagaggttcgaccggttcctgcacgagaagaactgcatgactgaccttctggccaagctcgaggccaaaaccggcgtgaacaggagcttcatcgctcttggtgtcatcggactggtggccttgtacctggtgttcggttatggagcctctctcctctgcaacctgataggatttggctacccagcctacatctcaattaaagctatagagagtcccaacaaagaagatgatacccagtggctgacctactgggtagtgtatggtgtgttcagcattgctgaattcttctctgatatcttcctgtcatggttccccttctactacatgctgaagtgtggcttcctgttgtggtgcatggccccgagcccttctaatggggctgaactgctctacaagcgcatcatccgtcctttcttcctgaagcacgagtcccagatggacagtgtggtcaaggaccttaaagacaaggccaaagagactgcagatgccatcactaaagaagcgaagaaagctaccgtgaatttactgggtgaagaaaagaagagcacctaaaccagactggatggaaacttcctgccctctctgtaccttcctactggagcttgatgttatattagggactgtggtataattattttaataatgttgccttggaaacatttttgagatattaaagattggaatgtgttgtaagtttctttgcttacttttactgtctatatatatagggagcactttaaacttaatgcagtgggcagtgtccacgtttttggaaaatgtattttgcctctgggtaggaaaagatgtatgttgctatcctgcaggaaatataaacttaaaataaaattatataccccac

SEQ ID NO: 3600 - protein, 189 aa, Homo sapiens; identical to SEQ ID NO: 3594

SEQ ID NO: 3601 - DNA, 786 bp, Homo sapiens
tgataaacttaccaagataagcctaccaagcacaggcctcctagatattaggcttatctgtacagggctttatacatgcagataagtactatattttcttaaattgatttctaagagttatgattaataaaagcctcttacagctatatactaaaacgtggtccaagttaggaagatagttaagctcctggacctggtgtgttttaccttttgttttttagtctcagcttttccttaccagctcattactcatcatgttttttccatctaaagaaagcccacctttaacctgcagaaaacactggtaatgcctttggggaaaataacagaggcatctcccatccccagagtagtgaaagacagtgtgtattctcagaatgtgccccctccaccctcctgttacccatgctggctctttttctgtgcagtgtggcttcctgttgtggtgcatggccccgagcccttctaatggggctgaactgctctacaagcgcatcatccgtcctttcttcctgaagcacgagtcccagatggacagtgtggtcaaggaccttaaagacaaggccaaagagactgcagatgccatcactaaagaagcgaagaaagctaccgtgaatttactgggtgaagaaaagaagagcacctaaaccagactggatggaaacttcctgccctctctgtaccttcctactggagcttgatgttatattagggactgtggtataattattttaataatgttgccttggaaacatttttgagatattaaagattggaatgtgttgt

SEQ ID NO: 3602 - protein, 89 aa, Homo sapiens [sequence omitted]

SEQ ID NO: 3603 - DNA, 888 bp, Homo sapiens
gggggaggaggggcgcgcggcggccgaggaggggcgcgcggcggccgggcggggcgagcggaggcgagtggaggacgcgtagacgcgccgcggtccccgcctgccgctgctccgccgcagtcgccgctccagtctatccggcactaggaacagccccgagcggcgagacggtccccgccatgtctgcggccatgagggagaggttcgaccggttcctgcacgagaagaactgcatgactgaccttctggccaagctcgaggccaaaaccggcgtgaacaggagcttcatcgctcttggtgtcatcggactggtggccttgtacctggtgttcggttatggagcctctctcctctgcaacctgataggatttggctacccagcctacatctcaattaaagctatagagagtcccaacaaagaagatgatacccagtggctgacctactgggtagtgtatggtgtgttcagcattgctgaattcttctctgatatcttcctgtcatggttccccttctactacatgctgaagtgtggcttcctgttgtggtgcatggccccgagcccttctaatggggctgaactgctctacaagcgcatcatccgtcctttcttcctgaagcacgagtcccagatggacagtgtggtcaaggaccttaaagacaaggccaaagagactgcagatgccatcactaaagaagcgaagaaagctaccgtgaatttactgggtgaagaaaagaagagcacctaaaccagactggatggaaacttcctgccctctctgtaccttcctactggagcttgatgttatattagggactgtggtataattattttaataatgttgccttggaaacatttttgagatattaaagattggaatgtgttgt

SEQ ID NO: 3604 - protein, 189 aa, Homo sapiens; identical to SEQ ID NO: 3594

SEQ ID NO: 3605 - DNA, 1673 bp, Homo sapiens
aatttatgatatacttaattacaaaaaaagtctaactgcaatataaaggagaaacaaaatgaaagtaatttgtaatatatataagtatgcaaacaaaacaatactagaaaacataaaatattcataagtagaatcactgacagtggcagctatgaacaaaatcttccatatattcccataggttaagaatgtctgaggggtcaggcggtgctggcaagatggctgcacttgagaagatgacgtttcccaagaagatgacatttccagagaaaccaagccacaaaaagtacagggccgccctgaagaaggagaaacgaaagaaacgtcggcaggaacttgctcgactgagagactcaggactctcacaggaggaggaagaggacacttttattgaagaacaacaactagaagaagagaagctattggaaagagagagggaaagattacatgaggagtggttgctgagggagcagaaggcacaagaagaattcagaataaagaaggaaaaggaagaggcggctaaaaaatggctagaagaacaagagagaaagttaaaggaacaatggaaagaacagcagaggaaagagagagaagaggaggagcagaaacaacaggagaagaaagaaaaagaggaagctgtgcagaagatgctggatcaggctgaaaatgatttagaaaatagtaccacatggcaaaacccagaaccacccgtggatttcagagtaatggagaaggatcgagctaattgtcccttctacagtaaaacaggagcttgcagatttggagacagatgttcacgtaaacataatttcccaacatctagtcctacccttcttattaagagcatgtttacaacgtttggaatggagcagtgcaggagggatgactatgaccctgacgcaagcctggagtacagcgaggaagaaacctaccaacagttcctagatttctatgaggatgtgttgcccgagttcaagaacgtggggaaagtgattcagttcaaggtcagctgcaatttggaacctcacctgaggggcaatgtatatgttcagtaccagtcggaagaagaatgccaagcagccctttctctgtttaacggacgatggtatgcaggacgacagctgcaatgtgaattctgcccagtgacccggtggaaaatggcgatttgtggtttatttgaaatacaacaatgtccaagaggaaaacactgcaactttcttcatgtgttcagaaatcccaacaatgaattctgggaagctaatagagacatctacttgtcttcagatcagactggctcctcctttggcaagaactccgagaggagggagaagatgggccaccacgaccactactacagcaggcagcggggaaggagaaaccctagtccagaccacacctacaaaagaaatggggaatccgagagaaaaaagagtagtcatagggggaagaaatctcacaaacgcacatcaaagagtcgggagaggcacaattcaccaagcagaggaagaaataggcaccgcagctgggaccagggccgccggagccagagccgcaggagccaccgcagccggagccaaagttcctctaggtgccgaagtcgtgggaggaggaagtcgggtaatagagacagaactgttcagagtccccaatccaaataaactagttttgttctt

SEQ ID NO: 3606 - protein, 489 aa, Homo sapiens [sequence omitted]

SEQ ID NO: 3607 - DNA, 614 bp, Homo sapiens
gggggaggaggggcgcgcggcggccgaggaggggcgcgcggcggccgggcggggcgagcggaggcgagtggaggacgcgtagacgcgccgcggtccccgcctgccgctgctccgccgcagtcgccgctccagtctatccggcactaggaacagccccgagcggcgagacggtccccgccatgtctgcggccatgagggagaggttcgaccggttcctgcacgagaagaactgcatgactgaccttctggccaagctcgaggccaaaaccggcgtgaacaggagcttcatcgctcttggtgtcatcggactggtggccttgtacctggtgttcggttatggagcctctctcctctgcaacctgataggatttggctacccagcctacatctcaattaaagctatagagagtcccaacaaagaagatgatacccagtggctgacctactgggtagtgtatggtgtgttcagcattgctgaattcttctctgatatcttcctgtcatggttccccttctactacatgctgaagcagatttatttagaacctccatgtgccagattctgttctacatctgggagatactttggcgaataaaacaaagtccttgttgtc

SEQ ID NO: 3608 - protein, 138 aa, Homo sapiens
MSAAMRERFDRFLHEKNCMTDLLAKLEAKTGVNRSFIALGVIGLVALYLVFGYGASLLCNLIGFGYPAYISIKAIESPNKEDDTQWLTYWVVYGVFSIAEFFSDIFLSWFPFYYMLKQIYLEPPCARFCSTSGRYFGE

SEQ ID NO: 3609 - DNA, 597 bp, Homo sapiens
aagtctgaggtcagaactactgcaagtagttctgctgacaagatagtgttcactgccacaagcaagtgggcccaaagcaaaagccaatttctttccactaaagactactgtgaggtccctacgattagatggatcttattaagggctttaaaattatctgaagtttaaattatgtcatgtccaaattaaagattgtaagaatatttttataaatgttaaatgactttgaataataaaaacaaaaaaatccaatctttgaaatcaactctttccacagaccaatttttattttcttccatcagttttgaaaggaaaattcttaattgccttacaaggcattctgtggtgaagtcattcaaaaatataaaagaatctatactgagcatgttttcatttaattttttaaactttaaaagacactcacttcatatagtgtcttgtcttttttcttttttaaccataaatggtgtgatactgtatttaatgttctattactttttttctttttcgagacagggtctcacttctagcctgggcgacggagcaagactccatctcaaaaaaagaaaaaaaaaaaaaaaggctaagaccaaagac

SEQ ID NO: 3610 - protein, 125 aa, Homo sapiens
MTLNNKNKKIQSLKSTLSTDQFLFSSISFERKILNCLTRHSVVKSFKNIKESILSMFSFNFLNFKRHSLHIVSCLFSFLTINGVILYLMFYYFFSFSRQGLTSSLGDGARLHLKKRKKKKKAKTK

SEQ ID NO: 3611 - DNA, 1291 bp, Homo sapiens
gggaagtgcgcttgcgcaaatgctaggttacacttgagtaactccgggaatgactgggtgggtggggcggggaacagtaacggtctcctattggatggcagcctaaactcgcaggccagctaattggacgcaatcagaacccagcattctttcttcgtgttcctgtgcgggattggtgtgcccaggggtttggctttccaattggctaacgccggggtgggtggggaatgtggggagatttgaatttgaaaccggtagggagtgataatccgcattcagttgtcgaggagtgccagtcaccttcagtttctggagctggccgtcaacatgtcctttcctaaggcgcccttgaaacgattcaatgacccttctggttgtgcaccatctccaggtgcttatgatgttaaaactttagaagtattgaaaggaccagtatcctttcagaaatcacaaagatttaaacagcaaaaagaatctaaacaaaatcttaatgttgacaaagatactaccttgcctgcttcagctagaaaagttaagtcttcggaatcaaagattcgtgttcttctacaggaacgtggtgcccaggacaggcggatccaggatctggaaactgagttggaaaagatggaagcaaggctaaatgctgcactaagggaaaaaacatctctctctgcaaataatgctacactggaaaaacaacttattgaattgaccaggactaatgaactactaaaatctaagttttctgaaaatggtaaccagaagaatttgagaattctaagcttggagttgatgaaacttagaaacaaaagagaaacaaagatgaggggtatgatggctaagcaagaaggcatggagatgaagctgcaggtcacccaaaggagtctcgaagagtctcaagggaaaatagcccaactggagggaaaacttgtttcaatagagaaagaaaagattgatgaaaaatctgaaacagaaaaactcttggaatacatcgaagaaattagttgtgcttcagatcaagtggaaaaatacaagctagatattgcccagttagaagaaaatttgaaagagaagaatgatgaaattttaagccttaagcagtctcttgaggagaatattgttatattatctaaacaagtagaagatctaaatgtgaaatgtcagctgcttgaaaaagaaaaagaagaccatgtcaacaggaatagagaacacaacgaaaatctaaatgcagagatgcaaaacttaaaacagaagtttattcttgaacaacaggaacgtgaaaagcttcaac

SEQ ID NO: 3612 - protein, 320 aa, Homo sapiens
MSFPKAPLKRFNDPSGCAPSPGAYDVKTLEVLKGPVSFQKSQRFKQQKESKQNLNVDKDTTLPASARKVKSSESKIRVLLQERGAQDRRIQDLETELEKMEARLNAALREKTSLSANNATLEKQLIELTRTNELLKSKFSENGNQKNLRILSLELMKLRNKRETKMRGMMAKQEGMEMKLQVTQRSLEESQGKIAQLEGKLVSIEKEKIDEKSETEKLLEYIEEISCASDQVEKYKLDIAQLEENLKEKNDEILSLKQSLEENIVILSKQVEDLNVKCQLLEKEKEDHVNRNREHNENLNAEMQNLKQKFILEQQEREKL

SEQ ID NO: 3613 - DNA, 1841 bp, Homo sapiens
gggaagtgcgcttgcgcaaatgctaggttacacttgagtaactccgggaatgactgggtgggtggggcggggaacagtaacggtctcctattggatggcagcctaaactcgcaggccagctaattggacgcaatcagaacccagcattctttcttcgtgttcctgtgcgggattggtgtgcccaggggtttggctttccaattggctaacgccggggtgggtggggaatgtggggagatttgaatttgaaaccggtagggagtgataatccgcattcagttgtcgaggagtgccagtcaccttcagtttctggagctggccgtcaacatgtcctttcctaaggcgcccttgaaacgattcaatgacccttctggttgtgcaccatctccaggtgcttatgatgttaaaactttagaagtattgaaaggaccagtatcctttcagaaatcacaaagatttaaacagcaaaaagaatctaaacaaaatcttaatgttgacaaagatactaccttgcctgcttcagctagaaaagttaagtcttcggaatcaaagattcgtgttcttctacaggaacgtggtgcccaggacaggcggatccaggatctggaaactgagttggaaaagatggaagcaaggctaaatgctgcactaagggaaaaaacatctctctctgcaaataatgctacactggaaaaacaacttattgaattgaccaggactaatgaactactaaaatctaagttttctgaaaatggtaaccagaagaatttgagaattctaagcttggagttgatgaaacttagaaacaaaagagaaacaaagatgaggggtatgatggctaagcaagaaggcatggagatgaagctgcaggtcacccaaaggagtctcgaagagtctcaagggaaaatagcccaactggagggaaaacttgtttcaatagagaaagaaaagattgatgaaaaatctgaaacagaaaaactcttggaatacatcgaagaaattagttgtgcttcagatcaagtggaaaaatacaagctagatattgcccagttagaagaaaatttgaaagagaagaatgatgaaattttaagccttaagcagtctcttgaggagaatattgttatattatctaaacaagtagaagatctaaatgtgaaatgtcagctgcttgaaaaagaaaaagaagaccatgtcaacaggaatagagaacacaacgaaaatctaaatgcagagatgcaaaacttaaaacagaagtttattcttgaacaacaggaacgtgaaaagcttcaacaaaaagaattacaaattgattcacttctgcaacaagagaaagaattatcttcgagtcttcatcagaagctctgttcttttcaagaggaaatggttaaagagaagaatctgtttgaggaagaattaaagcaaacactggatgagcttgataaattacagcaaaaggaggaacaagctgaaaggctggtcaagcaattggaagaggaagcaaaatctagagctgaagaattaaaactcctagaagaaaagctgaaagggaaggaggctgaactggagaaaagtagtgctgctcatacccaggccaccctgcttttgcaggaaaagtatgacagtatggtgcaaagccttgaagatgttactgctcaatttgaaagctataaagcgttaacagccagtgagatagaagatcttaagctggagaactcatcattacaggaaaaagcggccaaggctgggaaaaatgcagaggatgttcagcatcagattttggcaactgagagctcaaatcaagaatatgtaaggatgcttctagatctgcagaccaagtcagc

SEQ ID NO: 3614 - protein, 503 aa, Homo sapiens
MSFPKAPLKRFNDPSGCAPSPGAYDVKTLEVLKGPVSFQKSQRFKQQKESKQNLNVDKDTTLPASARKVKSSESKIRVLLQERGAQDRRIQDLETELEKMEARLNAALREKTSLSANNATLEKQLIELTRTNELLKSKFSENGNQKNLRILSLELMKLRNKRETKMRGMMAKQEGMEMKLQVTQRSLEESQGKIAQLEGKLVSIEKEKIDEKSETEKLLEYIEEISCASDQVEKYKLDIAQLEENLKEKNDEILSLKQSLEENIVILSKQVEDLNVKCQLLEKEKEDHVNRNREHNENLNAEMQNLKQKFILEQQEREKLQQKELQIDSLLQQEKELSSSLHQKLCSFQEEMVKEKNLFEEELKQTLDELDKLQQKEEQAERLVKQLEEEAKSRAEELKLLEEKLKGKEAELEKSSAAHTQATLLLQEKYDSMVQSLEDVTAQFESYKALTASEIEDLKLENSSLQEKAAKAGKNAEDVQHQILATESSNQEYVRMLLDLQTK

SEQ ID NO: 3615 - DNA, 2139 bp, Homo sapiens
gggaagtgcgcttgcgcaaatgctaggttacacttgagtaactccgggaatgactgggtgggtggggcggggaacagtaacggtctcctattggatggcagcctaaactcgcaggccagctaattggacgcaatcagaacccagcattctttcttcgtgttcctgtgcgggattggtgtgcccaggggtttggctttccaattggctaacgccggggtgggtggggaatgtggggagatttgaatttgaaaccggtagggagtgataatccgcattcagttgtcgaggagtgccagtcaccttcagtttctggagctggccgtcaacatgtcctttcctaaggcgcccttgaaacgattcaatgacccttctggttgtgcaccatctccaggtgcttatgatgttaaaactttagaagtattgaaaggaccagtatcctttcagaaatcacaaagatttaaacagcaaaaagaatctaaacaaaatcttaatgttgacaaagatactaccttgcctgcttcagctagaaaagttaagtcttcggaatcaaagattcgtgttcttctacaggaacgtggtgcccaggacaggcggatccaggatctggaaactgagttggaaaagatggaagcaaggctaaatgctgcactaagggaaaaaacatctctctctgcaaataatgctacactggaaaaacaacttattgaattgaccaggactaatgaactactaaaatctaagttttctgaaaatggtaaccagaagaatttgagaattctaagcttggagttgatgaaacttagaaacaaaagagaaacaaagatgaggggtatgatggctaagcaagaaggcatggagatgaagctgcaggtcacccaaaggagtctcgaagagtctcaagggaaaatagcccaactggagggaaaacttgtttcaatagagaaagaaaagattgatgaaaaatctgaaacagaaaaactcttggaatacatcgaagaaattagttgtgcttcagatcaagtggaaaaatacaagctagatattgcccagttagaagaaaatttgaaagagaagaatgatgaaattttaagccttaagcagtctcttgaggagaatattgttatattatctaaacaagtagaagatctaaatgtgaaatgtcagctgcttgaaaaagaaaaagaagaccatgtcaacaggaatagagaacacaacgaaaatctaaatgcagagatgcaaaacttaaaacagaagtttattcttgaacaacaggaacgtgaaaagcttcaacaaaaagaattacaaattgattcacttctgcaacaagagaaagaattatcttcgagtcttcatcagaagctctgttcttttcaagaggaaatggttaaagagaagaatctgtttgaggaagaattaaagcaaacactggatgagcttgataaattacagcaaaaggaggaacaagctgaaaggctggtcaagcaattggaagaggaagcaaaatctagagctgaagaattaaaactcctagaagaaaagctgaaagggaaggaggctgaactggagaaaagtagtgctgctcatacccaggccaccctgcttttgcaggaaaagtatgacagtatggtgcaaagccttgaagatgttactgctcaatttgaaagctataaagcgttaacagccagtgagatagaagatcttaagctggagaactcatcattacaggaaaaagcggccaaggctgggaaaaatgcagaggatgttcagcatcagattttggcaactgagagctcaaatcaagaatatgtaaggatgcttctagatctgcagaccaagtcagcactaaaggaaacagaaattaaagaaatcacagtttcttttcttcaaaaaataactgatttgcagaaccaactcaagcaacaggaggaagactttagaaaacagctggaagatgaagaaggaagaaaagctgaaaaagaaaatacaacagcagaattaactgaagaaattaacaagtggcgtctcctctatgaagaactatataataaaacaaaaccttttcagctacaactagatgcttttgaagtagaaaaacaggcattgttgaatgaacatggtgcagctcaggaacagctaaat

SEQ ID NO: 3616 - protein, 603 aa, Homo sapiens
MSFPKAPLKRFNDPSGCAPSPGAYDVKTLEVLKGPVSFQKSQRFKQQKESKQNLNVDKDTTLPASARKVKSSESKIRVLLQERGAQDRRIQDLETELEKMEARLNAALREKTSLSANNATLEKQLIELTRTNELLKSKFSENGNQKNLRILSLELMKLRNKRETKMRGMMAKQEGMEMKLQVTQRSLEESQGKIAQLEGKLVSIEKEKIDEKSETEKLLEYIEEISCASDQVEKYKLDIAQLEENLKEKNDEILSLKQSLEENIVILSKQVEDLNVKCQLLEKEKEDHVNRNREHNENLNAEMQNLKQKFILEQQEREKLQQKELQIDSLLQQEKELSSSLHQKLCSFQEEMVKEKNLFEEELKQTLDELDKLQQKEEQAERLVKQLEEEAKSRAEELKLLEEKLKGKEAELEKSSAAHTQATLLLQEKYDSMVQSLEDVTAQFESYKALTASEIEDLKLENSSLQEKAAKAGKNAEDVQHQILATESSNQEYVRMLLDLQTKSALKETEIKEITVSFLQKITDLQNQLKQQEEDFRKQLEDEEGRKAEKENTTAELTEEINKWRLLYEELYNKTKPFQLQLDAFEVEKQALLNEHGAAQEQL

SEQ ID NO: 3617 - DNA, 3238 bp, Homo sapiens
gggaagtgcgcttgcgcaaatgctaggttacacttgagtaactccgggaatgactgggtgggtggggcggggaacagtaacggtctcctattggatggcagcctaaactcgcaggccagctaattggacgcaatcagaacccagcattctttcttcgtgttcctgtgcgggattggtgtgcccaggggtttggctttccaattggctaacgccggggtgggtggggaatgtggggagatttgaatttgaaaccggtagggagtgataatccgcattcagttgtcgaggagtgccagtcaccttcagtttctggagctggccgtcaacatgtcctttcctaaggcgcccttgaaacgattcaatgacccttctggttgtgcaccatctccaggtgcttatgatgttaaaactttagaagtattgaaaggaccagtatcctttcagaaatcacaaagatttaaacagcaaaaagaatctaaacaaaatcttaatgttgacaaagatactaccttgcctgcttcagctagaaaagttaagtcttcggaatcaaagattcgtgttcttctacaggaacgtggtgcccaggacaggcggatccaggatctggaaactgagttggaaaagatggaagcaaggctaaatgctgcactaagggaaaaaacatctctctctgcaaataatgctacactggaaaaacaacttattgaattgaccaggactaatgaactactaaaatctaagttttctgaaaatggtaaccagaagaatttgagaattctaagcttggagttgatgaaacttagaaacaaaagagaaacaaagatgaggggtatgatggctaagcaagaaggcatggagatgaagctgcaggtcacccaaaggagtctcgaagagtctcaagggaaaatagcccaactggagggaaaacttgtttcaatagagaaagaaaagattgatgaaaaatctgaaacagaaaaactcttggaatacatcgaagaaattagttgtgcttcagatcaagtggaaaaatacaagctagatattgcccagttagaagaaaatttgaaagagaagaatgatgaaattttaagccttaagcagtctcttgaggagaatattgttatattatctaaacaagtagaagatctaaatgtgaaatgtcagctgcttgaaaaagaaaaagaagaccatgtcaacaggaatagagaacacaacgaaaatctaaatgcagagatgcaaaacttaaaacagaagtttattcttgaacaacaggaacgtgaaaagcttcaacaaaaagaattacaaattgattcacttctgcaacaagagaaagaattatcttcgagtcttcatcagaagctctgttcttttcaagaggaaatggttaaagagaagaatctgtttgaggaagaattaaagcaaacactggatgagcttgataaattacagcaaaaggaggaacaagctgaaaggctggtcaagcaattggaagaggaagcaaaatctagagctgaagaattaaaactcctagaagaaaagctgaaagggaaggaggctgaactggagaaaagtagtgctgctcatacccaggccaccctgcttttgcaggaaaagtatgacagtatggtgcaaagccttgaagatgttactgctcaatttgaaagctataaagcgttaacagccagtgagatagaagatcttaagctggagaactcatcattacaggaaaaagcggccaaggctgggaaaaatgcagaggatgttcagcatcagattttggcaactgagagctcaaatcaagaatatgtaaggatgcttctagatctgcagaccaagtcagcactaaaggaaacagaaattaaagaaatcacagtttcttttcttcaaaaaataactgatttgcagaaccaactcaagcaacaggaggaagactttagaaaacagctggaagatgaagaaggaagaaaagctgaaaaagaaaatacaacagcagaattaactgaagaaattaacaagtggcgtctcctctatgaagaactatataataaaacaaaaccttttcagctacaactagatgcttttgaagtagaaaaacaggcattgttgaatgaacatggtgcagctcaggaacagctaaataaaataagagattcatatgctaaattattgggtcatcagaatttgaaacaaaaaatcaagcatgttgtgaagttgaaagatgaaaatagccaactcaaatcggaagtatcaaaactccgctgtcagcttgctaaaaaaaaacaaagtgagacaaaacttcaagaggaattgaataaagttctaggtatcaaacactttgatccttcaaaggcttttcatcatgaaagtaaagaaaattttgccctgaagaccccattaaaagaaggcaatacaaactgttaccgagctcctatggagtgtcaagaatcatggaagtaaacatctgagaaacctgttgaagattatttcattcgtcttgttgttattgatgttgctgttattatatttgacatgggtattttataatgttgtatttaattttaactgccaatccttaaatatgtgaaaggaacattttttaccaaagtgtcttttgacattttattttttcttgcaaatacctcctccctaatgctcacctttatcacctcattctgaaccctttcgctggctttccagcttagaatgcatctcatcaacttaaaagtcagtatcatattattatcctcctgttctgaaaccttagtttcaagagtctaaaccccagattcttcagcttgatcctggaggtcttttctagtctgagcttctttagctaggctaaaacaccttggcttgttattgcctctactttgattctgataatgctcacttggtcctacctattatccttctacttgtccagttcaaataagaaataaggacaagcctaacttcatagaaacctctctatttttaatcagttgtttaataatttacaggttcttaggctccatcctgtttgtatgaaattataatctgtggattggcctttaagcctgcattcttaacaaactcttcagttaattcttagatacactaaaaatctgagaaactctacatgtaactatttcttcagagtttgtcatatactgcttgtcatctgcatgtctactcagcatttgattaacatttgtgtaatatgaaataaaattacacagtaagtcatttaaccaattaa

SEQ ID NO: 3618 - protein, 709 aa, Homo sapiens
MSFPKAPLKRFNDPSGCAPSPGAYDVKTLEVLKGPVSFQKSQRFKQQKESKQNLNVDKDTTLPASARKVKSSESKIRVLLQERGAQDRRIQDLETELEKMEARLNAALREKTSLSANNATLEKQLIELTRTNELLKSKFSENGNQKNLRILSLELMKLRNKRETKMRGMMAKQEGMEMKLQVTQRSLEESQGKIAQLEGKLVSIEKEKIDEKSETEKLLEYIEEISCASDQVEKYKLDIAQLEENLKEKNDEILSLKQSLEENIVILSKQVEDLNVKCQLLEKEKEDHVNRNREHNENLNAEMQNLKQKFILEQQEREKLQQKELQIDSLLQQEKELSSSLHQKLCSFQEEMVKEKNLFEEELKQTLDELDKLQQKEEQAERLVKQLEEEAKSRAEELKLLEEKLKGKEAELEKSSAAHTQATLLLQEKYDSMVQSLEDVTAQFESYKALTASEIEDLKLENSSLQEKAAKAGKNAEDVQHQILATESSNQEYVRMLLDLQTKSALKETEIKEITVSFLQKITDLQNQLKQQEEDFRKQLEDEEGRKAEKENTTAELTEEINKWRLLYEELYNKTKPFQLQLDAFEVEKQALLNEHGAAQEQLNKIRDSYAKLLGHQNLKQKIKHVVKLKDENSQLKSEVSKLRCQLAKKKQSETKLQEELNKVLGIKHFDPSKAFHHESKENFALKTPLKEGNTNCYRAPMECQESWK

SEQ ID NO: 3619 - DNA, 1035 bp, Homo sapiens
ggggtttggctttccaattggctaacgccggggtgggtggggaatgtggggagatttgaatttgaaaccggtagggagtgataatccgcattcagttgtcgaggagtgccagtcaccttcagtttctggagctggccgtcaacatgtcctttcctaaggcgcccttgaaacgattcaatgacccttctggttgtgcaccatctccaggtgcttatgatgttaaaactttagaagtattgaaaggaccagtatcctttcagaaatcacaaagatttaaacagcaaaaagaatctaaacaaaatcttaatgttgacaaagatactaccttgcctgcttcagctagaaaagttaagtcttcggaatcaaagaaggaatctcaaaagaatgataaagatttgaagatattagagaaagagattcgtgttcttctacaggaacgtggtgcccaggacaggcggatccaggatctggaaactgagttggaaaagatggaagcaaggctaaatgctgcactaagggaaaaaacatctctctctgcaaataatgctacactggaaaaacaacttattgaattgaccaggactaatgaactactaaaatctaagttttctgaaaatggtaaccagaagaatttgagaattctaagcttggagttgatgaaacttagaaacaaaagagaaacaaagatgaggggtatgatggctaagcaagaaggcatggagatgaagctgcaggtcacccaaaggagtctcgaagagtctcaagggaaaatagcccaactggagggaaaacttgtttcaatagagaaagaaaagattgatgaaaaatctgaaacagaaaaactcttggaatacatcgaagaaattagttgtgcttcagatcaagtggaaaaatacaagctagatattgcccagttagaagaaaatttgaaagagaagaatgatgaaattttaagccttaagcagtctcttgaggagaatattgttatattatctaaacaagtagaagatctaaatgtgaaatgtcagctgcttg

SEQ ID NO: 3620 - protein, 296 aa, Homo sapiens
MSFPKAPLKRFNDPSGCAPSPGAYDVKTLEVLKGPVSFQKSQRFKQQKESKQNLNVDKDTTLPASARKVKSSESKKESQKNDKDLKILEKEIRVLLQERGAQDRRIQDLETELEKMEARLNAALREKTSLSANNATLEKQLIELTRTNELLKSKFSENGNQKNLRILSLELMKLRNKRETKMRGMMAKQEGMEMKLQVTQRSLEESQGKIAQLEGKLVSIEKEKIDEKSETEKLLEYIEEISCASDQVEKYKLDIAQLEENLKEKNDEILSLKQSLEENIVILSKQVEDLNVKCQL

SEQ ID NO: 3621 - DNA, 3102 bp, Homo sapiens
ggggtttggctttccaattggctaacgccggggtgggtggggaatgtggggagatttgaatttgaaaccggtagggagtgataatccgcattcagttgtcgaggagtgccagtcaccttcagtttctggagctggccgtcaacatgtcctttcctaaggcgcccttgaaacgattcaatgacccttctggttgtgcaccatctccaggtgcttatgatgttaaaactttagaagtattgaaaggaccagtatcctttcagaaatcacaaagatttaaacagcaaaaagaatctaaacaaaatcttaatgttgacaaagatactaccttgcctgcttcagctagaaaagttaagtcttcggaatcaaagaaggaatctcaaaagaatgataaagatttgaagatattagagaaagagattcgtgttcttctacaggaacgtggtgcccaggacaggcggatccaggatctggaaactgagttggaaaagatggaagcaaggctaaatgctgcactaagggaaaaaacatctctctctgcaaataatgctacactggaaaaacaacttattgaattgaccaggactaatgaactactaaaatctaagttttctgaaaatggtaaccagaagaatttgagaattctaagcttggagttgatgaaacttagaaacaaaagagaaacaaagatgaggggtatgatggctaagcaagaaggcatggagatgaagctgcaggtcacccaaaggagtctcgaagagtctcaagggaaaatagcccaactggagggaaaacttgtttcaatagagaaagaaaagattgatgaaaaatctgaaacagaaaaactcttggaatacatcgaagaaattagttgtgcttcagatcaagtggaaaaatacaagctagatattgcccagttagaagaaaatttgaaagagaagaatgatgaaattttaagccttaagcagtctcttgaggagaatattgttatattatctaaacaagtagaagatctaaatgtgaaatgtcagctgcttgaaaaagaaaaagaagaccatgtcaacaggaatagagaacacaacgaaaatctaaatgcagagatgcaaaacttaaaacagaagtttattcttgaacaacaggaacgtgaaaagcttcaacaaaaagaattacaaattgattcacttctgcaacaagagaaagaattatcttcgagtcttcatcagaagctctgttcttttcaagaggaaatggttaaagagaagaatctgtttgaggaagaattaaagcaaacactggatgagcttgataaattacagcaaaaggaggaacaagctgaaaggctggtcaagcaattggaagaggaagcaaaatctagagctgaagaattaaaactcctagaagaaaagctgaaagggaaggaggctgaactggagaaaagtagtgctgctcatacccaggccaccctgcttttgcaggaaaagtatgacagtatggtgcaaagccttgaagatgttactgctcaatttgaaagctataaagcgttaacagccagtgagatagaagatcttaagctggagaactcatcattacaggaaaaagcggccaaggctgggaaaaatgcagaggatgttcagcatcagattttggcaactgagagctcaaatcaagaatatgtaaggatgcttctagatctgcagaccaagtcagcactaaaggaaacagaaattaaagaaatcacagtttcttttcttcaaaaaataactgatttgcagaaccaactcaagcaacaggaggaagactttagaaaacagctggaagatgaagaaggaagaaaagctgaaaaagaaaatacaacagcagaattaactgaagaaattaacaagtggcgtctcctctatgaagaactatataataaaacaaaaccttttcagctacaactagatgcttttgaagtagaaaaacaggcattgttgaatgaacatggtgcagctcaggaacagctaaataaaataagagattcatatgctaaattattgggtcatcagaatttgaaacaaaaaatcaagcatgttgtgaagttgaaagatgaaaatagccaactcaaatcggaagtatcaaaactccgctgtcagcttgctaaaaaaaaacaaagtgagacaaaacttcaagaggaattgaataaagttctaggtatcaaacactttgatccttcaaaggcttttcatcatgaaagtaaagaaaattttgccctgaagaccccattaaaagaaggcaatacaaactgttaccgagctcctatggagtgtcaagaatcatggaagtaaacatctgagaaacctgttgaagattatttcattcgtcttgttgttattgatgttgctgttattatatttgacatgggtattttataatgttgtatttaattttaactgccaatccttaaatatgtgaaaggaacattttttaccaaagtgtcttttgacattttattttttcttgcaaatacctcctccctaatgctcacctttatcacctcattctgaaccctttcgctggctttccagcttagaatgcatctcatcaacttaaaagtcagtatcatattattatcctcctgttctgaaaccttagtttcaagagtctaaaccccagattcttcagcttgatcctggaggtcttttctagtctgagcttctttagctaggctaaaacaccttggcttgttattgcctctactttgattctgataatgctcacttggtcctacctattatccttctacttgtccagttcaaataagaaataaggacaagcctaacttcatagaaacctctctatttttaatcagttgtttaataatttacaggttcttaggctccatcctgtttgtatgaaattataatctgtggattggcctttaagcctgcattcttaacaaactcttcagttaattcttagatacactaaaaatctgagaaactctacatgtaactatttcttcagagtttgtcatatactgcttgtcatctgcatgtctactcagcatttgattaacatttgtgtaatatgaaataaaattacacagtaagtcatttaaccaattaa

SEQ ID NO: 3622 - protein, 725 aa, Homo sapiens
MSFPKAPLKRFNDPSGCAPSPGAYDVKTLEVLKGPVSFQKSQRFKQQKESKQNLNVDKDTTLPASARKVKSSESKKESQKNDKDLKILEKEIRVLLQERGAQDRRIQDLETELEKMEARLNAALREKTSLSANNATLEKQLIELTRTNELLKSKFSENGNQKNLRILSLELMKLRNKRETKMRGMMAKQEGMEMKLQVTQRSLEESQGKIAQLEGKLVSIEKEKIDEKSETEKLLEYIEEISCASDQVEKYKLDIAQLEENLKEKNDEILSLKQSLEENIVILSKQVEDLNVKCQLLEKEKEDHVNRNREHNENLNAEMQNLKQKFILEQQEREKLQQKELQIDSLLQQEKELSSSLHQKLCSFQEEMVKEKNLFEEELKQTLDELDKLQQKEEQAERLVKQLEEEAKSRAEELKLLEEKLKGKEAELEKSSAAHTQATLLLQEKYDSMVQSLEDVTAQFESYKALTASEIEDLKLENSSLQEKAAKAGKNAEDVQHQILATESSNQEYVRMLLDLQTKSALKETEIKEITVSFLQKITDLQNQLKQQEEDFRKQLEDEEGRKAEKENTTAELTEEINKWRLLYEELYNKTKPFQLQLDAFEVEKQALLNEHGAAQEQLNKIRDSYAKLLGHQNLKQKIKHVVKLKDENSQLKSEVSKLRCQLAKKKQSETKLQEELNKVLGIKHFDPSKAFHHESKENFALKTPLKEGNTNCYRAPMECQESWK

SEQ ID NO: 3623 - DNA, 1226 bp, Homo sapiens
gataatccgcattcagttgtcgaggagtgccagtcaccttcagtttctggagctggccgtcaacatgtcctttcctaaggcgcccttgaaacgattcaatgacccttctggttgtgcaccatctccaggtgcttatgatgttaaaactttagaagtattgaaaggaccagtatcctttcagaaatcacaaagatttaaacagcaaaaagaatctaaacaaaatcttaatgttgacaaagatactaccttgcctgcttcagctagaaaagttaagtcttcggaatcaaagattcgtgttcttctacaggaacgtggtgcccaggacaggcggatccaggatctggaaactgagttggaaaagatggaagcaaggctaaatgctgcactaagggaaaaaacatctctctctgcaaataatgctacactggaaaaacaacttattgaattgaccaggactaatgaactactaaaatctaaggtatctgagcctcatgataatatttacaattgaataaatataaacacgttttttagggccgggcacggtggctcacgcctgtgttcccagcattttgggaggccaaggcaggcggatcacctgaggtcgggagttcgagaccagcctgaccaacatggagaaaccctgtctctactaaaaatacaaaaattagctaggcctattggcgggcgcctgtaatctcagctactcgggaggctgaggcagaagaatcacttgaacccaggaggtggaggttgcagtgagctgacatggcgccattgcacttcagcctaggcaagagagtgcgactccatctcaaaaaacaaaacaaaacaaaacaacatacaccaggcgattcagattcattttgttaagcaaacatgtttcaagaaatcctttctcagggacttgctttagagtcttgcaatggactttccagcatatagaggtaagtgaccacccaaacaacctttcaaaaatgaaccaacaggccagccacagtggctcacacctgtaattccagcgctttgggaagctgagacggatggatcacttgaggtcaggattttgagactagcctagcctaacatggcgaaaccccatctttactaaaaatacaaaaattagtcaggtatggtggcgtacacccgtaattccagctactcaggaggctgaggcatgagaatagcttgaactcgggaggctgaggcatgagaatagcttgaac

SEQ ID NO: 3624 - protein, 148 aa, Homo sapiens
MSFPKAPLKRFNDPSGCAPSPGAYDVKTLEVLKGPVSFQKSQRFKQQKESKQNLNVDKDTTLPASARKVKSSESKIRVLLQERGAQDRRIQDLETELEKMEARLNAALREKTSLSANNATLEKQLIELTRTNELLKSKVSEPHDNIYN

SEQ ID NO: 3625 - DNA, 396 bp, Homo sapiens
gtgtatttgtttgtggggaagggtaagtgtttttgaagaaaagtgggaaaaaatgccaatatctaagagaggtttgctactgagaaactgttaaggagtggtgagagattaaattcttaatagtcttgtggcttgtgcaagagctactattactcttttcataagtttataaacaggcaagctgcatagtactttttaaattttatttatgtattttttttttgagatggagtatcactctgtcacccaggctaaagtgcagtggcgccatctcagcttactgcagcctctgtccccacaggagaattgcttgaacctgggaggcagaggttgcagtcagccaaggtggtgccactgtactccagcctgggcaacagagcgagactcagtctctcc

SEQ ID NO: 3626 - protein, 61 aa, Homo sapiens [sequence omitted]

SEQ ID NO: 3627 - DNA, 1267 bp, Homo sapiens
agtcagcagctgacagaataatccacacattggtttccttacctatggagtgagggctattatggtggaaaaggccaagtagaagccactagaactatctgtacttaggaaaatagtaaaccaaaagcaatgctcaattcctatagggactgaagagattagtgccaccataagtacttgaaggaaggcggggtggtgattcctaccatatgtccattcaactcgcctatttagcctgggcagaagacagatggattatcacaaacttaactaggtggtgactccaattgcagctacagtaccagatgtattgcttgagcaaattaacacaactcctggttcctggtatgcagctacctggaatcttgattgccttttctttccacatcacattggtccattacattgacgacattatgctcactggacctaatgagtgagacatagcaactactccagacctattggaactgacttcacctgcaacagagcttggagaagctgaagcctaagggtgctctaaagcaggggtccccaacctccgggctacagaccaatacccatccaaggcctgttaggaacccggctgcagagcaggagcttttctgcatggaagaattaaattgagaaaaacatagttatttaaaaaatcacatcgtaactgagttaacaaggcactcaggttctaatcatagattaccttccttcttcatcttccagctgttttctaaagtcttcctcctgttgcttgagttggttctgcaaatcagttattttttgaagaaaagaaactgtgatttctttaatttctgtttcctttagtgctgacttggtctgcagatctagaagcatcctttggtttgagagagaagaggtcactaaacattttatagccactttcattaatttttcctttttttttctttaaacctcaaggaactcttcaagaagtgtcattttttaactgagtaaattcttaatttgcagtataagatggccaaaagcaagccaagggacagttactagctggctttcaacattaaattgtcttaatggttctaaggccattatttgctctatataccttacatattcttgatttgagctctcagttgccaaaatctgatgctgaacatcctctgcatttttcccagccttggccgctttttcctgtaatgatgagttctccagcttaagatcttctatctcactggctgttaacgctttatagcttattaaaaagaaaaaaaagtcaaagtagttttct

SEQ ID NO: 3628 - protein, 44 aa, Homo sapiens
MYCLSKLTQLLVPGMQLPGILIAFSFHITLVHYIDDIMLTGPNE

SEQ ID NO: 3629 - DNA, 898 bp, Homo sapiens
tatggagtgagggctattatggtggaaaaggccaagtagaagccactagaactatctgtacttaggaaaatagtaaaccaaaagcaatgctcaattcctatagggactgaagagattagtgccaccataagtacttgaaggaaggcggggtggtgattcctaccatatgtccattcaactcgcctatttagcctgggcagaagacagatggattatcacaaacttaactaggtggtgactccaattgcagctacagtaccagatgtattgcttgagcaaattaacacaactcctggttcctggtatgcagctacctggaatcttgattgccttttctttccacatcacattggtccattacattgacgacattatgctcactggacctaatgagtgagacatagcaactactccagacctattggtaagacatttgcatgtcagaagtgggaagtaaatccaacaaaaattcaaaggctttttcatgtctcagtaaaatttctaggggtccagtggtatgaggcatgttgagataccccttctaaggaactgacttcacctgcaacagagcttggagaagctgaagcctaagggtgctctaaagcaggggtccccaacctccgggctacagaccaatacccatccaaggcctgttaggaacccggctgcagagcaggagcttttctgcatggaagaattaaattgagaaaaacatagttatttaaaaaatcacatcgtaactgagttaacaaggcactcaggttctaatcatagattaccttccttcttcatcttccagctgttttctaaagtcttcctcctgttgcttgagttggttctgcaaatcagttattttttgaagaaaagaaactgtgatttctttaatttctgtttcctt

SEQ ID NO: 3630 - protein, 44 aa, Homo sapiens; identical to SEQ ID NO: 3628

SEQ ID NO: 3631 - DNA, 802 bp, Homo sapiens
acacattggtttccttacctatggagtgagggctattatggtggaaaaggccaagtagaagccactagaactatctgtacttaggaaaatagtaaaccaaaagcaatgctcaattcctatagggactgaagagattagtgccaccataagtacttgaaggaaggcggggtggtgattcctaccatatgtccattcaactcgcctatttagcctgggcagaagacagatggattatcacaaacttaactaggtggtgactccaattgcagctacagtaccagatgtattgcttgagcaaattaacacaactcctggttcctggtatgcagctacctggtatgatctggcaaatgcctttctctccatccctgtctataaggccgaccagaagcagtttgcttttagctagcaaggctagaaatgcaccttcatgtcctacctcagggcatatcaactcaccagccctgtcctaattttgttcacaggaatcttgattgccttttctttccacatcacattggtccattacattgacgacattatgctcactggacctaatgagtgagacatagcaactactccagacctattgcttttctgcatggaagaattaaattgagaaaaacatagttatttaaaaaatcacatcgtaactgagttaacaaggcactcaggttctaatcatagattaccttccttcttcatcttccagctgttttctaaagtcttcctcctgttgcttgagttggttctgcaaatcagttattttttgaagaaaagaaactgtgatttctttaatttc

SEQ ID NO: 3632 - protein, 63 aa, Homo sapiens
MYCLSKLTQLLVPGMQLPGMIWQMPFSPSLSIRPTRSSLLLASKARNAPSCPTSGHINSPALS

SEQ ID NO: 3633 - DNA, 2058 bp, Homo sapiens
agttctaccaaatagttttgcaaatagacccaggcttgactggcaattaaacatgaaacttctcattgggtattttcgagactactacggggaatcagctaccagcttactgccatgtggagaactgcacgagattccgggattggaatcaaaatgctaatttaaaaggtcaagtgaagctgctcctcacgttttggcgtgcctgcgctctctgcaggcagaagcgaacaaagacccagcaagagaaggcagaggctaagacccatcccgtatctgctctcctgaaataattctggagtcatgcctgaaatgccagaggacatggagcaggaggaagttaacatccctaataggagggttctggttactggtgccactgggcttcttggcagagctgtacacaaagaatttcagcagaataattggcatgcagttggctgtggtttcagaagagcaagaccaaaatttgaacaggttaatctgttggattctaatgcagttcatcacatcattcatgattttcagccccatgttatagtacattgtgcagcagagagaagaccagatgttgtagaaaatcagccagatgctgcctctcaacttaatgtggatgcttctgggaatttagcaaaggaagcagctgctgttggagcatttctcatctacattagctcagattatgtatttgatggaacaaatccaccttacagagaggaagacataccagctcccctaaatttgtatggcaaaacaaaattagatggagaaaaggctgtcctggagaacaatctaggagctgctgttttgaggattcctattctgtatggggaagttgaaaagctcgaagaaagtgctgtgactgttatgtttgataaagtgcagttcagcaacaagtcagcaaacatggatcactggcagcagaggttccccacacatgtcaaagatgtggccactgtgtgccggcagctagcagagaagagaatgctggatccatcaattaagggaacctttcactggtctggcaatgaacagatgactaagtatgaaatggcatgtgcaattgcagatgccttcaacctccccagcagtcacttaagacctattactgacagccctgtcctaggagcacaacgtccgagaaatgctcagcttgactgctccaaattggagaccttgggcattggccaacgaacaccatttcgaattggaatcaaagaatcactttggcctttcctcattgacaagagatggagacaaacggtctttcattagtttatttgtgttgggttcttttttttttttaaatgaaaagtatagtatgtggcactttttaaagaacaaaggaaatagttttgtatgagtactttaattgtgactcttaggatctttcaggtaaatgatgctcttgcactagtgaaattgtctaaagaaactaaagggcagtcatgccctgtttgcagtaatttttctttttatcattttgtttgtcctggctaaacttggagtttgagtatagtaaattatgatccttaaatatttgagagtcaggatgaagcagatctgctgtagacttttcagatgaaattgttcattctcgtaacctccatattttcaggatttttgaagctgttgaccttttcatgttgattattttaaattgtgtgaaatagtataaaaatcattggtgttcattatttgctttgcctgagctcagatcaaaatgtttgaagaaaggaactttatttttgcaagttacgtacagtttttatgcttgagatatttcaacatgttatgtatattggaacttctacagcttgatgcctcctgcttttatagcagtttatggggagcacttgaaagagcgtgtgtacatgtattttttttctaggcaaacattgaatgcaaacgtgtatttttttaatataaatatataactgtccttttcatcccatgttgccgctaagtgatatttcatatgtgtggttatactcataataatgggccttgtaagtcttttcaccattcatgaataataataaatatgtactgctggcatgt

SEQ ID NO: 3634 - protein, 323 aa, Homo sapiens; identical to SEQ ID NO: 396

SEQ ID NO: 3635 - DNA, 2244 bp, Homo sapiens
agttctaccaaatagttttgcaaatagacccaggcttgactggcaattaaacatgaaacttctcattgggtattttcgagactactacggggaatcagctaccagcttactgccatgtggagaactgcacgagattccgggattggaatcaaaatgctaatttaaaaggtcaagtgaagctgctcctcacgttttggcgtgcctgcgctctctgcaggcagaagcgaacaaagacccagcaagagaaggcagaggctaagacccatcccgtatctgctctcctgaaataattctggagtcatgcctgaaatgccagaggacatggagcaggaggaagttaacatccctaataggagggttctggttactggtgccactgggcttcttggcagagctgtacacaaagaatttcagcagaataattggcatgcagttggctgtggtttcagaagagcaagaccaaaatttgaacaggttaatctgttggattctaatgcagttcatcacatcattcatgattttcagccccatgttatagtacattgtgcagcagagagaagaccagatgttgtagaaaatcagccagatgctgcctctcaacttaatgtggatgcttctgggaatttagcaaaggaagcagctgctgttggagcatttctcatctacattagctcagattatgtatttgatggaacaaatccaccttacagagaggaagacataccagctcccctaaatttgtatggcaaaacaaaattagatggagaaaaggctgtcctggagaacaatctaggagctgctgttttgaggattcctattctgtatggggaagttgaaaagctcgaagaaagtgctgtgactgttatgtttgataaagtgcagttcagcaacaagtcagcaaacatggatcactggcagcagaggttccccacacatgtcaaagatgtggccactgtgtgccggcagctagcagagaagagaatgctggatccatcaattaagggaacctttcactggtctggcaatgaacagatgactaagtatgaaatggcatgtgcaattgcagatgccttcaacctccccagcagtcacttaagacctattactgacagccctgtcctaggagcacaacgtccgagaaatgctcagcttgactgctccaaattggagaccttgggcattggccaacgaacaccatttcgaattggaatcaaagaatcactttggcctttcctcattgacaagagatggagacaaacggtctttcattagtttatttgtgttgggttcttttttttttttaaatgaaaagtatagtatgtggcactttttaaagaacaaaggaaatagttttgtatgagtactttaattgtgactcttaggatctttcaggtaaatgatgctcttgcactagtgaaattgtctaaagaaactaaagggcagtcatgccctgtttgcagtaatttttctttttatcattttgtttgtcctggctaaacttggagtttgagtatagtaaattatgatccttaaatatttgagagtcaggatgaagcagatctgctgtagacttttcagatgaaattgttcattctcgtaacctccatattttcaggatttttgaagctgttgaccttttcatgttgattattttaaattgtgtgaaatagtataaaaatcattggtgttcattatttgctttgcctgagctcagatcaaaatgtttgaagaaaggaactttatttttgcaagttacgtacagtttttatgcttgagatatttcaacatgttatgtatattggaacttctacagcttgatgcctcctgcttttatagcagtttatggggagcacttgaaagagcgtgtgtacatgtattttttttctaggcaaacattgaatgcaaacgtgtatttttttaatataaatatataactgtccttttcatcccatgttgccgctaagtgatatttcatatgtgtggttatactcataataatgggccttgtaagtcttttcaccattcatgaataataataaatatgtactgctggcatgtaatgcttagttttcttgtatttacttctttttttaaatgtaaggaccaaacttctaaactaattgttcttttgttgctttaatttttaaaaattacattcttctgatgtaacatgtgatacatacaaaagaatatagtttaatatgtattgaaataaaacacaataaaattaacacttgatccaga

SEQ ID NO: 3636 - protein, 323 aa, Homo sapiens; identical to SEQ ID NO: 396

SEQ ID NO: 3637 - DNA, 1908 bp, Homo sapiens
agcggggtcgttctgggcctaggggaggcgggccgagggcgtctgagctgaggcccgcgtcgatcctgggttggaggaggtggcggccgctgaggctgcggcgtgaagacggcgggcatggtggggcgggagaaagagctctctatacactttgttcccgggagctgtcggctggtggaggaggaagttaacatccctaataggagggttctggttactggtgccactgggcttcttggcagagctgtacacaaagaatttcagcagaataattggcatgcagttggctgtggtttcagaagagcaagaccaaaatttgaacaggttaatctgttggattctaatgcagttcatcacatcattcatgattttcagccccatgttatagtacattgtgcagcagagagaagaccagatgttgtagaaaatcagccagatgctgcctctcaacttaatgtggatgcttctgggaatttagcaaaggaagcagctgctgttggagcatttctcatctacattagctcagattatgtatttgatggaacaaatccaccttacagagaggaagacataccagctcccctaaatttgtatggcaaaacaaaattagatggagaaaaggctgtcctggagaacaatctaggagctgctgttttgaggattcctattctgtatggggaagttgaaaagctcgaagaaagtgctgtgactgttatgtttgataaagtgcagttcagcaacaagtcagcaaacatggatcactggcagcagaggttccccacacatgtcaaagatgtggccactgtgtgccggcagctagcagagaagagaatgctggatccatcaattaagggaacctttcactggtctggcaatgaacagatgactaagtatgaaatggcatgtgcaattgcagatgccttcaacctccccagcagtcacttaagacctattactgacagccctgtcctaggagcacaacgtccgagaaatgctcagcttgactgctccaaattggagaccttgggcattggccaacgaacaccatttcgaattggaatcaaagaatcactttggcctttcctcattgacaagagatggagacaaacggtctttcattagtttatttgtgttgggttcttttttttttttaaatgaaaagtatagtatgtggcactttttaaagaacaaaggaaatagttttgtatgagtactttaattgtgactcttaggatctttcaggtaaatgatgctcttgcactagtgaaattgtctaaagaaactaaagggcagtcatgccctgtttgcagtaatttttctttttatcattttgtttgtcctggctaaacttggagtttgagtatagtaaattatgatccttaaatatttgagagtcaggatgaagcagatctgctgtagacttttcagatgaaattgttcattctcgtaacctccatattttcaggatttttgaagctgttgaccttttcatgttgattattttaaattgtgtgaaatagtataaaaatcattggtgttcattatttgctttgcctgagctcagatcaaaatgtttgaagaaaggaactttatttttgcaagttacgtacagtttttatgcttgagatatttcaacatgttatgtatattggaacttctacagcttgatgcctcctgcttttatagcagtttatggggagcacttgaaagagcgtgtgtacatgtattttttttctaggcaaacattgaatgcaaacgtgtatttttttaatataaatatataactgtccttttcatcccatgttgccgctaagtgatatttcatatgtgtggttatactcataataatgggccttgtaagtcttttcaccattcatgaataataataaatatgtactgctggcatgt

SEQ ID NO: 3638 - protein, 334 aa, Homo sapiens; identical to SEQ ID NO: 394

SEQ ID NO: 3639 - DNA, 2094 bp, Homo sapiens
agcggggtcgttctgggcctaggggaggcgggccgagggcgtctgagctgaggcccgcgtcgatcctgggttggaggaggtggcggccgctgaggctgcggcgtgaagacggcgggcatggtggggcgggagaaagagctctctatacactttgttcccgggagctgtcggctggtggaggaggaagttaacatccctaataggagggttctggttactggtgccactgggcttcttggcagagctgtacacaaagaatttcagcagaataattggcatgcagttggctgtggtttcagaagagcaagaccaaaatttgaacaggttaatctgttggattctaatgcagttcatcacatcattcatgattttcagccccatgttatagtacattgtgcagcagagagaagaccagatgttgtagaaaatcagccagatgctgcctctcaacttaatgtggatgcttctgggaatttagcaaaggaagcagctgctgttggagcatttctcatctacattagctcagattatgtatttgatggaacaaatccaccttacagagaggaagacataccagctcccctaaatttgtatggcaaaacaaaattagatggagaaaaggctgtcctggagaacaatctaggagctgctgttttgaggattcctattctgtatggggaagttgaaaagctcgaagaaagtgctgtgactgttatgtttgataaagtgcagttcagcaacaagtcagcaaacatggatcactggcagcagaggttccccacacatgtcaaagatgtggccactgtgtgccggcagctagcagagaagagaatgctggatccatcaattaagggaacctttcactggtctggcaatgaacagatgactaagtatgaaatggcatgtgcaattgcagatgccttcaacctccccagcagtcacttaagacctattactgacagccctgtcctaggagcacaacgtccgagaaatgctcagcttgactgctccaaattggagaccttgggcattggccaacgaacaccatttcgaattggaatcaaagaatcactttggcctttcctcattgacaagagatggagacaaacggtctttcattagtttatttgtgttgggttcttttttttttttaaatgaaaagtatagtatgtggcactttttaaagaacaaaggaaatagttttgtatgagtactttaattgtgactcttaggatctttcaggtaaatgatgctcttgcactagtgaaattgtctaaagaaactaaagggcagtcatgccctgtttgcagtaatttttctttttatcattttgtttgtcctggctaaacttggagtttgagtatagtaaattatgatccttaaatatttgagagtcaggatgaagcagatctgctgtagacttttcagatgaaattgttcattctcgtaacctccatattttcaggatttttgaagctgttgaccttttcatgttgattattttaaattgtgtgaaatagtataaaaatcattggtgttcattatttgctttgcctgagctcagatcaaaatgtttgaagaaaggaactttatttttgcaagttacgtacagtttttatgcttgagatatttcaacatgttatgtatattggaacttctacagcttgatgcctcctgcttttatagcagtttatggggagcacttgaaagagcgtgtgtacatgtattttttttctaggcaaacattgaatgcaaacgtgtatttttttaatataaatatataactgtccttttcatcccatgttgccgctaagtgatatttcatatgtgtggttatactcataataatgggccttgtaagtcttttcaccattcatgaataataataaatatgtactgctggcatgtaatgcttagttttcttgtatttacttctttttttaaatgtaaggaccaaacttctaaactaattgttcttttgttgctttaatttttaaaaattacattcttctgatgtaacatgtgatacatacaaaagaatatagtttaatatgtattgaaataaaacacaataaaattaacacttgatccaga

SEQ ID NO: 3640 - protein, 334 aa, Homo sapiens; identical to SEQ ID NO: 394

SEQ ID NO: 3641 - DNA, 3233 bp, Homo sapiens
cgagggcgtctgagctgaggcccgcgtcgatcctgggttggaggaggtggcggccgctgaggctgcggcgtgaagacggcgggcatggtggggcgggagaaagagctctctatacactttgttcccgggagctgtcggctggtggaggaggaagttaacatccctaataggagggttctggttactggtgccactgggcttcttggcagagctgtacacaaagaatttcagcagaataattggcatgcagttggctgtggtttcagaagagcaagaccaaaatttgaacaggttaatctgttggattctaatgcagttcatcacatcattcatgattttcaggtatgatttaggttattttaagatatacatgaacaatattaagagttgtctggatgatacagaaactatccttgctctcaaggaaattactatgtttgaaagctctaaagttgtattatgcagtagcatttttttcatttagcatgacatggtatatgtaaaccttaaagttaaattttgacacgctgacaaagacaaatatgagacattttataaaatgcttatgtttatagagtgccttctaagtaatactttctctgcaaatggttttcaaatgttactgtaaacctcacaacactgcaaaatagttattttcattttagggctgagggagcaggctcagagaggttttcggtatcattgatactattctccctttgacatggatttattagatatttaaatcatgttaattgcataaatgatagctctttccttttgtccaaattgggggataaaacttgttttgatttagaaagacttctgttttgttcttgtttttgtgacgtaatcttggtttgttgcccaggctggagtgcagtggtgcagttgagctcactgcagcctccgcctcccagggttcaagcaattctcctgcctaagcttcctgagtacctgagactacaggcatgcgcaaccacacctggctaattgttgtatttctagtagagatggggtttcaccatgttggccaggctggtcttgaactcctgacctcacgtgatccacccacctcagccttccaaagtgctgggattacagatttgagccaccgcgcccagcctagaaacatggttgttttattttcagacagggtctcactctgtagcccagggtgaagtacggtagatcgatcacagcccactgtagccttgaattccttggctcaagtgatccttctgcctcggcctccacaacagttagaactacaggctcatgccaccacgactggctgatttttaaatttttttgtagagattgagtaccaaccactatgttgcctagtcttatcttgaactcctggcctcaagcattgtctcacctcagcctcccaaagtgttgggattacatgcatgaaccgtcacaccagagtagaaatacagttgttgacagtttttttcctggtttgtgtctgcatattatgaaatactcttttcagtgcctataaatattttaagtttgaaccttgcggggaaaagaagcagcatgacaaaactacattagaaattacaatgatttattcttagttgaaagaatgttgacttactgcacatttttctctgaattaactttaagaaggctgtaatacctctttcattttattttgagttaaaaatacgtcaatgcttaacttctagccccatgttatagtacattgtgcagcagagagaagaccagatgttgtagaaaatcagccagatgctgcctctcaacttaatgtggatgcttctgggaatttagcaaaggaagcagctgctgttggagcatttctcatctacattagctcagattatgtatttgatggaacaaatccaccttacagagaggaagacataccagctcccctaaatttgtatggcaaaacaaaattagatggagaaaaggctgtcctggagaacaatctaggagctgctgttttgaggattcctattctgtatggggaagttgaaaagctcgaagaaagtgctgtgactgttatgtttgataaagtgcagttcagcaacaagtcagcaaacatggatcactggcagcagaggttccccacacatgtcaaagatgtggccactgtgtgccggcagctagcagagaagagaatgctggatccatcaattaagggaacctttcactggtctggcaatgaacagatgactaagtatgaaatggcatgtgcaattgcagatgccttcaacctccccagcagtcacttaagacctattactgacagccctgtcctaggagcacaacgtccgagaaatgctcagcttgactgctccaaattggagaccttgggcattggccaacgaacaccatttcgaattggaatcaaagaatcactttggcctttcctcattgacaagagatggagacaaacggtctttcattagtttatttgtgttgggttcttttttttttttaaatgaaaagtatagtatgtggcactttttaaagaacaaaggaaatagttttgtatgagtactttaattgtgactcttaggatctttcaggtaaatgatgctcttgcactagtgaaattgtctaaagaaactaaagggcagtcatgccctgtttgcagtaatttttctttttatcattttgtttgtcctggctaaacttggagtttgagtatagtaaattatgatccttaaatatttgagagtcaggatgaagcagatctgctgtagacttttcagatgaaattgttcattctcgtaacctccatattttcaggatttttgaagctgttgaccttttcatgttgattattttaaattgtgtgaaatagtataaaaatcattggtgttcattatttgctttgcctgagctcagatcaaaatgtttgaagaaaggaactttatttttgcaagttacgtacagtttttatgcttgagatatttcaacatgttatgtatattggaacttctacagcttgatgcctcctgcttttatagcagtttatggggagcacttgaaagagcgtgtgtacatgtattttttttctaggcaaacattgaatgcaaacgtgtatttttttaatataaatatataactgtccttttcatcccatgttgccgctaagtgatatttcatatgtgtggttatactcataataatgggccttgtaagtcttttcaccattcatgaataataataaatatgtactgctggcatgt

SEQ ID NO: 3642 - protein, 135 aa, Homo sapiens
MFDKVQFSNKSANMDHWQQRFPTHVKDVATVCRQLAEKRMLDPSIKGTFHWSGNEQMTKYEMACAIADAFNLPSSHLRPITDSPVLGAQRPRNAQLDCSKLETLGIGQRTPFRIGIKESLWPFLIDKRWRQTVFH

SEQ ID NO: 3643 - DNA, 3419 bp, Homo sapiens
cgagggcgtctgagctgaggcccgcgtcgatcctgggttggaggaggtggcggccgctgaggctgcggcgtgaagacggcgggcatggtggggcgggagaaagagctctctatacactttgttcccgggagctgtcggctggtggaggaggaagttaacatccctaataggagggttctggttactggtgccactgggcttcttggcagagctgtacacaaagaatttcagcagaataattggcatgcagttggctgtggtttcagaagagcaagaccaaaatttgaacaggttaatctgttggattctaatgcagttcatcacatcattcatgattttcaggtatgatttaggttattttaagatatacatgaacaatattaagagttgtctggatgatacagaaactatccttgctctcaaggaaattactatgtttgaaagctctaaagttgtattatgcagtagcatttttttcatttagcatgacatggtatatgtaaaccttaaagttaaattttgacacgctgacaaagacaaatatgagacattttataaaatgcttatgtttatagagtgccttctaagtaatactttctctgcaaatggttttcaaatgttactgtaaacctcacaacactgcaaaatagttattttcattttagggctgagggagcaggctcagagaggttttcggtatcattgatactattctccctttgacatggatttattagatatttaaatcatgttaattgcataaatgatagctctttccttttgtccaaattgggggataaaacttgttttgatttagaaagacttctgttttgttcttgtttttgtgacgtaatcttggtttgttgcccaggctggagtgcagtggtgcagttgagctcactgcagcctccgcctcccagggttcaagcaattctcctgcctaagcttcctgagtacctgagactacaggcatgcgcaaccacacctggctaattgttgtatttctagtagagatggggtttcaccatgttggccaggctggtcttgaactcctgacctcacgtgatccacccacctcagccttccaaagtgctgggattacagatttgagccaccgcgcccagcctagaaacatggttgttttattttcagacagggtctcactctgtagcccagggtgaagtacggtagatcgatcacagcccactgtagccttgaattccttggctcaagtgatccttctgcctcggcctccacaacagttagaactacaggctcatgccaccacgactggctgatttttaaatttttttgtagagattgagtaccaaccactatgttgcctagtcttatcttgaactcctggcctcaagcattgtctcacctcagcctcccaaagtgttgggattacatgcatgaaccgtcacaccagagtagaaatacagttgttgacagtttttttcctggtttgtgtctgcatattatgaaatactcttttcagtgcctataaatattttaagtttgaaccttgcggggaaaagaagcagcatgacaaaactacattagaaattacaatgatttattcttagttgaaagaatgttgacttactgcacatttttctctgaattaactttaagaaggctgtaatacctctttcattttattttgagttaaaaatacgtcaatgcttaacttctagccccatgttatagtacattgtgcagcagagagaagaccagatgttgtagaaaatcagccagatgctgcctctcaacttaatgtggatgcttctgggaatttagcaaaggaagcagctgctgttggagcatttctcatctacattagctcagattatgtatttgatggaacaaatccaccttacagagaggaagacataccagctcccctaaatttgtatggcaaaacaaaattagatggagaaaaggctgtcctggagaacaatctaggagctgctgttttgaggattcctattctgtatggggaagttgaaaagctcgaagaaagtgctgtgactgttatgtttgataaagtgcagttcagcaacaagtcagcaaacatggatcactggcagcagaggttccccacacatgtcaaagatgtggccactgtgtgccggcagctagcagagaagagaatgctggatccatcaattaagggaacctttcactggtctggcaatgaacagatgactaagtatgaaatggcatgtgcaattgcagatgccttcaacctccccagcagtcacttaagacctattactgacagccctgtcctaggagcacaacgtccgagaaatgctcagcttgactgctccaaattggagaccttgggcattggccaacgaacaccatttcgaattggaatcaaagaatcactttggcctttcctcattgacaagagatggagacaaacggtctttcattagtttatttgtgttgggttcttttttttttttaaatgaaaagtatagtatgtggcactttttaaagaacaaaggaaatagttttgtatgagtactttaattgtgactcttaggatctttcaggtaaatgatgctcttgcactagtgaaattgtctaaagaaactaaagggcagtcatgccctgtttgcagtaatttttctttttatcattttgtttgtcctggctaaacttggagtttgagtatagtaaattatgatccttaaatatttgagagtcaggatgaagcagatctgctgtagacttttcagatgaaattgttcattctcgtaacctccatattttcaggatttttgaagctgttgaccttttcatgttgattattttaaattgtgtgaaatagtataaaaatcattggtgttcattatttgctttgcctgagctcagatcaaaatgtttgaagaaaggaactttatttttgcaagttacgtacagtttttatgcttgagatatttcaacatgttatgtatattggaacttctacagcttgatgcctcctgcttttatagcagtttatggggagcacttgaaagagcgtgtgtacatgtattttttttctaggcaaacattgaatgcaaacgtgtatttttttaatataaatatataactgtccttttcatcccatgttgccgctaagtgatatttcatatgtgtggttatactcataataatgggccttgtaagtcttttcaccattcatgaataataataaatatgtactgctggcatgtaatgcttagttttcttgtatttacttctttttttaaatgtaaggaccaaacttctaaactaattgttcttttgttgctttaatttttaaaaattacattcttctgatgtaacatgtgatacatacaaaagaatatagtttaatatgtattgaaataaaacacaataaaattaacacttgatccaga

SEQ ID NO: 3644 - protein, 135 aa, Homo sapiens; identical to SEQ ID NO: 3642

SEQ ID NO: 3645 - DNA, 963 bp, Homo sapiens
gtgcagagtatcattgcagcgcttttccagggagtaacgtgctgcactggttcagggctttgtctttattcacaacacattcatgtgcctcagcatgggggcagctgcactgttgcctgccagcctgtcctctttgactgccgaatgaaccaaaggataactctccattcgtgagagagagtgagctacagaggaagaaagaccacgcaaaagggagggggagagaggggggcgaagaggatgttctccggctcactcctacattaggtctctgtgcaaaggcagaggctgtgggagcagcatcaagcaagacttcgggcagtgattctaactattgcctatgaacaccgtggctgggacgactttgacgaggcaatttattacttacgcatagaacactggctgtgctgaaactgggagcgcaaacagccccttgttttctaatttagagacttgcatcttttcgacactcaacagtatcaagacactctgctactacagattgatttccaccatcaacacctttacctcttcccgcctgaaaataaaatatgaaatataacaagtaaatcgcaatctaccttgaatcttctggagaggaaagaagaaaccatgtctagacaaggtgctggaaagacccagggaagacacaggctttggtatcaggatgatgctggcctcacaaaatgagttagggaggattccctctttttctattgattggaatagtttcagaaggaatggtaccagctcctccttgtacctctggtagaattcggctgtgaatccatctggtcctggactttttttggttggtaagctattaattattgcctcaatttcggagcctgttattggtctattcagagattcaacttcttcctggtttggccttgggagggtgtatgtgtcgaggaatttatccatttcttctagattttctagtttatttgcgtagaggtg

SEQ ID NO: 3646 - protein, 34 aa, Homo sapiens
MMLASQNELGRIPSFSIDWNSFRRNGTSSSLYLW

SEQ ID NO: 3647 - DNA, 1001 bp, Homo sapiens
gtgcagagtatcattgcagcgcttttccagggagtaacgtgctgcactggttcagggctttgtctttattcacaacacattcatgtgcctcagcatgggggcagctgcactgttgcctgccagcctgtcctctttgactgccgaatgaaccaaaggataactctccattcgtgagagagagtgagctacagaggaagaaagaccacgcaaaagggagggggagagaggggggcgaagaggatgttctccggctcactcctacattaggtctctgtgcaaaggcagaggctgtgggagcagcatcaagcaagacttcgggcagtgattctaactattgcctatgaacaccgtggctgggacgactttgacgaggcaatttattacttacgcatagaacactggctgtgctgaaactgggagcgcaaacagccccttgttttctaatttagagacttgcatcttttcgacactcaacagtatcaagacactctgctactacagattgatttccaccatcaacacctttacctcttcccgcctgaaaataaaatatgaaatataacaagtaaatcgcaatctaccttgaatcttctggagaggaaagaagaaaccatgtctagacaaggtgctggaaagacccagggaagacacagatttgttcctttctccaccatgcctcactatgtgtcaccaaacttaattcagcatcagtgctccaaatactccatcctacaattagagaaaccactgaattccgatatcctccacccaaatggtaatgaagattggagaaagtgacgcccatgcatagcggagaagtggattgcagatataacaaggagcacagtaaactgagatgtaaaacaccttattcaacaacgaggatgctgactcaaaagcaaaagttgaagcacattatgaatgaatgtcaaaagggaaaaatctaaagctaacataaaagagtgcaactacatcaaattggataaggaatagtattttat

SEQ ID NO: 3648 - protein, 61 aa, Homo sapiens
MSRQGAGKTQGRHRFVPFSTMPHYVSPNLIQHQCSKYSILQLEKPLNSDILHPNGNEDWRK

SEQ ID NO: 3649 - DNA, 785 bp, Homo sapiens
gtgcagagtatcattgcagcgcttttccagggagtaacgtgctgcactggttcagggctttgtctttattcacaacacattcatgtgcctcagcatgggggcagctgcactgttgcctgccagcctgtcctctttgactgccgaatgaaccaaaggataactctccattcgtgagagagagtgagctacagaggaagaaagaccacgcaaaagggagggggagagaggggggcgaagaggatgttctccggctcactcctacattaggtctctgtgcaaaggcagaggctgtgggagcagcatcaagcaagacttcgggcagtgattctaactattgcctatgaacaccgtggctgggacgactttgacgaggcaatttattacttacgcatagaacactggctgtgctgaaactgggagcgcaaacagccccttgttttctaatttagagacttgcatcttttcgacactcaacagtatcaagacactctgctactacagattgatttccaccatcaacacctttacctcttcccgcctgaaaataaaatatgaaatataacaagtaaatcgcaatctaccttgaatcttctggagaggaaagaagaaaccatgtctagacaaggtgctggaaagacccagggaagacacagatgggatcatccagttgctggaaaacaaactcaggtctcccactggttctacattatgacggagtctcactctgtcacccaggctggagtgcaatggcacggtctcggctccctgcaaccttcacctcccag

SEQ ID NO: 3650 - protein, 56 aa, Homo sapiens [sequence omitted]

SEQ ID NO: 3651 - DNA, 961 bp, Homo sapiens
gtgcagagtatcattgcagcgcttttccagggagtaacgtgctgcactggttcagggctttgtctttattcacaacacattcatgtgcctcagcatgggggcagctgcactgttgcctgccagcctgtcctctttgactgccgaatgaaccaaaggataactctccattcgtgagagagagtgagctacagaggaagaaagaccacgcaaaagggagggggagagaggggggcgaagaggatgttctccggctcactcctacattaggtctctgtgcaaaggcagaggctgtgggagcagcatcaagcaagacttcgggcagtgattctaactattgcctatgaacaccgtggctgggacgactttgacgaggcaatttattacttacgcatagaacactggctgtgctgaaactgggagcgcaaacagccccttgttttctaatttagagacttgcatcttttcgacactcaacagtatcaagacactctgctactacagattgatttccaccatcaacacctttacctcttcccgcctgaaaataaaatatgaaatataacaagtaaatcgcaatctaccttgaatcttctggagaggaaagaagaaaccatgtctagacaaggtgctggaaagacccagggaagacacagggaaatcatctttcgggaatttatctaagaagaacttcttatgatatatgaagtctgggggtaagacctgcagtaatttcccttaagatactacagaatttccaaggacttgaggaataattgcactcttgaaagagcctatgaaaaaagaagagacttgggaaatttaacagaagttcactttccaccactgcgcaaactaaggaaaaacttaaagcagtaaatagctgcggttggcaaagctgttttggctcaggagcagctatcaggccttgataaggtccacaagtctgctgttctaaaatcaa

SEQ ID NO: 3652 - protein, 55 aa, Homo sapiens
NTGCAETGSANSPLFSNLETCIFSTLNSIKTLCYYRLISTINTFTSSRLKIKYEI

SEQ ID NO: 3653 - DNA, 966 bp, Homo sapiens
gtgcagagtatcattgcagcgcttttccagggagtaacgtgctgcactggttcagggctttgtctttattcacaacacattcatgtgcctcagcatgggggcagctgcactgttgcctgccagcctgtcctctttgactgccgaatgaaccaaaggataactctccattcgtgagagagagtgagctacagaggaagaaagaccacgcaaaagggagggggagagaggggggcgaagaggatgttctccggctcactcctacattaggtctctgtgcaaaggcagaggctgtgggagcagcatcaagcaagacttcgggcagtgattctaactattgcctatgaacaccgtggctgggacgactttgacgaggcaatttattacttacgcatagaacactggctgtgctgaaactgggagcgcaaacagccccttgttttctaatttagagacttgcatcttttcgacactcaacagtatcaagacactctgctactacagattgatttccaccatcaacacctttacctcttcccgcctgaaaataaaatatgaaatataacaagtaaatcgcaatctaccttgggaaatcatctttcgggaatttatctaagaagaacttcttatgtgaactcctgtgcttaagcaatcttcctgccttggcctcccaaagttctgagattatatggatatatgaagtctgggggtaagacctgcagtaatttcccttaagatactacagaatttccaaggacttgaggaataattgcactcttgaaagagcctatgaaaaaagaagagacttgggaaatttaacagaagttcactttccaccactgcgcaaactaaggaaaaacttaaagcagtaaatagctgcggttggcaaagctgttttggctcaggagcagctatcaggccttgataaggtccacaagtctgctgttctaaaatcaaaaaaaaaaaaaa

SEQ ID NO: 3654 - protein, 55 aa, Homo sapiens; identical to SEQ ID NO: 3652

SEQ ID NO: 3655 - DNA, 909 bp, Homo sapiens
caaagctcaagtctatttaaccactatattactctctgtgcacagaacaaaatgtcaataagaaattttacttggttttacctatgttttaaagatctaagcagataattttttcaaaatttatccagattttctgaatcttcttataaaggaaaaatatcttatgcctgcataaatgaaaggagaccaagattattgacttattcatttagcaaatacatagtgagcccctatcctccactaggcattgtgctaaatactaaggatatagtaatgataagatacataatcctttacctcatcaggctctgctcctagtgggtagacaaaagaaaagcagaaaaagatgacaacacaacgggctgaaatgaccataataccggtatgtgccaggtactgagagaggacgaaggcttcacgagcgtgtttgaaaccaagacttgataggaattttactttaacggaagatagcggtgagggcttgaacactaaggaattaatgagagatcagcccctttagcgactcaaagcatattataactccagctggtcaaaaagagaggaaataaataatataacaggaacaactggaagagcaagtgcagcatcaggttggtgcatttcttctgatcaaaaggtcgaattgcaactggtctttgaagagtgtgctggtgacagtgtgcaacctttgcagtagctcctggactggccctagactgctgtcaaattaaaccagcactgtaaagaagagagcaagttgaatgaagttgaatgaaggggcatcttaattccaatcctggctctaatgctgactgtaagcatgaccccggatgagttattcactctctcagtctcagtctcctcatccacaaagcagggatcacaataaatgaatagcacctttcacag

SEQ ID NO: 3656 - protein, 58 aa, Homo sapiens
RLKAYYNSSWSKREEINNITGTTGRASAASGWCISSDQKVELQLVFEECAGDSVQPLQ

SEQ ID NO: 3657 - DNA, 475 bp, Homo sapiens
cagatgctcatcttgctggctgtgtgtctccagaatcttctggagaggaaagaagaaaccatgtctagacaaggtgctggaaagacccagggaagacacaggtgagctaagaaagcagtagaaactgggtaattaaaagtcaacataatggctggaaacttgttcaaggagatataaaaagaaagaaaaaccaaaagagagactgtatggatgaactttgtctatttacaattttgtctaaggccaaatctgcagtctggtcccaccgcatgttatctaagttgttcatataccaatactaagagctactgaaattcttccaaaaaatcaaaatcatttcccctttgatttgctagttttccctcttggtaaataaagattcattttttagtaataactgacctgccctaagggttcaccactttcttctgatctcaaatcttgtgctaggtctttaggttacaattcatgaaac

SEQ ID NO: 3658 - protein, 33 aa, Homo sapiens
MLILLAVCLQNLLERKEETMSRQGAGKTQGRHR

SEQ ID NO: 3659 - DNA, 583 bp, Homo sapiens
gaggaggcagtcaaaaggaaaaacacaaatatctccaagatggcacttacaaaaagcaacaacaatgacaaagtataaatacaaacacacaccttgaagtttatgttcttactcaaatgcaagcatcaacaatggcctactgtcagcaagttaaatggctggggctgtttcagtctcccattacatgaagaatcttctggagaggaaagaagaaaccatgtctagacaaggtgctggaaagacccagggaagacacagatttgttcctttctccaccatgcctcactatgtgtcaccaaacttaattcagcatcagtgctccaaatactccatcctacaattagagaaaccactgaattccgatatcctccacccaaatggtaatgaagattggagaaagtgacgcccatgcatagcggagaagtggattgcagatataacaaggagcacagtaaactgagatgtaaaacaccttattcaacaacgaggatgctgactcaaaagcaaaagttgaagcacattatgaatgaatgtcaaaagggaaaaatctaaagctaacataaaagagtgcaactacatcaaa

SEQ ID NO: 3660 - protein, 82 aa, Homo sapiens
MAGAVSVSHYMKNLLERKEETMSRQGAGKTQGRHRFVPFSTMPHYVSPNLIQHQCSKYSILQLEKPLNSDILHPNGNEDWRK

SEQ ID NO: 3661 - DNA, 656 bp, Homo sapiens
agcagactaagtttccttaagaaagtaaaaattgacaataaacttgaaagacaaaaagaattaaccaggataagagggtgaaggaatcctgctatgggtggaacagaatgcataggcaaaagagaacttatggcacatgagaaggacttttaaaagtataactagagagggaaaaacaatgggagtgtggtataacatgaggctcaagaggtagagaagagcctcatgcgtggagtcatgcagtcctgaagacagcatttgaagctactgctatttggtaaagtatatgtctaaaaggactattaggagagacagaatcaagcttttttaggttttcagtaatagtgtgttgagaagacaaagcaattgttctcacaaatatgcttccttaagatcattacagaaatttgtttcctttctttcaaagagtatgttttgagagctaaaaaccatcctatcatatttggacaaatagaagtagttactgcttaaggatcaagtgattgtttcttttaaaagttgtgtatgctatgtttgataatcacagcttctaattctcaaaacaagctctcactctggcatatcttgaatttgaatcgacactatggatacgaatctgtatattcaaatatttttgtgtaagtgtgtttgtaaga

SEQ ID NO: 3662 - protein, 38 aa, Homo sapiens
MLCLIITASNSQNKLSLWHILNLNRHYGYESVYSNIFV

SEQ ID NO: 3663 - DNA, 509 bp, Homo sapiens
tctctatggtcggcgcctccttcttggcctagcatagctgcctcagctgctcaaaggacatgtccagcagctggcccaggtccacaccgcggtaggtgaacttgcggaagatccgctgcttcttctcctctacctctgccatcttgccggatcctctgaaaatgattcctattatctgtgcatctcggaagtagtgatccagaatggcagaccctaaatatgcaacaagagaaagtgaccatcaggaaatcatctttcgggaatttatctaagaagaacttcttatgagcaaatatcctaaaattcagattgttaaaatgacgtgaagaaaaaatgaacaggaaactgatgcagaggccacaaagaatattcaaacacaaattttccattttcaaaaaatgacactgctccaggaccctgtggatatgaggctggataattgattctctacttccaacttactcatgtgcatttgatacctctaacaaaaggagtaaatttttcacaat

SEQ ID NO: 3664 - protein, 59 aa, Homo sapiens
LPQLLKGHVQQLAQVHTAVGELAEDPLLLLLYLCHLAGSSENDSYYLCISEVVIQNGRP

SEQ ID NO: 3665 - DNA, 619 bp, Homo sapiens
ggcgcctccttcttggcctagcataggcgcctcagcagcgaatgcggcttgagcctcagcattccgccacaggccgtggttcagccgccgcagctggcgcgcgccgtacagctgcctcagctgctcaaaggacatgtccagcagctggcccaggtccacaccgcggtaggtgaacttgcggaagatccgctgcttcttctcctctacctctgccatcttgccggatcctctgaaaatgattccgtaagtgccagagtccttcacatatggattttaacctaattctgtaatgattttaattagctgatatattaaaaacaacgtcagtaagtttttcccttcaaggaagcctcaactttgagaaacggtgaattacgtgaggtgaacctcgtatttatgtgaggaaagctctgcactggttttgattctcacattttaattagctgatacattaaaaacaatataagtaatttttcccttccgggaaacctcaacttggagtaacgctggattacgtgagctaaacctcgtaattatgtgagaaaggctaagtattggttttgtttcccacatttacgtgaggaaattgaggcacaatgttaagtgtcacaagggccag

SEQ ID NO: 3666 - protein, 43 aa, Homo sapiens
MRLEPQHSATGRGSAAAAGARRTAASAAQRTCPAAGPGPHRGR

SEQ ID NO: 3667 - DNA, 532 bp, Homo sapiens
ggaatcccagtgattcaagatgcattggagagaaatacagactgaagataattggttacccatctagaaagagatatatgaagtctgggggtaagacctgcagtaatttcccttaagttactgatcgtggagcctctccaggactacaggctcttcctcagcggctgccaagctcctcttagggaagccggggaacttctgaatgcccaagtataccctgctggaggcacaggaatcctcttggaagctttgtctggacatgctttaataccgtccatttctactgttgccataccaagccgctactggtcaccactgtaaatctttctgctgttttttataaccacaaagtatagcacaatttctgtctgctttcatgcacctaaaactattgtggtttttgcctttcccggtctcattagctaaaacaaagagttgataaaggcacaggccctttctcaagaaacaaaatgttgtctgtcttctttctgcagtgaaacagaatgtaaagtccagaaataaacgtgtaatt

SEQ ID NO: 3668 - protein, 79 aa, Homo sapiens
SLGVRPAVISLKLLIVEPLQDYRLFLSGCQAPLREAGELLNAQVYPAGGTGILLEALSGHALIPSISTVAIPSRYWSPL

SEQ ID NO: 3669 - DNA, 3101 bp, Homo sapiens
ggcgcggtcgctaagccagaagcggagtcgcgggcgcggggcggggcctggacccgggcctggacccggagggcgggtccctgggcctcgtagctcccgggcccggacgcgcgctcacaggcgcgcgcgaggacgcgctccggggacgcgcgaggacgccgtggcgggagaagcgtttccggtggcggcggaggctgcactgagcgggacctgcgagcagcgcgggcggcagcccgggggaagcgtccgggaccatgtctggagaactaccaccaaacattaacatcaaggaacctcgatgggatcaaagcactttcattggacgagccaatcatttcttcactgtaactgaccccaggaacattctgttaaccaacgaacaactcgagagtgcgagaaaaatagtacatgattacaggcaaggaattgttcctcctggtcttacagaaaatgaattgtggagagcaaagtacatctatgattcagcttttcatcctgacactggtgagaagatgattttgataggaagaatgtcagcccaggttcccatgaacatgaccatcacaggttgtatgatgacgttttacaggactacgccggctgtgctgttctggcagtggattaaccagtccttcaatgccgtcgtcaattacaccaacagaagtggagacgcacccctcactgtcaatgagttgggaacagcttacgtttctgcaacaactggtgccgtagcaacagctctaggactcaatgcattgaccaagcatgtctcaccactgataggacgttttgttccctttgctgccgtagctgctgctaattgcattaatattccattaatgaggcaaagggaactcaaagttggcattcccgtcacggatgagaatgggaaccgcttgggggagtcggcgaacgctgcgaaacaagccatcacgcaagttgtcgtgtccaggattctcatggcagcccctggcatggccatccctccattcattatgaacactttggaaaagaaagcctttttgaagaggttcccatggatgagtgcacccattcaagttgggttagttggcttctgtttggtgtttgctacacccctgtgttgtgccctgtttcctcagaaaagttccatgtctgtgacaagcttggaggccgagttgcaagctaagatccaagagagccatcctgaattgcgacgcgtgtacttcaataagggattgtaaagcagggaggaaacctctgcagctcattctgccactgcaaagctggtgtagccatgctggtgagaaaaatcctgttcaacctgggttctcccagttacggaaaccttttaaagatccacattagccttttagaataaagctgctactttaacagagcacctggcgtgggccaagtgcctgatactcccttacactgaatcatgttatgatttatagaaatacctttcctgtagcttttatagtcattgtttttcaaagacgatataccagccctcacccaggttttaaaaaagcactggtaggcatagaataggtgctcagtatatggtcagtaaatgttctattgattatcaatcagtgaaaaaagaaatctgtttaaaatactgaattttcatctcactcccattgcaaatcaaggagatctcagcagtgaactgggaaaatacaaaagctctgggctaatctataaaaacttaccctgaaatattaagggcagtttgcttctagtttggggattgcgctagcccaatgaaggtgatgaagcttttggatttggagggtaaaagctccttcacaccccttccaaaagtcagtcacagaccactgcaacatgccttccctgctggatcattatatacattcagattgtgagtggattgccttggttgacttttaatttattgttttttgttcttataaagatgataatcttaccttgcagttattgactttatattcaattatttacatcaaataatgaaataactgaaatgtacaaatgtcaaattttggaagtatattcaataccaatgctgtatgagtgggctgaatccagttcattgttttttttttggtaagaagtgagactacagttccagctacctacatgtcttttcttgtcatccttatagatctctttggctttcagaaagatacagtgataatgtgtgtatgaatcagtcacaatgaattttacttgaatattgtatgttgcattccacttcatttgaaaataatgaaaccatgtaccactgtttacatcatctgtagtgatttcatagataatatatttaatatgacagattatgtttcaactctgtagatgtttaacgtcatagacagttggccctctgtatccgtgagctctatatctgtgaattcaaccaagtttggatggaaaattttttttttttttttttttttgagacggagtctcgctctgtcacccaggctggagtgcagtggcgtagtctcggctcactgcaagctccgcctcccgggttcacgccgttctcctgcctcagcctctctgagaagctgggactacaggcgcccgccaccacgcccggctaatttttttgtatttttagtagagacggggtttcactgtggtctcgatctcctgacctcgtgatccgcccgccttggcctcccaaggtgctgggattacaagcgtgagccaccgcacccggcctgaaaatattttctaaaaagataaaaaatatacataacgatgaaaaataatacaaatttaaaaaccaatacagtataacaactatttacatagtgcttacattgtattaggtgttataagcaatctagagatgatttagcaagtatacaggaggatgtgcctaggttatatgcaaatactgtgccattttatatcaggaacttgagcatctgcagatattggtatcggagggcggtcctggaaccaagcatccacggatactgaggggtgacatttcatgaagtgtagatcattgtattcagagattgtaaatgaaaaaaatatagaaactatttagttttggtagattttttttctgacaatgtgaccagactgaatttcctcataaagaaaaaatggcgtgc

SEQ ID NO: 3670 - protein, 322 aa, Homo sapiens; identical to SEQ ID NO: 398

SEQ ID NO: 3671 - DNA, 3170 bp, Homo sapiens
ggcgcggtcgctaagccagaagcggagtcgcgggcgcggggcggggcctggacccgggcctggacccggagggcgggtccctgggcctcgtagctcccgggcccggacgcgcgctcacaggcgcgcgcgaggacgcgctccggggacgcgcgaggacgccgtggcgggagaagcgtttccggtggcggcggaggctgcactgagcgggacctgcgagcagcgcgggcggcagcccgggggaagcgtccgggaccatgtctggagaactaccaccaaacattaacatcaaggaacctcgatgggatcaaagcactttcattggacgagccaatcatttcttcactgtaactgaccccaggaacattctgttaaccaacgaacaactcgagagtgcgagaaaaatagtacatgattacaggcaaggaattgttcctcctggtcttacagaaaatgaattgtggagagcaaagtacatctatgattcagcttttcatcctgacactggtgagaagatgattttgataggaagaatgtcagcccaggttcccatgaacatgaccatcacaggttgtatgatgacgttttacaggactacgccggctgtgctgttctggcagtggattaaccagtccttcaatgccgtcgtcaattacaccaacagaagtggagacgcacccctcactgtcaatgagttgggaacagcttacgtttctgcaacaactggtgccgtagcaacagctctaggactcaatgcattgaccaagcatgtctcaccactgataggacgttttgttccctttgctgccgtagctgctgctaattgcattaatattccattaatgaggcaaagggaactcaaagttggcattcccgtcacggatgagaatgggaaccgcttgggggagtcggcgaacgctgcgaaacaagccatcacgcaagttgtcgtgtccaggattctcatggcagcccctggcatggccatccctccattcattatgaacactttggaaaagaaagcctttttgaagaggttcccatggatgagtgcacccattcaagttgggttagttggcttctgtttggtgtttgctacacccctgtgttgtgccctgtttcctcagaaaagttccatgtctgtgacaagcttggaggccgagttgcaagctaagatccaagagagccatcctgaattgcgacgcgtgtacttcaataagggattgtaaagcagggaggaaacctctgcagctcattctgccactgcaaagctggtgtagccatgctggtgagaaaaatcctgttcaacctgggttctcccagttacggaaaccttttaaagatccacattagccttttagaataaagctgctactttaacagagcacctggcgtgggccaagtgcctgatactcccttacactgaatcatgttatgatttatagaaatacctttcctgtagcttttatagtcattgtttttcaaagacgatataccagccctcacccaggttttaaaaaagcactggtaggcatagaataggtgctcagtatatggtcagtaaatgttctattgattatcaatcagtgaaaaaagaaatctgtttaaaatactgaattttcatctcactcccattgcaaatcaaggagatctcagcagtgaactgggaaaatacaaaagctctgggctaatctataaaaacttaccctgaaatattaagggcagtttgcttctagtttggggattgcgctagcccaatgaaggtgatgaagcttttggatttggagggtaaaagctccttcacaccccttccaaaagtcagtcacagaccactgcaacatgccttccctgctggatcattatatacattcagattgtgagtggattgccttggttgacttttaatttattgttttttgttcttataaagatgataatcttaccttgcagttattgactttatattcaattatttacatcaaataatgaaataactgaaatgtacaaatgtcaaattttggaagtatattcaataccaatgctgtatgagtgggctgaatccagttcattgttttttttttggtaagaagtgagactacagttccagctacctacatgtcttttcttgtcatccttatagatctctttggctttcagaaagatacagtgataatgtgtgtatgaatcagtcacaatgaattttacttgaatattgtatgttgcattccacttcatttgaaaataatgaaaccatgtaccactgtttacatcatctgtagtgatttcatagataatatatttaatatgacagattatgtttcaactctgtagatgtttaacgtcatagacagttggccctctgtatccgtgagctctatatctgtgaattcaaccaagtttggatggaaaattttttttttttttttttttttgagacggagtctcgctctgtcacccaggctggagtgcagtggcgtagtctcggctcactgcaagctccgcctcccgggttcacgccgttctcctgcctcagcctctctgagaagctgggactacaggcgcccgccaccacgcccggctaatttttttgtatttttagtagagacggggtttcactgtggtctcgatctcctgacctcgtgatccgcccgccttggcctcccaaggtgctgggattacaagcgtgagccaccgcacccggcctgaaaatattttctaaaaagataaaaaatatacataacgatgaaaaataatacaaatttaaaaaccaatacagtataacaactatttacatagtgcttacattgtattaggtgttataagcaatctagagatgatttagcaagtatacaggaggatgtgcctaggttatatgcaaatactgtgccattttatatcaggaacttgagcatctgcagatattggtatcggagggcggtcctggaaccaagcatccacggatactgaggggtgacatttcatgaagtgtagatcattgtattcagagattgtaaatgaaaaaaatatagaaactatttagttttggtagattttttttctgacaatgtgaccagactgaatttcctcataaagaaaaaatggcgtgccttgtgtctgtgtttctcttttctctgaaaggattaatagatctgaagctttgggccactcagagcctt

SEQ ID NO: 3672 - protein, 322 aa, Homo sapiens; identical to SEQ ID NO: 398

SEQ ID NO: 3673 - DNA, 4227 bp, Homo sapiens
ggcgcggtcgctaagccagaagcggagtcgcgggcgcggggcggggcctggacccgggcctggacccggagggcgggtccctgggcctcgtagctcccgggcccggacgcgcgctcacaggcgcgcgcgaggacgcgctccggggacgcgcgaggacgccgtggcgggagaagcgtttccggtggcggcggaggctgcactgagcgggacctgcgagcagcgcgggcggcagcccgggggaagcgtccgggaccatgtctggagaactaccaccaaacattaacatcaaggaacctcgatgggatcaaagcactttcattggacgagccaatcatttcttcactgtaactgaccccaggaacattctgttaaccaacgaacaactcgagagtgcgagaaaaatagtacatgattacaggcaaggaattgttcctcctggtcttacagaaaatgaattgtggagagcaaagtacatctatgattcagcttttcatcctgacactggtgagaagatgattttgataggaagaatgtcagcccaggttcccatgaacatgaccatcacaggttgtatgatgacgttttacaggactacgccggctgtgctgttctggcagtggattaaccagtccttcaatgccgtcgtcaattacaccaacagaagtggagacgcacccctcactgtcaatgagttgggaacagcttacgtttctgcaacaactggtgccgtagcaacagctctaggactcaatgcattgaccaagcatgtctcaccactgataggacgttttgttccctttgctgccgtagctgctgctaattgcattaatattccattaatgaggcaaagggaactcaaagttggcattcccgtcacggatgagaatgggaaccgcttgggggagtcggcgaacgctgcgaaacaagccatcacgcaagttgtcgtgtccaggattctcatggcagcccctggcatggccatccctccattcattatgaacactttggaaaagaaagcctttttgaagaggttcccatggatgagtgcacccattcaagttgggttagttggcttctgtttggtgtttgctacacccctgtgttgtgccctgtttcctcagaaaagttccatgtctgtgacaagcttggaggccgagttgcaagctaagatccaagagagccatcctgaattgcgacgcgtgtacttcaataagggattgtaaagcagggaggaaacctctgcagctcattctgccactgcaaagctggtgtagccatgctggtgagaaaaatcctgttcaacctgggttctcccagttacggaaaccttttaaagatccacattagccttttagaataaagctgctactttaacagagcacctggcgtgggccaagtgcctgatactcccttacactgaatcatgttatgatttatagaaatacctttcctgtagcttttatagtcattgtttttcaaagacgatataccagccctcacccaggttttaaaaaagcactggtaggcatagaataggtgctcagtatatggtcagtaaatgttctattgattatcaatcagtgaaaaaagaaatctgtttaaaatactgaattttcatctcactcccattgcaaatcaaggagatctcagcagtgaactgggaaaatacaaaagctctgggctaatctataaaaacttaccctgaaatattaagggcagtttgcttctagtttggggattgcgctagcccaatgaaggtgatgaagcttttggatttggagggtaaaagctccttcacaccccttccaaaagtcagtcacagaccactgcaacatgccttccctgctggatcattatatacattcagattgtgagtggattgccttggttgacttttaatttattgttttttgttcttataaagatgataatcttaccttgcagttattgactttatattcaattatttacatcaaataatgaaataactgaaatgtacaaatgtcaaattttggaagtatattcaataccaatgctgtatgagtgggctgaatccagttcattgttttttttttggtaagaagtgagactacagttccagctacctacatgtcttttcttgtcatccttatagatctctttggctttcagaaagatacagtgataatgtgtgtatgaatcagtcacaatgaattttacttgaatattgtatgttgcattccacttcatttgaaaataatgaaaccatgtaccactgtttacatcatctgtagtgatttcatagataatatatttaatatgacagattatgtttcaactctgtagatgtttaacgtcatagacagttggccctctgtatccgtgagctctatatctgtgaattcaaccaagtttggatggaaaattttttttttttttttttttttgagacggagtctcgctctgtcacccaggctggagtgcagtggcgtagtctcggctcactgcaagctccgcctcccgggttcacgccgttctcctgcctcagcctctctgagaagctgggactacaggcgcccgccaccacgcccggctaatttttttgtatttttagtagagacggggtttcactgtggtctcgatctcctgacctcgtgatccgcccgccttggcctcccaaggtgctgggattacaagcgtgagccaccgcacccggcctgaaaatattttctaaaaagataaaaaatatacataacgatgaaaaataatacaaatttaaaaaccaatacagtataacaactatttacatagtgcttacattgtattaggtgttataagcaatctagagatgatttagcaagtatacaggaggatgtgcctaggttatatgcaaatactgtgccattttatatcaggaacttgagcatctgcagatattggtatcggagggcggtcctggaaccaagcatccacggatactgaggggtgacatttcatgaagtgtagatcattgtattcagagattgtaaatgaaaaaaatatagaaactatttagttttggtagattttttttctgacaatgtgaccagactgaatttcctcataaagaaaaaatggcgtgccttgtgtctgtgtttctcttttctctgaaaggattaatagatctgaagctttgggccactcagagccttccttgatgctgccagagtcttcttatttagattttctgtcttaaaccattggaagcaaaacggttttcccatgacattctggccttggacagattctgttgtcctcgacgcgtctctttataaagtggtaaaagcctgaaattcagggcagctctccatgaggtgctgaagggctcttttcataagaagctaaggcactgctgcctgccccaggtgtcccgctcctctcagagtcctccccctaccaggtagtgtgtagctccatttcagaatgttaacctccagtgaagagctaatgactggttagaagattgacaaactaaccaaaattttacacactccggttatgtgtgtgaaaggttataaaaggaatggccgggtgcggtggctcacccctgtaatcccagcactttgggaggccgaggcgggtggatcacctgaggtcaggagtttgagaccagcctggccaacatggagaaaccccgcctctactaaaaatacaaaaaattagccaggcatggaggcacatgcctataatcccagctactcgggaggctgaggtaggagaatcgcttgaatccgggagctggaggttgcagtgagccaagatcgcaccattgcactccagcctgggcaacaagagcgaaactccatctcaaaaaaaaaaaaaagagattataaaagggatgatgaacatggagctgcatctttttaaacgttgttttttgatgcttcagactcttaatgcttttatataaagctatcaactgtatgttgatcacagtttataagaaagaacaaatcaagattggcaatccttgccgatcttttagaaataccttttctggagaaaaaaaaatccacatgaagtgcaataagcttataaagctaagtagttattaatatttctattaacatgatacaaaggatgatgattgtaagtgtttactgactggcagcttttatttcagtattagcacagcgtcttgccagtgttggaggccatgtattatttcagttcaactggatgaaatgttaaataaactcagaatgaaaa

SEQ ID NO: 3674 - protein, 322 aa, Homo sapiens; identical to SEQ ID NO: 398

SEQ ID NO: 3675 - DNA, 1994 bp, Homo sapiens
ggcgcggtcgctaagccagaagcggagtcgcgggcgcggggcggggcctggacccgggcctggacccggagggcgggtccctgggcctcgtagctcccgggcccggacgcgcgctcacaggcgcgcgcgaggacgcgctccggggacgcgcgaggacgccgtggcgggagaagcgtttccggtggcggcggaggctgcactgagcgggacctgcgagcagcgcgggcggcagcccgggggaagcgtccgggaccatgtctggagaactaccaccaaacattaacatcaaggaacctcgatgggatcaaagcactttcattggacgagccaatcatttcttcactgtaactgaccccaggaacattctgttaaccaacgaacaactcgagagtgcgagaaaaatagtacatgattacaggcaaggaattgttcctcctggtcttacagaaaatgaattgtggagagcaaagtacatctatgattcagcttttcatcctgacactggtgagaagatgattttgataggaagaatgtcagcccaggttcccatgaacatgaccatcacaggttgtatgatgacgttttacaggactacgccggctgtgctgttctggcagtggattaaccagtccttcaatgccgtcgtcaattacaccaacagaagtggagacgcacccctcactgtcaatgagttgggaacagcttacgtttctgcaacaactggtgccgtagcaacagctctaggactcaatgcattgaccaagcatgtctcaccactgataggacgttttgttccctttgctgccgtagctgctgctaattgcattaatattccattaatgaggcaaagggaactcaaagttggcattcccgtcacggatgagaatgggaaccgcttgggggagtcggcgaacgctgcgaaacaagccatcacgcaagttgtcgtgtccaggattctcatggcagcccctggcatggccatccctccattcattatgaacactttggaaaagaaagcctttttgaagaggttcccatggatgagtgcacccattcaagttgggttagttggcttctgtttggtgtttgctacacccctgtgttgtgccctgtttcctcagaaaagttccatgtctgtgacaagcttggaggccgagttgcaagctaagatccaagagagccatcctgaattgcgacgcgtgtacttcaataagggattgtaaagcagggaggaaacctctgcagctcattctgccactgcaaagctggtgtagccatgctggtgagaaaaatcctgttcaacctgggttctcccagttacggaaaccttttaaagatccacattagccttttagaataaagctgctactttaacagagcacctggcgtgggccaagtgcctgatactcccttacactgaatcatgttatgatttatagaaatacctttcctgtagcttttatagtcattgtttttcaaagacgatataccagccctcacccaggttttaaaaaagcactggtaggcatagaataggtgctcagtatatggtcagtaaatgttctattgattatcaatcagtgaaaaaagaaatctaaaaaaaaaaaagagattataaaagggatgatgaacatggagctgcatctttttaaacgttgttttttgatgcttcagactcttaatgcttttatataaagctatcaactgtatgttgatcacagtttataagaaagaacaaatcaagattggcaatccttgccgatcttttagaaataccttttctggagaaaaaaaaatccacatgaagtgcaataagcttataaagctaagtagttattaatatttctattaacatgatacaaaggatgatgattgtaagtgtttactgactggcagcttttatttcagtattagcacagcgtcttgccagtgttggaggccatgtattatttcagttcaactggatgaaatgttaaataaactcagaatgaaaa

SEQ ID NO: 3676 - protein, 322 aa, Homo sapiens; identical to SEQ ID NO: 398

SEQ ID NO: 3677 - DNA, 773 bp, Homo sapiens
ctagacacaaaatggagccagcacagggcgcgtctcggcgcatcctcctcagcccaggccccgtgcgtaaggagcgctccgtgtcagcgcgcttgctagaccccattgtgctgttgactttaatgtgaataggaaataagttttgatgtttgtttgttttttaagtggggctcctgttttttaaaaatggatcaatttacctggagtgcaggctgctcctgagcttgaaggtggaagtcagttcatgcgtgaaagaagtcttgcctaattgaaacatggcatcacggttaataattaaaatgttatctgatttgagatcagctgtttttgtgagaatgctaatgtggcattcctgattagtctgtatgtttgtttgtttgatttttaattctgggtgcagaggaacacagattatcaaatccagttggtatttcttatgccactatagtacaacttgaaatcccttttaagtagaggaaacagtgttgtattcatttcctattgctgttataacaaattactacatatttgagtagcttaaagcaacacagatatattatcttagagttctggaggtcagaagtctagaacaagtgggccttccttctggaggctctagggcagagcccctttccctgccctttccagctgctaggggctgcagctcacagcccagcatcactccaacctctgcttgttcccacatctgtttctctggctctgcctcttctgcctccttccatctcttatagggagccttgtgatgacattgg

SEQ ID NO: 3678 - protein, 38 aa, Homo sapiens [sequence omitted]

SEQ ID NO: 3679 - DNA, 838 bp, Homo sapiens
agttccatgtctgtgacaagcttggaggccgagttgcaagctaagatccaagagagccatcctgaattgcgacgcgtgtacttcaataagggattgtaaagcagggaggaaacctctgcagctcattctgccactgcaaagctggtgtagccatgctggtgagaaaaatcctgttcaacctgggttctcccagttacggaaaccttttaaagatccacattagccttttagaataaagctgctactttaacagagcacctggcgtgggccaagtgcctgatactcccttacactgaatcatgttatgatttatagaaatacctttcctgtagcttttatagtcattgtttttcaaagacgatataccagccctcacccaggttttaaaaaagcactggtaggcatagaataggtgctcagtatatggtcagtaaatgttctattgattatcaatcagtgaaaaaagaaatctgtttaaaataaatacaaatttaaaaaccaatacagtataacaactatttacatagtgcttacattgtattaggtgttataagcaatctagagatgatttagcaagtatacaggaggatgtgcctaggttatatgcaaatactgtgccattttatatcaggaacttgagcatctgcagatattggtatcggagggcggtcctggaaccaagcatccacggatactgaggggtgacatttcatgaagtgtagatcattgtattcagagattgtaaatgaaaaaaatatagaaactatttagttttggtagattttttttctgacaatgtgaccagactgaatttcctcataaagaaaaaatggcgtgc

SEQ ID NO: 3680 - protein, 35 aa, Homo sapiens
MIYRNTFPVAFIVIVFQRRYTSPHPGFKKALVGIE

SEQ ID NO: 3681 - DNA, 1964 bp, Homo sapiens
agttccatgtctgtgacaagcttggaggccgagttgcaagctaagatccaagagagccatcctgaattgcgacgcgtgtacttcaataagggattgtaaagcagggaggaaacctctgcagctcattctgccactgcaaagctggtgtagccatgctggtgagaaaaatcctgttcaacctgggttctcccagttacggaaaccttttaaagatccacattagccttttagaataaagctgctactttaacagagcacctggcgtgggccaagtgcctgatactcccttacactgaatcatgttatgatttatagaaatacctttcctgtagcttttatagtcattgtttttcaaagacgatataccagccctcacccaggttttaaaaaagcactggtaggcatagaataggtgctcagtatatggtcagtaaatgttctattgattatcaatcagtgaaaaaagaaatctgtttaaaataaatacaaatttaaaaaccaatacagtataacaactatttacatagtgcttacattgtattaggtgttataagcaatctagagatgatttagcaagtatacaggaggatgtgcctaggttatatgcaaatactgtgccattttatatcaggaacttgagcatctgcagatattggtatcggagggcggtcctggaaccaagcatccacggatactgaggggtgacatttcatgaagtgtagatcattgtattcagagattgtaaatgaaaaaaatatagaaactatttagttttggtagattttttttctgacaatgtgaccagactgaatttcctcataaagaaaaaatggcgtgccttgtgtctgtgtttctcttttctctgaaaggattaatagatctgaagctttgggccactcagagccttccttgatgctgccagagtcttcttatttagattttctgtcttaaaccattggaagcaaaacggttttcccatgacattctggccttggacagattctgttgtcctcgacgcgtctctttataaagtggtaaaagcctgaaattcagggcagctctccatgaggtgctgaagggctcttttcataagaagctaaggcactgctgcctgccccaggtgtcccgctcctctcagagtcctccccctaccaggtagtgtgtagctccatttcagaatgttaacctccagtgaagagctaatgactggttagaagattgacaaactaaccaaaattttacacactccggttatgtgtgtgaaaggttataaaaggaatggccgggtgcggtggctcacccctgtaatcccagcactttgggaggccgaggcgggtggatcacctgaggtcaggagtttgagaccagcctggccaacatggagaaaccccgcctctactaaaaatacaaaaaattagccaggcatggaggcacatgcctataatcccagctactcgggaggctgaggtaggagaatcgcttgaatccgggagctggaggttgcagtgagccaagatcgcaccattgcactccagcctgggcaacaagagcgaaactccatctcaaaaaaaaaaaaaagagattataaaagggatgatgaacatggagctgcatctttttaaacgttgttttttgatgcttcagactcttaatgcttttatataaagctatcaactgtatgttgatcacagtttataagaaagaacaaatcaagattggcaatccttgccgatcttttagaaataccttttctggagaaaaaaaaatccacatgaagtgcaataagcttataaagctaagtagttattaatatttctattaacatgatacaaaggatgatgattgtaagtgtttactgactggcagcttttatttcagtattagcacagcgtcttgccagtgttggaggccatgtattatttcagttcaactggatgaaatgttaaataaactcagaatgaaaa

SEQ ID NO: 3682 - protein, 54 aa, Homo sapiens
MCVKGYKRNGRVRWLTPVIPALWEAEAGGSPEVRSLRPAWPTWRNPASTKNTKN

SEQ ID NO: 3683 - DNA, 2553 bp, Homo sapiens
ggcgcggggcgcaggccgtgcgcgcgccgcccgctgcatccctgcccggagcgcagccggcgcgggcgcgggaccgaggcgaaccgggtgcggagccaatacccgcggcagcagcaccagctcctgccctccactgactccagagagggagatccccagtacttgactccatcacgcagatgggagcaggcaccagctatggagagggatacagctgcgtctccacatgacccatcctgcatgacaccaaagccaccgccagacagtgcctcggattctatgcaaaacctgggaagcggagacctaccccagccccgggaggaagctagctcttcaggggaccgtctgaggactggagtttgatccatgaacctggcttcgaggccttgcttttctctcttcttcattcatattcattcccaacaccttagaaggtgttgcttaatttatttctagaaaagcagcccagagtcagtcattgaagccttccccaccccctggccaaaaaaaaaaaaaaaaaaaaactggacacattttggatctgttgggagcttggagtccagtggttggcatagttgtcacattgggagcagagaagaagcaaccaggggccctgatcaggggactgagccgtagagtcccaggatggcacccaatggcacagcctcttccttttgcctggactctaccgcatgcaagatcaccatcaccgtggtccttgcggtcctcatcctcatcaccgttgctggcaatgtggtcgtctgtctggccgtgggcttgaaccgccggctccgcaacctgaccaattgtttcatcgtgtccttggctatcactgacctgctcctcggcctcctggtgctgcccttctctgccatctaccagctgtcctgcaagtggagctttggcaaggtcttctgcaatatctacaccagcctggatgtgatgctctgcacagcctccattcttaacctcttcatgatcagcctcgaccggtactgcgctgtcatggacccactgcggtaccctgtgctggtcaccccagttcgggtcgccatctctctggtcttaatttgggtcatctccattaccctgtcctttctgtctatccacctggggtggaacagcaggaacgagaccagcaagggcaatcataccacctctaagtgcaaagtccaggtcaatgaagtgtacgggctggtggatgggctggtcaccttctacctcccgctactgatcatgtgcatcacctactaccgcatcttcaaggtcgcccgggatcaggccaagaggatcaatcacattagctcctggaaggcagccaccatcagggagcacaaagccacagtgacactggccgccgtcatgggggccttcatcatctgctggtttccctacttcaccgcgtttgtgtaccgtgggctgagaggggatgatgccatcaatgaggtgttagaagccatcgttctgtggctgggctatgccaactcagccctgaaccccatcctgtatgctgcgctgaacagagacttccgcaccgggtaccaacagctcttctgctgcaggctggccaaccgcaactcccacaaaacttctctgaggtccaacgcctctcagctgtccaggacccaaagccgagaacccaggcaacaggaagagaaacccctgaagctccaggtgtggagtgggacagaagtcacggccccccagggagccacagacagaccatggctttgccttccagaatgctggtctgtggaactgacccattcattcattcatttgttcattcattcatttgcaaacattcatccaattcccaccacatgccaggaattatgatgaatactggggatgtagaaatgagattttttgggtttatggtgatgaagttacagaaaatcaatggcacagccctggtctcagctctgccgtcactcaacttgtatcttgagcaagttcctccccatctcaggcctcagtttcctcatcgcatagagagttggtcttccctcaccgggcttcctacttgccctccagagttgcctgaagctcacatgagcgaagggacatgaacatgctctgccatctcccaataggacataagtccacgctggagcgctgagcatcagactcaagaaaagcttgcgtggatattgcagacccaccaacaagggctccaggttctggagttgtggaggcaaaactgcctagtgagaaccctacatattccctctggtccttgcagctgccacccccattcccaggggtggagtgtccctccatagacttggatcctgggccctctgctccttcaccactgtccatctgaagcaagcctggttgctccggcactgaactgtggcctcgggccctggaccctgcccctcaaatccaccctccaagtgcacacctggaaacttccgcttccagtcctgatgggtaaaacgcccacctaccatatccttgcgcaatctcttattcaggaggcagctggagtgcaaagctgacttagttcacaaagtataaaaaaatacagggatgtggttcagctag

SEQ ID NO: 3684 - protein, 397 aa, Homo sapiens
MAPNGTASSFCLDSTACKITITVVLAVLILITVAGNVVVCLAVGLNRRLRNLTNCFIVSLAITDLLLGLLVLPFSAIYQLSCKWSFGKVFCNIYTSLDVMLCTASILNLFMISLDRYCAVMDPLRYPVLVTPVRVAISLVLIWVISITLSFLSIHLGWNSRNETSKGNHTTSKCKVQVNEVYGLVDGLVTFYLPLLIMCITYYRIFKVARDQAKRINHISSWKAATIREHKATVTLAAVMGAFIICWFPYFTAFVYRGLRGDDAINEVLEAIVLWLGYANSALNPILYAALNRDFRTGYQQLFCCRLANRNSHKTSLRSNASQLSRTQSREPRQQEEKPLKLQVWSGTEVTAPQGATDRPWLCLPECWSVELTHSFIHLFIHSFANIHPIPTTCQEL

SEQ ID NO: 3685 - DNA, 1847 bp, Homo sapiens
ctcctgccctccactgactccagagagggagatccccagtacttgactccatcacgcagatgggagcaggcaccagctatggagagggatacagctgcgtctccacatgacccatcctgcatgacaccaaagccaccgccagacagtgcctcggattctatgcaaaacctgggaagcggagacctaccccagccccgggaggaagctagctcttcaggggaccgtctgaggactggagtttgatccatgaacctggcttcgaggccttgcttttctctcttcttcattcatattcattcccaacaccttagaaggtgttgcttaatttatttctagaaaagcagcccagagtcagtcattgaagccttccccaccccctggccaaaaaaaaaaaaaaaaaaaaactggacacattttggatctgttgggagcttggagtccagtggttggcatagttgtcacattgggagcagagaagaagcaaccaggggccctgatcaggggactgagccgtagagtcccaggatggcacccaatggcacagcctcttccttttgcctggactctaccgcatgcaagatcaccatcaccgtggtccttgcggtcctcatcctcatcaccgttgctggcaatgtggtcgtctgtctggccgtgggcttgaaccgccggctccgcaacctgaccaattgtttcatcgtgtccttggctatcactgacctgctcctcggcctcctggtgctgcccttctctgccatctaccagctgtcctgcaagtggagctttggcaaggtcttctgcaatatctacaccagcctggatgtgatgctctgcacagcctccattcttaacctcttcatgatcagcctcgaccggtactgcgctgtcatggacccactgcggtaccctgtgctggtcaccccagttcgggtcgccatctctctggtcttaatttgggtcatctccattaccctgtcctttctgtctatccacctggggtggaacagcaggaacgagaccagcaagggcaatcataccacctctaagtgcaaagtccaggtcaatgaagtgtacgggctggtggatgggctggtcaccttctacctcccgctactgatcatgtgcatcacctactaccgcatcttcaaggtcgcccgggatcaggccaagaggatcaatcacattagctcctggaaggcagccaccatcagggagcacaaagccacagtgacactggccgccgtcatgggggccttcatcatctgctggtttccctacttcaccgcgtttgtgtaccgtgggctgagaggggatgatgccatcaatgaggtgttagaagccatcgttctgtggctgggctatgccaactcagccctgaaccccatcctgtatgctgcgctgaacagagacttccgcaccgggtaccaacagctcttctgctgcaggctggccaaccgcaactcccacaaaacttctctgaggtccaacgcctctcagctgtccaggacccaaagccgagaacccaggcaacaggaagagaaacccctgaagctccaggtgtggagtgggacagaagtcacggccccccagggagccacagacaggtaatagccctagccattggtgcacaggatgggggcaatgggaggggatgctactgatgggaatgattaagggagctgctgtttaggtggtgctggtttatgttctaggaactcttcatgagcactttgtaaacaccctcttgcttaatcctcccaacggcccccaaaggtagaacttagctcccttttaaaaggagcacattaaaattctcagaggacttggcaagggccgcacagctggggcct

SEQ ID NO: 3686 - protein, 359 aa, Homo sapiens; identical to SEQ ID NO: 400

SEQ ID NO: 3687 - DNA, 4450 bp, Homo sapiens
tcctttctcgggaagcttgggtctccctgggagcgggtctgcccttagggggaggcctctgggctctgtgccctgcagctcggcaggcattcgaggcggacagaaacggggcttggcgccccccgcgtgcacgtgtgctagcccaggcaggagggagcgcctcggcggaggagtcaaggaagagggggagggagaaacgcgccagaacctcggcccgggcgccctcgtcggccgcggaggagctgcagcctccaacaggaaggtgtggtccctgccatgctatctgctctgctcagcgactgaaggtgcccgcatcccagctctgccaggaagcaaaggttgtcacatcttcccaagccaggccagccaggagcgctgcatgcaaattctgccgtgggctaaggcacgctaaccagagccggcggcatggacttcgtcatgaagcaggcccttggaggggccacaaaggacatggggaagatgctggggggagaggaggagaaggaccccgacgcgcagaaaaaggaggaggagcggcaggaggcgctgcggcagcaggaggaggagcgtaaggccaagcacgcgcgcatggaggcggagcgggagaaggtccggcagcagatccgagataagtatgggctgaagaagaaggaggagaaggaagcagaggagaaagcagccctggagcagccctgcgaggggagcctgacccggcccaagaaggccatccctgcgggctgcggggacgaggaggaggaggaagaggagagcatcctggacacggtgctcaaatacctgcccgggccgctgcaggacatgttcaagaagtaaccaggcctcctgccccagcctactccacctgttactacttctttttggttctttcttttctttttattaggttaagtctcaattctgaaggggaaaacctcagttggcctctgcccctcttccctggccaggggcttctccccctcagctctccctcacacctcccttcatcccagggtatccacctgcaccccactcccaagtagcttgaaaaagggaggacagtccccttccccagcccccacctggagagacatggcccctgccaagctggtcccttcaaatggatcctttgtggactttagctcatttgtggaggaaccccaggtagggacgccccttgttcctcacccccaccccacttaggtcctgggcccccactgccaggctgggcccagcttgctcagtcaaggggctgccaggcccccagaaaacacttggagccatcgggtagcgatggtctatgccatggggaacacctccattggtgtggccaagctgcccccattcctatccacccctctccccaccccgtcctgtccatgcgcttccagggccccacggtccccaggaggacgcttcctggccaaagccccaagcctttggtgagaagccaattcccacttgacagaaggcgtccatccattcatctcattggccaaggacaaactctcctctgggacgtctgggactggcatttgtcccccactcaaattatcaaagctttctgctcagtcagttgtgtggggatggtgagggaagaggggtcacatgagggaggaaactgtatccatgcatgcatgataatgcgtggcagagactgcaacagggattgtgtgttcagagatcatatgcatatgtgtagggctggagcgtgtgtgtgtcttgagattgtgtgtgttgcagtcatcatatctatgtgttacagattgtgtatgttagccttgtgtatgtgtgcttgattgaggtggtgtatttgggttgaaattgtgtcatatgtgtgtgctatccatctcgtgtttagaggctgtatatgttagcttgtgtaagaatgtgttttcaaaacagtgtgtgtattgggagtgatgggtatgtgttaggtatgtgatgggttgtagaagcgtgtgtttgagagaattcagagacatttgaaggctgctgtgtgcatgtttgggggtctgaaaagacagttgtgtgcatggatgtgtgcgtggggagaaagaacgtgggtaagatgtcccttcccagccctgagaccactggtcacagttggccacctccaacgggagaccttgtccttggcctagagtcctcccacccttggggggctcctgcctgaggtcctcagaatcccactgcaatggacccaggcagcgccccaggaagccatgctgggcccccgccagggcctatcccaaaagcaggggccagggagggggcgacttgcctgcccctgaagcccttgttcccattggccccagtttgcattctgcaggttttccattttagtgggttctgcttttatttcagagacagacatgtgtcttctctgtccgtttccaataggtaaagccatatcagttagactgcaatactttaaacacgagacaaaacaatccatatgtttagggaaccagaaaagtcccctggtctgtcccttctttggggagcagggcctcgacagctccagctcccttgacctaccttcctccccgcaccccgcccccaccttgtgcccctgtgtccagccccccagggggcctgtgtctgtgtctgtgcctgtgtctgtgatggggagccgcctcgcacccctgttgtctgcttgtctctttgtgtctgttatcctgggcaggatggtcattctcaaaaaccctggggtcctgggccagagacaggcagggcccagtccaggggccccaggcctccccagtcccagtgtgcgagccccacttggacacaagtgttcagagaggtccccctctgccacttgacagggaccttcaaacctcgacagtgatgcaaggacacagagagtaccagataggtagcagagaccaaggcgcagggtgcttcagatgagcaagagaacccagtcgaaccagataccccaggtgggccggagggaccccagaccttcagagggctgccctggtgttctccacagtgcagtccctctgtattcccagagtgggatcggggctttcagccccaccctgatgcctgccctccaggatggctggtttagtctgggtccatgtcccagacccctctattctgctccaggacagcaggacttcaggtcttcctgggggtggatataggagaaaatttctgcctggcacacacctggctccaaccactgccaagtgatcactcttaggcccaggggaacacaatgactatcattactgatgcagacctggctgtggagagcagctaatgtgtggcccagagagcctgtctgtgtggagcacgtagtgcacagaatacgtgagagttgctctggcaggggcagaatcctcacaggatcgcctgggaggtgaggtgtgtgtgacccactggatgggagggcaatgagtgtgcacatacaaatggggcagtgtgcatgcaacacacttaggggaggagtggccccagaattcagcacgcacacaacacacaagggagagaacccccagatgagaaaataggaaggagcaatcatttgtagatgggtgaaaaaagaatgaggttcaagggagcgtgcaccaggtgaggtgagcgtgtgtgctctcagggaagggcccaggatcccatgcctgggaggagctgccagagagaagcaaaaaggcggctgtggatcgccctgggctgggcaccagtgacaggtcaggatctccaaacatggacgtcctcccctccaaatccagaagctcccagaaggtgtccttaactgcaaagctgtgcagggtactcctccagatggaatcaggaagtcgagacaccatcccaggtgtgtgtaagagagagagagagaacagggaggatacagaagtattgcagcccagatcccctatcagggggacagctggtgggcaaagcagccaccccacagccttgtggctagagtacagtggggtagaccctccagccccaatagccctagtacccagctggcagggttgcccacccctgctgtccacctgctccatcctctagggttccacaggcccctgaccgcacagggaggctggggccagcctggtctcccaggcctgaggacatgcctcccaccaaatgtcccctgctccagtcccactcctgtcaccccacgctctgcactggggagaaaacgggaggtgctcgtgctggccctgggtgggagcggggagtcctggtgagaccccggtgagatggaccatcctgcccccgtgggggatcccctttcccacatccgtgctgtgtcattgttgctctgcttcctttcaatgtgtcagtgcctggggggaggggaggagcaccccctcagcccccctgaacctgaccaaaagccatggctgttgctcccccctttgtatgatgcaaatgctgaaatgtacaaaatcaaccatgacaacaaagaaaaagaccttgtacagca

SEQ ID NO: 3688 - protein, 134 aa, Homo sapiens; identical to SEQ ID NO: 402

SEQ ID NO: 3689 - DNA, 693 bp, Homo sapiens
gtgtctggtggtctcctgactgccaggcaggccagagaaaattaggggtatgttttcatttaacatcattccctgctgactcttgtctctctggaaaattgacagttaggagacaaaaacgttgccatctccagcaaagagcgcttgaacagctgggcatttctagaaaggaatgggcctggaagacctggctaaaacctttgaatcatttcctgccaacatttggccgtgacccattttggaaggtcactcagctattggtctgaagaagccttttttttttctatttggccttctttggaagccaatttatcgtctgagttcttctcctgtaatctgaactacaggttgcaggttctgaactacctgaagccatgcaagtcataacacatcattactgacttctagctctttccttcaagtctctggcattgcagatgttatttctgtcctaagaagagcaagaggagctgcaatatgaaaccagaaaacagacacacttcatttctctctgctgttggtgttttctggggagaccagtggagtcactctgggcaggactgagggggacctgggtatatgaccaagccctggacagttcatgtgaaggagcaggacccagcttccaggtcaggagggaaacatgcctgacctttgtgctgctctgccaggtgaggtgtcctttcctctcct

SEQ ID NO: 3690 - protein, 87 aa, Homo sapiens
VWWSPDCQAGQRKLGVCFHLTSFPADSCLSGKLTVRRQKRCHLQQRALEQLGISRKEWAWKTWLKPLNHFLPTFGRDPFWKVTQLLV

SEQ ID NO: 3691 - DNA, 1120 bp, Homo sapiens
tgagccagttccagctgttggaacaagagattacaaagcccgtggagaatgacatctcgaagtggaagccctctcagagcctacccaccacaaacagtggcgtgagtgctcaggatcggcagttgctgtgcttctactatgaccaatgtgagacccatttcatttcccttctcaacgccattgacgcactcttcagttgtgtcagctcagcccagcccccgcgaatcttcgtggcacacagcaagtttgtcatcctcagtgcacacaaactggtgttcattggagacacgctgacacggcaggtgactgcccaggacattcgcaacaaagtcatgaactccagcaaccagctctgcgagcagctcaagaccatagtcatggcaaccaagatggccgccctccattaccccagcaccacggccctgcaggaaatggtgcaccaagtgacagacctttctagaaatgcccagctgttcaagcgctctttgctggagatggcaacgttctgagaagaaaaaaaagaggaaggggactgcgttaacggttactaaggaaaactggaaatactgtctggtttttgtaaatgttatctatttttgtagatattttatataaaaatgaaatattttaacattttatgggtcagtcaactttcagaaattcagggagctggagagggaaatctttttttttccccctgagtggttcttatgtatacatagaagtatctgagacataaactgtacagaaaacttgtccacgtgcttttgtatgcccatgtattcatgtttgtttgtagatgtttgtctgatgcatttcattaaaaaaaaaaccatgaattacgaagcaccttagtaagcaccttctaatgctgcattttttttgttgttgttaaaaacataccagctggttataatattgttctccacgtccttgtgatgattctgagcctggcactcccaaatctgggaagcatagtttatttgcaagtgttcaccttccaaatcatgaggcatagcatgacttattcttgtttggaaaactcttttcaaaactgaccatcgtcttgtatgtagaggctatttttaaatcattaaatttttagatctctgttttcata

SEQ ID NO: 3692 - protein, 58 aa, Homo sapiens
MNSSNQLCEQLKTIVMATKMAALHYPSTTALQEMVHQVTDLSRNAQLFKRSLLEMATF

SEQ ID NO: 3693 - DNA, 3032 bp, Homo sapiens
ccgccctctgcttgccgggatgaagcagggcttagggaaaaagactatgacttcccccctcccatgagacaagctggaaggccggacctcagaccggagggggtttatgacattcctccaacctgcaccaagccagcagggaaggaccttcatgtaaaatacaactgtgacattccaggagctgcagaaccggtggctcgaaggcaccagagcctgtccccgaatcacccacccccgcaactcggacagtcagtgggctctcagaacgacgcatatgatgtcccccgaggcgttcagtttcttgagccaccagcagaaaccagtgagaaagcaaacccccaggaaagggatggtgtttatgatgtccctctgcataacccgccagatgctaaaggctctcgggacttggtggatgggatcaaccgattgtctttctccagtacaggcagcacccggagtaacatgtccacgtcttccacctcctccaaggagtcctcactgtcagcctccccagctcaggacaaaaggctcttcctggatggatgactacgattacgtccacctacagggtaaggaggagtttgagaggcaacagaaagagctattggaaaaagagaatatcatgaaacagaacaagatgcagctggaacatcatcagctgagccagttccagctgttggaacaagagattacaaagcccgtggagaatgacatctcgaagtggaagccctctcagagcctacccaccacaaacagtggcgtgagtgctcaggatcggcagttgctgtgcttctactatgaccaatgtgagacccatttcatttcccttctcaacgccattgacgcactcttcagttgtgtcagctcagcccagcccccgcgaatcttcgtggcacacagcaagtttgtcatcctcagtgcacacaaactggtgttcattggagacacgctgacacggcaggtgactgcccaggacattcgcaacaaagtcatgaactccagcaaccagctctgcgagcagctcaagaccatagtcatggcaaccaagatggccgccctccattaccccagcaccacggccctgcaggaaatggtgcaccaagtgacagacctttctagaaatgcccagctgttcaagcgctctttgctggagatggcaacgttctgagaagaaaaaaaagaggaaggggactgcgttaacggttactaaggaaaactggaaatactgtctggtttttgtaaatgttatctatttttgtagatattttatataaaaatgaaatattttaacattttatgggtcagtcaactttcagaaattcagggagctggagagggaaatctttttttttccccctgagtggttcttatgtatacatagaagtatctgagacataaactgtacagaaaacttgtccacgtgcttttgtatgcccatgtattcatgtttgtttgtagatgtttgtctgatgcatttcattaaaaaaaaaaccatgaattacgaagcaccttagtaagcaccttctaatgctgcattttttttgttgttgttaaaaacataccagctggttataatattgttctccacgtccttgtgatgattctgagcctggcactcccaaatctgggaagcatagtttatttgcaagtgttcaccttccaaatcatgaggcatagcatgacttattcttgtttggaaaactcttttcaaaactgaccatcttaaacacatgatggccaagtgcccaaaagccctcttgcggagcaaatttcagaatatatatgtggatccaagctctgatagttcaggtgctggagggaagagagacctgtgtgtttagaggccaggaccacagttaggattgggttgtttcaatactgagagacagctacaataaaaggagagcaattgcctccctggggctgttcaatcttctgcatttgtgagtggttcagtcatgaggttttccaaaagatgtttttagagttgtaaaaaccatatttgcagcaaagatttacaaaggcgtatcagactatgattgttcaccaaaataggggaatggtttgatccgccagttgcaagtagaggcctttctgactcttaatattcactttggtgctactacccccattacctgagggaaactggccaggtccttgatcatggaactatagagctaccaggacatatcctgctctctaagggaatttattgctatcttgcaccttctttaaaactcacatatgcagacctgacactcaagagtggctagctacacagagtccatctaatttttgcaacttcctgtggccagtgtgtataaccccttccactatctcacagatagtcacagcgtccattccatagtctgtctcctcacatctgttagtattgacacagcacagacaccacaagccatcaggttcttcatggggcaggtgaaatacttctaccccatgggtaaatgtattcacatattaccaagagaagaagcacattatctatgatcttttggcccagttcttatttagcatttttattccagcctacttggaaacatgtttttatttgcaatatatgcctgactgaattaagcttgcttgttttaaacaaccaaatcattggaacagaaaaggatttaaaaaacaagaatgcatgatctcagagtgattaaaaaaaaatcagtggaaataaatgatcatagaaggtgcttttcaaaacaactgctattataattctcaaagtcctactctgccaaaagaagattaaaagtcatacattacattacaaggaaatgttcatgtgggaagagggttgctgaaaatcaacaacgcttgaagttaaaaagtgtgtctttgtagatttcattgtataatgtgtatttcttaggagatggctgacttgattgatctacgctaagtggagacatttcacatttttaaaaccaaatgttcaatctgtattactctttgccgtcttgtatgtagaggctatttttaaatcattaaatttttagatctctgttttcata

SEQ ID NO: 3694 - protein, 297 aa, Homo sapiens
MMSPEAFSFLSHQQKPVRKQTPRKGMVFMMSLCITRQMLKALGTWWMGSTDCLSPVQAAPGVTCPRLPPPPRSPHCQPPQLRTKGSSWMDDYDYVHLQGKEEFERQQKELLEKENIMKQNKMQLEHHQLSQFQLLEQEITKPVENDISKWKPSQSLPTTNSGVSAQDRQLLCFYYDQCETHFISLLNAIDALFSCVSSAQPPRIFVAHSKFVILSAHKLVFIGDTLTRQVTAQDIRNKVMNSSNQLCEQLKTIVMATKMAALHYPSTTALQEMVHQVTDLSRNAQLFKRSLLEMATF

SEQ ID NO: 3695 - DNA, 4531 bp, Homo sapiens
agtgagctcagagacttgagggaggcgctgcgactgacaagcggctctgcccgggaccttctcgctttcatctagcgctgcactcaatggaggggcgggcaccgcagtgcttaatgctgtcttaactagtgtaggaaaacggctcaacccaccgctgccgaaatgaagtataagaatcttatggcaagggccttatatgacaatgtcccagagtgtgccgaggaactggcctttcgcaagggagacatcctgaccgtcatagagcagaacacagggggactggaaggatggtggctgtgctcattacacggtcggcaaggcattgtcccaggcaaccgggtgaagcttctgattggtcccatgcaggagactgcctccagtcacgagcagcctgcctctggactgatgcagcagacctttggccaacagaagctctatcaagtgccaaacccacaggctgctccccgagacaccatctaccaagtgccaccttcctaccaaaatcagggaatttaccaagtccccactggccacggcacccaagaacaagaggtatatcaggtgccaccatcagtgcagagaagcattgggggaaccagtgggccccacgtgggtaaaaaggtgataacccccgtgaggacaggccatggctacgtatacgagtacccatccagataccaaaaggacgtctatgatatccctccttctcataccactcaaggggtatacgacatccctccctcatcagcaaaaggccctgtgttttcagttccagtgggagagataaaacctcaaggggtgtatgacatcccgcctacaaaaggggtatatgccattccgccctctgcttgccgggatgaagcagggcttagggaaaaagactatgacttcccccctcccatgagacaagctggaaggccggacctcagaccggagggggtttatgacattcctccaacctgcaccaagccagcagggaaggaccttcatgtaaaatacaactgtgacattccaggagctgcagaaccggtggctcgaaggcaccagagcctgtccccgaatcacccacccccgcaactcggacagtcagtgggctctcagaacgacgcatatgatgtcccccgaggcgttcagtttcttgagccaccagcagaaaccagtgagaaagcaaacccccaggaaagggatggtgtttatgatgtccctctgcataacccgccagatgctaaaggctctcgggacttggtggatgggatcaaccgattgtctttctccagtacaggcagcacccggagtaacatgtccacgtcttccacctcctccaaggagtcctcactgtcagcctccccagctcaggacaaaaggctcttcctggatccagacacagctattgagagacttcagcggctccagcaggcccttgagatgggtgtctccagcctaatggcactggtcactaccgactggcggtgttacggatatatggaaagacacatcaatgaaatacgcacagcagtggacaaggtggagctgttcctgaaggagtacctccactttgtcaagggagctgttgcaaatgctgcctgcctcccggaactcatcctccacaacaagatgaagcgggagctgcaacgagttgaagactcccaccagatcctgagtcaaaccagccatgacttaaatgagtgcagctggtccctgaatatcttggccatcaacaagccccagaacaagtgtgacgatctggaccggtttgtgatggtggcaaagacggtgcccgatgacgccaagcagctcaccacaaccatcaacaccaacgcagaggccctcttcagacccggccctggcagcttgcatctgaagaatgggccggagagcatcatgaactcaacggagtacccacacggtggctcccagggacagctgctgcatcctggtgaccacaaggcccaggcccacaacaaggcactgcccccaggcctgagcaaggagcaggcccctgactgtagcagcagtgatggttctgagaggagctggatggatgactacgattacgtccacctacagggtaaggaggagtttgagaggcaacagaaagagctattggaaaaagagaatatcatgaaacagaacaagatgcagctggaacatcatcagctgagccagttccagctgttggaacaagagattacaaagcccgtggagaatgacatctcgaagtggaagccctctcagagcctacccaccacaaacagtggcgtgagtgctcaggatcggcagttgctgtgcttctactatgaccaatgtgagacccatttcatttcccttctcaacgccattgacgcactcttcagttgtgtcagctcagcccagcccccgcgaatcttcgtggcacacagcaagtttgtcatcctcagtgcacacaaactggtgttcattggagacacgctgacacggcaggtgactgcccaggacattcgcaacaaagtcatgaactccagcaaccagctctgcgagcagctcaagaccatagtcatggcaaccaagatggccgccctccattaccccagcaccacggccctgcaggaaatggtgcaccaagtgacagacctttctagaaatgcccagctgttcaagcgctctttgctggagatggcaacgttctgagaagaaaaaaaagaggaaggggactgcgttaacggttactaaggaaaactggaaatactgtctggtttttgtaaatgttatctatttttgtagatattttatataaaaatgaaatattttaacattttatgggtcagtcaactttcagaaattcagggagctggagagggaaatctttttttttccccctgagtggttcttatgtatacatagaagtatctgagacataaactgtacagaaaacttgtccacgtgcttttgtatgcccatgtattcatgtttgtttgtagatgtttgtctgatgcatttcattaaaaaaaaaaccatgaattacgaagcaccttagtaagcaccttctaatgctgcattttttttgttgttgttaaaaacataccagctggttataatattgttctccacgtccttgtgatgattctgagcctggcactcccaaatctgggaagcatagtttatttgcaagtgttcaccttccaaatcatgaggcatagcatgacttattcttgtttggaaaactcttttcaaaactgaccatcttaaacacatgatggccaagtgcccaaaagccctcttgcggagcaaatttcagaatatatatgtggatccaagctctgatagttcaggtgctggagggaagagagacctgtgtgtttagaggccaggaccacagttaggattgggttgtttcaatactgagagacagctacaataaaaggagagcaattgcctccctggggctgttcaatcttctgcatttgtgagtggttcagtcatgaggttttccaaaagatgtttttagagttgtaaaaaccatatttgcagcaaagatttacaaaggcgtatcagactatgattgttcaccaaaataggggaatggtttgatccgccagttgcaagtagaggcctttctgactcttaatattcactttggtgctactacccccattacctgagggaaactggccaggtccttgatcatggaactatagagctaccaggacatatcctgctctctaagggaatttattgctatcttgcaccttctttaaaactcacatatgcagacctgacactcaagagtggctagctacacagagtccatctaatttttgcaacttcctgtggccagtgtgtataaccccttccactatctcacagatagtcacagcgtccattccatagtctgtctcctcacatctgttagtattgacacagcacagacaccacaagccatcaggttcttcatggggcaggtgaaatacttctaccccatgggtaaatgtattcacatattaccaagagaagaagcacattatctatgatcttttggcccagttcttatttagcatttttattccagcctacttggaaacatgtttttatttgcaatatatgcctgactgaattaagcttgcttgttttaaacaaccaaatcattggaacagaaaaggatttaaaaaacaagaatgcatgatctcagagtgattaaaaaaaaatcagtggaaataaatgatcatagaaggtgcttttcaaaacaactgctattataattctcaaagtcctactctgccaaaagaagattaaaagtcatacattacattacaaggaaatgttcatgtgggaagagggttgctgaaaatcaacaacgcttgaagttaaaaagtgtgtctttgtagatttcattgtataatgtgtatttcttaggagatggctgacttgattgatctacgctaagtggagacatttcacatttttaaaaccaaatgttcaatctgtattactctttgccgtcttgtatgtagaggctatttttaaatcattaaatttttagatctctgttttcata

SEQ ID NO: 3696 - protein, 834 aa, Homo sapiens; identical to SEQ ID NO: 406

SEQ ID NO: 3697 - DNA, 4953 bp, Homo sapiens
ccgacgtgtgtggttgctcagtagggaaatgcttacagctgcctctagaagcaagtccgctcgctgcatggagagggaaacatgagcatgcagcaggactagctgtcacctcccgcccgcctgcccagagagggccagagcgtcggggaggcaagatgatccaccagcggttccatcctacacttggattcagtaagctgtgaggtccgtaatgtcagacactggcaaacatcatatgttcttcaagtagagttatgaaaacgaagaaactggtcagaagagtaaaacgccggaattgtcctttccaacatccagagctgcatcattccttggggcaaaatgtggacaaggagaatcaaccatcaactgcacacaaataaaaaagctctgggcaccgtatcaagccaagaacagcccaatctcctttctgggcaaacgttccaagaatcttatggcaagggccttatatgacaatgtcccagagtgtgccgaggaactggcctttcgcaagggagacatcctgaccgtcatagagcagaacacagggggactggaaggatggtggctgtgctcattacacggtcggcaaggcattgtcccaggcaaccgggtgaagcttctgattggtcccatgcaggagactgcctccagtcacgagcagcctgcctctggactgatgcagcagacctttggccaacagaagctctatcaagtgccaaacccacaggctgctccccgagacaccatctaccaagtgccaccttcctaccaaaatcagggaatttaccaagtccccactggccacggcacccaagaacaagaggtatatcaggtgccaccatcagtgcagagaagcattgggggaaccagtgggccccacgtgggtaaaaagtacatttgtagaaataatgtgaagcctataaagatgttctctgcctccagagagaattttgtttccttctgccagcctcataggcaagcatacatctgattccatgctttgagctgttctggcaaccctgatgtcttcagcctgtgcaagggtgataacccccgtgaggacaggccatggctacgtatacgagtacccatccagataccaaaaggacgtctatgatatccctccttctcataccactcaaggggtatacgacatccctccctcatcagcaaaaggccctgtgttttcagttccagtgggagagataaaacctcaaggggtgtatgacatcccgcctacaaaaggggtatatgccattccgccctctgcttgccgggatgaagcagggcttagggaaaaagactatgacttcccccctcccatgagacaagctggaaggccggacctcagaccggagggggtttatgacattcctccaacctgcaccaagccagcagggaaggaccttcatgtaaaatacaactgtgacattccaggagctgcagaaccggtggctcgaaggcaccagagcctgtccccgaatcacccacccccgcaactcggacagtcagtgggctctcagaacgacgcatatgatgtcccccgaggcgttcagtttcttgagccaccagcagaaaccagtgagaaagcaaacccccaggaaagggatggtgtttatgatgtccctctgcataacccgccagatgctaaaggctctcgggacttggtggatgggatcaaccgattgtctttctccagtacaggcagcacccggagtaacatgtccacgtcttccacctcctccaaggagtcctcactgtcagcctccccagctcaggacaaaaggctcttcctggatccagacacagctattgagagacttcagcggctccagcaggcccttgagatgggtgtctccagcctaatggcactggtcactaccgactggcggtgttacggatatatggaaagacacatcaatgaaatacgcacagcagtggacaaggtggagctgttcctgaaggagtacctccactttgtcaagggagctgttgcaaatgctgcctgcctcccggaactcatcctccacaacaagatgaagcgggagctgcaacgagttgaagactcccaccagatcctgagtcaaaccagccatgacttaaatgagtgcagctggtccctgaatatcttggccatcaacaagccccagaacaagtgtgacgatctggaccggtttgtgatggtggcaaagacggtgcccgatgacgccaagcagctcaccacaaccatcaacaccaacgcagaggccctcttcagacccggccctggcagcttgcatctgaagaatgggccggagagcatcatgaactcaacggagtacccacacggtggctcccagggacagctgctgcatcctggtgaccacaaggcccaggcccacaacaaggcactgcccccaggcctgagcaaggagcaggcccctgactgtagcagcagtgatggttctgagaggagctggatggatgactacgattacgtccacctacagggtaaggaggagtttgagaggcaacagaaagagctattggaaaaagagaatatcatgaaacagaacaagatgcagctggaacatcatcagctgagccagttccagctgttggaacaagagattacaaagcccgtggagaatgacatctcgaagtggaagccctctcagagcctacccaccacaaacagtggcgtgagtgctcaggatcggcagttgctgtgcttctactatgaccaatgtgagacccatttcatttcccttctcaacgccattgacgcactcttcagttgtgtcagctcagcccagcccccgcgaatcttcgtggcacacagcaagtttgtcatcctcagtgcacacaaactggtgttcattggagacacgctgacacggcaggtgactgcccaggacattcgcaacaaagtcatgaactccagcaaccagctctgcgagcagctcaagaccatagtcatggcaaccaagatggccgccctccattaccccagcaccacggccctgcaggaaatggtgcaccaagtgacagacctttctagaaatgcccagctgttcaagcgctctttgctggagatggcaacgttctgagaagaaaaaaaagaggaaggggactgcgttaacggttactaaggaaaactggaaatactgtctggtttttgtaaatgttatctatttttgtagatattttatataaaaatgaaatattttaacattttatgggtcagtcaactttcagaaattcagggagctggagagggaaatctttttttttccccctgagtggttcttatgtatacatagaagtatctgagacataaactgtacagaaaacttgtccacgtgcttttgtatgcccatgtattcatgtttgtttgtagatgtttgtctgatgcatttcattaaaaaaaaaaccatgaattacgaagcaccttagtaagcaccttctaatgctgcattttttttgttgttgttaaaaacataccagctggttataatattgttctccacgtccttgtgatgattctgagcctggcactcccaaatctgggaagcatagtttatttgcaagtgttcaccttccaaatcatgaggcatagcatgacttattcttgtttggaaaactcttttcaaaactgaccatcttaaacacatgatggccaagtgcccaaaagccctcttgcggagcaaatttcagaatatatatgtggatccaagctctgatagttcaggtgctggagggaagagagacctgtgtgtttagaggccaggaccacagttaggattgggttgtttcaatactgagagacagctacaataaaaggagagcaattgcctccctggggctgttcaatcttctgcatttgtgagtggttcagtcatgaggttttccaaaagatgtttttagagttgtaaaaaccatatttgcagcaaagatttacaaaggcgtatcagactatgattgttcaccaaaataggggaatggtttgatccgccagttgcaagtagaggcctttctgactcttaatattcactttggtgctactacccccattacctgagggaaactggccaggtccttgatcatggaactatagagctaccaggacatatcctgctctctaagggaatttattgctatcttgcaccttctttaaaactcacatatgcagacctgacactcaagagtggctagctacacagagtccatctaatttttgcaacttcctgtggccagtgtgtataaccccttccactatctcacagatagtcacagcgtccattccatagtctgtctcctcacatctgttagtattgacacagcacagacaccacaagccatcaggttcttcatggggcaggtgaaatacttctaccccatgggtaaatgtattcacatattaccaagagaagaagcacattatctatgatcttttggcccagttcttatttagcatttttattccagcctacttggaaacatgtttttatttgcaatatatgcctgactgaattaagcttgcttgttttaaacaaccaaatcattggaacagaaaaggatttaaaaaacaagaatgcatgatctcagagtgattaaaaaaaaatcagtggaaataaatgatcatagaaggtgcttttcaaaacaactgctattataattctcaaagtcctactctgccaaaagaagattaaaagtcatacattacattacaaggaaatgttcatgtgggaagagggttgctgaaaatcaacaacgcttgaagttaaaaagtgtgtctttgtagatttcattgtataatgtgtatttcttaggagatggctgacttgattgatctacgctaagtggagacatttcacatttttaaaaccaaatgttcaatctgtattactctttgccgtcttgtatgtagaggctatttttaaatcattaaatttttagatctctgttttcata

SEQ ID NO: 3698 - protein, 688 aa, Homo sapiens
MSSACARVITPVRTGHGYVYEYPSRYQKDVYDIPPSHTTQGVYDIPPSSAKGPVFSVPVGEIKPQGVYDIPPTKGVYAIPPSACRDEAGLREKDYDFPPPMRQAGRPDLRPEGVYDIPPTCTKPAGKDLHVKYNCDIPGAAEPVARRHQSLSPNHPPPQLGQSVGSQNDAYDVPRGVQFLEPPAETSEKANPQERDGVYDVPLHNPPDAKGSRDLVDGINRLSFSSTGSTRSNMSTSSTSSKESSLSASPAQDKRLFLDPDTAIERLQRLQQALEMGVSSLMALVTTDWRCYGYMERHINEIRTAVDKVELFLKEYLHFVKGAVANAACLPELILHNKMKRELQRVEDSHQILSQTSHDLNECSWSLNILAINKPQNKCDDLDRFVMVAKTVPDDAKQLTTTINTNAEALFRPGPGSLHLKNGPESIMNSTEYPHGGSQGQLLHPGDHKAQAHNKALPPGLSKEQAPDCSSSDGSERSWMDDYDYVHLQGKEEFERQQKELLEKENIMKQNKMQLEHHQLSQFQLLEQEITKPVENDISKWKPSQSLPTTNSGVSAQDRQLLCFYYDQCETHFISLLNAIDALFSCVSSAQPPRIFVAHSKFVILSAHKLVFIGDTLTRQVTAQDIRNKVMNSSNQLCEQLKTIVMATKMAALHYPSTTALQEMVHQVTDLSRNAQLFKRSLLEMATF

SEQ ID NO: 3699 - DNA, 1512 bp, Homo sapiens
ccgccctctgcttgccgggatgaagcagggcttagggaaaaagactatgacttcccccctcccatgagacaagctggaaggccggacctcagaccggagggggtttatgacattcctccaacctgcaccaagccagcagggaaggaccttcatgtaaaatacaactgtgacattccaggagctgcagaaccggtggctcgaaggcaccagagcctgtccccgaatcacccacccccgcaactcggacagtcagtgggctctcagaacgacgcatatgatgtcccccgaggcgttcagtttcttgagccaccagcagaaaccagtgagaaagcaaacccccaggaaagggatggtgtttatgatgtccctctgcataacccgccagatgctaaaggctctcgggacttggtggatgggatcaaccgattgtctttctccagtacaggcagcacccggagtaacatgtccacgtcttccacctcctccaaggagtcctcactgtcagcctccccagctcaggacaaaaggctcttcctggatggatgactacgattacgtccacctacagggtaaggaggagtttgagaggcaacagaaagagctattggaaaaagagaatatcatgaaacagaacaagatgcagctggaacatcatcagctgagccagttccagctgttggaacaagagattacaaagcccgtggagaatgacatctcgaagtggaagccctctcagagcctacccaccacaaacagtggcgtgagtgctcaggatcggcagttgctgtgcttctactatgaccaatgtgagacccatttcatttcccttctcaacgccattgacgcactcttcagttgtgtcagctcagcccagcccccgcgaatcttcgtggcacacagcaagtttgtcatcctcagtgcacacaaactggtgttcattggagacacgctgacacggcaggtgactgcccaggacattcgcaacaaagtcatgaactccagcaaccagctctgcgagcagctcaagaccatagtcatggcaaccaagatggccgccctccattaccccagcaccacggccctgcaggaaatggtgcaccaagtgacagacctttctagaaatgcccagctgttcaagcgctctttgctggagatggcaacgttctgagaagaaaaaaaagaggaaggggactgcgttaacggttactaaggaaaactggaaatactgtctggtttttgtaaatgttatctatttttgtagatattttatataaaaatgaaatattttaacattttatgggtcagtcaactttcagaaattcagggagctggagagggaaatctttttttttccccctgagtggttcttatgtatacatagaagtatctgagacataaactgtacagaaaacttgtccacgtgcttttgtatgcccatgtattcatgtttgtttgtagatgtttgtctgatgcatttcattaaaaaaaaaaccatgaattacgaagcacctt

SEQ ID NO: 3700 - protein, 297 aa, Homo sapiens; identical to SEQ ID NO: 3694

SEQ ID NO: 3701 - DNA, 3011 bp, Homo sapiens
agtgagctcagagacttgagggaggcgctgcgactgacaagcggctctgcccgggaccttctcgctttcatctagcgctgcactcaatggaggggcgggcaccgcagtgcttaatgctgtcttaactagtgtaggaaaacggctcaacccaccgctgccgaaatgaagtataagaatcttatggcaagggccttatatgacaatgtcccagagtgtgccgaggaactggcctttcgcaagggagacatcctgaccgtcatagagcagaacacagggggactggaaggatggtggctgtgctcattacacggtcggcaaggcattgtcccaggcaaccgggtgaagcttctgattggtcccatgcaggagactgcctccagtcacgagcagcctgcctctggactgatgcagcagacctttggccaacagaagctctatcaagtgccaaacccacaggctgctccccgagacaccatctaccaagtgccaccttcctaccaaaatcagggaatttaccaagtccccactggccacggcacccaagaacaagaggtatatcaggtgccaccatcagtgcagagaagcattgggggaaccagtgggccccacgtgggtaaaaaggtgataacccccgtgaggacaggccatggctacgtatacgagtacccatccagataccaaaaggacgtctatgatatccctccttctcataccactcaaggggtatacgacatccctccctcatcagcaaaaggccctgtgttttcagttccagtgggagagataaaacctcaaggggtgtatgacatcccgcctacaaaaggggtatatgccattccgccctctgcttgccgggatgaagcagggcttagggaaaaagactatgacttcccccctcccatgagacaagctggaaggccggacctcagaccggagggggtttatgacattcctccaacctgcaccaagccagcagggaaggaccttcatgtaaaatacaactgtgacattccaggagctgcagaaccggtggctcgaaggcaccagagcctgtccccgaatcacccacccccgcaactcggacagtcagtgggctctcagaacgacgcatatgatgtcccccgaggcgttcagtttcttgagccaccagcagaaaccagtgagaaagcaaacccccaggaaagggatggtgtttatgatgtccctctgcataacccgccagatgctaaaggctctcgggacttggtggatgggatcaaccgattgtctttctccagtacaggcagcacccggagtaacatgtccacgtcttccacctcctccaaggagtcctcactgtcagcctccccagctcaggacaaaaggctcttcctggatccagacacagctattgagagacttcagcggctccagcaggcccttgagatgggtgtctccagcctaatggcactggtcactaccgactggcggtgttacggatatatggaaagacacatcaatgaaatacgcacagcagtggacaaggtggagctgttcctgaaggagtacctccactttgtcaagggagctgttgcaaatgctgcctgcctcccggaactcatcctccacaacaagatgaagcgggagctgcaacgagttgaagactcccaccagatcctgagtcaaaccagccatgacttaaatgagtgcagctggtccctgaatatcttggccatcaacaagccccagaacaagtgtgacgatctggaccggtttgtgatggtggcaaagacggtgcccgatgacgccaagcagctcaccacaaccatcaacaccaacgcagaggccctcttcagacccggccctggcagcttgcatctgaagaatgggccggagagcatcatgaactcaacggagtacccacacggtggctcccagggacagctgctgcatcctggtgaccacaaggcccaggcccacaacaaggcactgcccccaggcctgagcaaggagcaggcccctgactgtagcagcagtgatggttctgagaggagctggatggatgactacgattacgtccacctacagggtaaggaggagtttgagaggcaacagaaagagctattggaaaaagagaatatcatgaaacagaacaagatgcagctggaacatcatcagctgagccagttccagctgttggaacaagagattacaaagcccgtggagaatgacatctcgaagtggaagccctctcagagcctacccaccacaaacagtggcgtgagtgctcaggatcggcagttgctgtgcttctactatgaccaatgtgagacccatttcatttcccttctcaacgccattgacgcactcttcagttgtgtcagctcagcccagcccccgcgaatcttcgtggcacacagcaagtttgtcatcctcagtgcacacaaactggtgttcattggagacacgctgacacggcaggtgactgcccaggacattcgcaacaaagtcatgaactccagcaaccagctctgcgagcagctcaagaccatagtcatggcaaccaagatggccgccctccattaccccagcaccacggccctgcaggaaatggtgcaccaagtgacagacctttctagaaatgcccagctgttcaagcgctctttgctggagatggcaacgttctgagaagaaaaaaaagaggaaggggactgcgttaacggttactaaggaaaactggaaatactgtctggtttttgtaaatgttatctatttttgtagatattttatataaaaatgaaatattttaacattttatgggtcagtcaactttcagaaattcagggagctggagagggaaatctttttttttccccctgagtggttcttatgtatacatagaagtatctgagacataaactgtacagaaaacttgtccacgtgcttttgtatgcccatgtattcatgtttgtttgtagatgtttgtctgatgcatttcattaaaaaaaaaaccatgaattacgaagcacctt

SEQ ID NO: 3702 - protein, 834 aa, Homo sapiens; identical to SEQ ID NO: 406

SEQ ID NO: 3703 - DNA, 1390 bp, Homo sapiens
aatccataattaagtgcttaggagcataaaaaatgaccaagtataagacatttccattctgggtaactcacgggtttctcttcaggtatacgacatccctccctcatcagcaaaaggccctgtgttttcagttccagtgggagagataaaacctcaaggggtgtatgacatcccgcctacaaaaggggtatatgccattccgccctctgcttgccgggatgaagcagggcttagggaaaaagactatgacttcccccctcccatgagacaagctggaaggccggacctcagaccggagggggtttatgacattcctccaacctgcaccaagccagcagggaaggaccttcatgtaaaatacaactgtgacattccaggagctgcagaaccggtggctcgaaggcaccagagcctgtccccgaatcacccacccccgcaactcggacagtcagtgggctctcagaacgacgcatatgatgtcccccgaggcgttcagtttcttgagccaccagcagaaaccagtgagaaagcaaacccccaggaaagggatggtgtttatgatgtccctctgcataacccgccagatgctaaaggctctcgggacttggtggatgggatcaaccgattgtctttctccagtacaggcagcacccggagtaacatgtccacgtcttccacctcctccaaggagtcctcactgtcagcctccccagctcaggacaaaaggctcttcctggatccagacacagctattgagagacttcagcggctccagcaggcccttgagatgggtgtctccagcctaatggcactggtcactaccgactggcggtgttacggatatatggaaagacacatcaatgaaatacgcacagcagtggacaaggtggagctgttcctgaaggagtacctccactttgtcaagggagctgttgcaaatgctgcctgcctcccggaactcatcctccacaacaagatgaagcgggagctgcaacgagttgaagactcccaccagatcctgagtcaaaccagccatgacttaaatgagtgcagctggtccctgaatatcttggccatcaacaagccccagaacaagtgtgacgatctggaccggtttgtgatggtggcaaagacggtgcccgatgacgccaagcagctcaccacaaccatcaacaccaacgcagaggccctcttcagacccggccctggcagcttgcatctgaagaatgggccggagagcatcatgaactcaacggagtacccacacggtggctcccagggacagctgctgcatcctggtgaccacaaggcccaggcccacaacaaggcactgcccccaggcctgagcaaggagcaggcccctgactgtagcagcagtgatggttctgag

SEQ ID NO: 3704 - protein, 33 aa, Homo sapiens
MTSRLQKGYMPFRPLLAGMKQGLGKKTMTSPLP

SEQ ID NO: 3705 - DNA, 366 bp, Homo sapiens
ctcccaggcaccagtttcagatcagcaaaaaatagcaaatgcccccaggcttgaaaagcaatctcacctctattaactcttctcccaaatgctgggattacaggcatgagccactgcgcccgacatgcccgcttctgttttttaaacgaaagatgaacagttaagctggacttagccttggttttccattagcattattgctaagttggcaaccttggataaaatccactcttggaaacttttaagctgaacaaaagctgcactatgagcaggtgctatgataaagccaagacagcgctctaagtagaggggctgatgaaatagactaaggggagatcttcatttctctcctggacaatagcgagt

SEQ ID NO: 3706 - protein, 41 aa, Homo sapiens
MPPGLKSNLTSINSSPKCWDYRHEPLRPTCPLLFFKRKMNS

SEQ ID NO: 3707 - DNA, 1287 bp, Homo sapiens
agagacttgagggaggcgctgcgactgacaagcggctctgcccgggaccttctcgctttcatctagcgctgcactcaatggaggggcgggcaccgcagtgcttaatgctgtcttaactagtgtaggaaaacggctcaacccaccgctgccgaaatgaagtataagaatcttatggcaagggccttatatgacaatgtcccagagtgtgccgaggaactggcctttcgcaagggagacatcctgaccgtcatagagcagaacacagggggactggaaggatggtggctgtgctcattacacggtcggcaaggcattgtcccaggcaaccgggtgaagcttctgattggtcccatgcaggagactgcctccagtcacgagcagcctgcctctggactgatgcagcagacctttggccaacagaagctctatcaagtgccaaacccacaggctgctccccgagacaccatctaccaagtgccaccttcctaccaaaatcagggaatttaccaagtccccactggccacggcacccaagaacaagaggtatatcaggtgccaccatcagtgcagagaagcattgggggaaccagtgggccccacgtgggtaaaaaggtgttccagagagatgggcaagtgtcctatttcttagtgagagcctctaaacaaaccagcttgtgaacctccactgaaaagatctcatctgatgagcattttaataaagtgtcctgagtttggaggcttgccgtctttctcttggataaatatcttcatctcctagacttggaaaaacacattttctcctggggtttcccattggcgtgtcttgagctgctctggtgataaccgtaataatgccaatactgatacgaacagcagaaaacagtaaccccaagaactctacagatgatcatcaaggaccactgtctcttaccatttgctgctttggtttgaaattctcactgcctcgtagatctcattttgagcactatacattcctaaagattgatttctttctatctgacttaaatttaggaatgattaaatcttcatttctcccatgatttgatcctaaaacattttgaaaggaaacagccttgagatctgtgattactaagacatacataacattcttatcacattagaaagcaagaattgactgttgcttgtcttgttcctgttgtcttgtcccctgaattcctgtttatctttgattgtatgtgggacattgtattttcagtacatttgtagaaataatgtgaagcctataaagatgttctctgcctccag

SEQ ID NO: 3708 - protein, 174 aa, Homo sapiens; identical to SEQ ID NO: 408

SEQ ID NO: 3709 - DNA, 2239 bp, Homo sapiens
taaggagcttggaagttccccccacctagctgtagtgggcagtttcagagtgggctgatccaggagtcctgaccaggtcagtagggtgatgtctagactccagtaccactgagaatgttgctatgttggctttctctgccacacagaaaagtcttttctttccttttcttttctttctttctttcttttttttttttttttttgagacggaccctccctctgttgaccaggctggagtgcagtggcacaatctcggctcaccacaacctccgcctcctgggttcaagtgattctcctgccttagcctcccgagtagctgggactatgggtgcgcactaccatgcctggctaatttttgtatttttagtagagacaaagtttcactacgttggcaaggctggtctcaaactcctgacctcgtgatctgcccacctcggcctcccaaagtgctgggattataggcgtgagccaccacgcctggcctaagactgtctttccaaatgacttcaaattccttcaaatgggtaacttcatttaaccaggtgggggcacctcccaaaacacaagttacccagctttcaagttgtggctctcatataaggaagtaactttctttgagagtatttacttgtgaaattataaaagtagtaaatttctggaaaatgtctaacatgtattgctagcgtaggccgcagggcattgagaaacgtataccgctgcactgctggcccagctaaccaagggtctccttcacttctttgtcattaatagcctgagtaactaactccactttagttccctcaactgtgaaatggcaagtgatgctagattatctctaatgatctttgctaaaattttatgatccagatatccttatctgattctttctcagaatcactttaacagtttaataaaaacggcctgacatcaagagtttttttttttttaaagaaaagatactcaagcattgattataaatttcaacttgacccttaagtttttgcaaatctttcctactcttcctttaggatccagcccaccatcccatccagaactctacccaactcttcctttcaaagagtaggatttttctgcttcgtttttttactgctttgttcttacttagggttgctggaagcacatggaaggagggaagtagtcaaaacaagacagtgttgtgaggggagagatgagaagtcatgataagtaggtgggtgggtgacccacagggctggcatcagaaggaaacatagcaaaacatgatggatatgaggcttgctgtggggagggggattggcctttgtgagtggcagccgtctgctcccttcccgcttcccttagtgctccattgagctagcagcatgcagctgagaagttgaagttctgaccacatggcctctgctgccgctgctctgccccatcccaggcacctagccagctctgcattaaggaggtgaagtggatgcccaaggaaagaagtgcccccaaggagacttgctgagaccttgaacaagtgacacaatgtgagcagaacttgtcttgacagaaaatgctttgtctctaggtgttccagagagatgggcaagtgtcctatttcttagtgagagcctctaaacaaaccagcttgtgaacctccactgaaaagatctcatctgatgagcattttaataaagtgtcctgagtttggaggcttgccgtctttctcttggataaatatcttcatctcctagacttggaaaaacacattttctcctggggtttcccattggcgtgtcttgagctgctctggtgataaccgtaataatgccaatactgatacgaacagcagaaaacagtaaccccaagaactctacagatgatcatcaaggaccactgtctcttaccatttgctgctttggtttgaaattctcactgcctcgtagatctcattttgagcactatacattcctaaagattgatttctttctatctgacttaaatttaggaatgattaaatcttcatttctcccatgatttgatcctaaaacattttgaaaggaaacagccttgagatctgtgattactaagacatacataacattcttatcacattagaaagcaagaattgactgttgcttgtcttgttcctgttgtcttgtcccctgaattcctgtttatctttgattgtatgtgggacattgtattttcagtacatttgtagaaataatgtgaagcctataaagatgttctctgcctccag

SEQ ID NO: 3710 - protein, 102 aa, Homo sapiens
MLLCWLSLPHRKVFSFLFFSFFLSFFFFFLRRTLPLLTRLECSGTISAHHNLRLLGSSDSPALASRVAGTMGAHYHAWLIFVFLVETKFHYVGKAGLKLLTS

SEQ ID NO: 3711 - DNA, 735 bp, Homo sapiens
agagacttgagggaggcgctgcgactgacaagcggctctgcccgggaccttctcgctttcatctagcgctgcactcaatggaggggcgggcaccgcagtgcttaatgctgtcttaactagtgtaggaaaacggctcaacccaccgctgccgaaatgaagtataagaatcttatggcaagggccttatatgacaatgtcccagagtgtgccgaggaactggcctttcgcaagggagacatcctgaccgtcatagagcagaacacagggggactggaaggatggtggctgtgctcattacacggtcggcaaggcattgtcccaggcaaccgggtgaagcttctgattggtcccatgcaggagactgcctccagtcacgagcagcctgcctctggactgatgcagcagacctttggccaacagaagctctatcaagtgccaaacccacaggctgctccccgagacaccatctaccaagtgccaccttcctaccaaaatcagggaatttaccaagtccccactggccacggcacccaagaacaagaggtatatcaggtgccaccatcagtgcagagaagcattgggggaaccagtgggccccacgtgggtaaaaaggtgttccagagagatgggcaagtgtcctatttcttagtgagagcctctaaacaaaccagcttgtgaacctccactgaaaagatctcatctgatgagcattttaataaagtgtcctgagtttgg

SEQ ID NO: 3712 - protein, 174 aa, Homo sapiens; identical to SEQ ID NO: 408

SEQ ID NO: 3713 - DNA, 1986 bp, Homo sapiens
cttttctcccacggcccatctgcccctcctttcctccacccccttctcctctctgctcccctttatttccactccccacccgcgtggctttgctctccctctcccccctcagctcgtctgtatttggagctccggaagctgccggcgactctcccctggagcagcgtgactgacaccggctcctattcagctgggaggagggagaggggaggagaaggggagggccgcgggaggagggtacgagtggccgaccacggatttgcattgccgaggacgggaccccagggcagcgaagcagaatggccaacatgcagggactggtggaaagactggaacgagctgtcagccgcctggagtcgctgtctgcagagtcccacaggccccctgggaactgcggggaagtcaatggtgtcattgcaggtgtggcaccctccgtggaagcctttgacaagctgatggacagtatggtggccgagtttttaaagaacagtaggatccttgctggggacgtggagacccatgcagaaatggtgcacagtgctttccaggcccagcgggctttccttctgatggcctctcagtaccaacaaccccacgagaatgacgtggccgcacttctgaaacccatatcggaaaagattcaggaaatccaaactttcagagagagaaaccgggggagtaacatgtttaatcatctttcggccgtcagcgaaagcatccctgcccttggatggatagctgtgtctcccaaacctggtccttatgtcaaggagatgaatgacgctgccaccttttacactaacagggtcttaaaggactacaaacacagtgatttgcgtcatgtggattgggtgaagtcatatttgaacatttggagtgaacttcaagcatacatcaaggaacaccacaccacgggcctcacatggagcaaaacaggtcctgtagcatccacagtatcagcgttttctgtcctctcctctgggcctggccttcctccaccccctcctcctctgcctcctccagggccacctccacttttcgagaatgaaggcaaaaaagaggaatcttctccttcacgctcagctttatttgcccaacttaaccagggagaagcaattacaaaagggctccgccatgtcacagatgaccagaagacatacaaaaatcccagcctgcgggctcaaggagggcaaactcaatctcccaccaaaagtcacactccaagtcccacatctcctaaatcttatccttctcaaaaacatgccccagtgttggagttggaaggaaagaaatggagagtggagtaccaagaggacaggaatgaccttgtgatttcagagactgagctgaaacaagtggcttacattttcaaatgcgaaaaatcaactattcagataaaagggaaagtaaactccattataattgacaactgtaaaaaactcggcctggtgtttgacaatgtggtgggcattgtggaagtgatcaactcccaggacattcaaatccaggtaatggggagagtgccaacaatttccattaataagacagaaggttgccacatatacctcagtgaagatgcattagactgtgagatcgtgagcgccaagtcatctgaaatgaacatacttatccctcaggatggtgattatagagaatttcccattcctgaacagttcaagacagcatgggatggatccaagttaatcactgaacctgcagaaattatggcctaacttcctgagagaccgaaccccctcacctgaatccccctctatcaaacaaacaaaaaagcagcagtaaagagctagaagttgcagtagcccctactgctttagctttggcctccaacgattctgtgctatagatacagcactgtttctggcacgcctcgtgggcattttgaaatatttaacgtttcctcatgatttgcctttgtgtgtgattttagttccacatgatgacttgtgaacattagggatttaaagg

SEQ ID NO: 3714 - protein, 477 aa, Homo sapiens; identical to SEQ ID NO: 410

SEQ ID NO: 3715 - DNA, 2343 bp, Homo sapiens
cttttctcccacggcccatctgcccctcctttcctccacccccttctcctctctgctcccctttatttccactccccacccgcgtggctttgctctccctctcccccctcagctcgtctgtatttggagctccggaagctgccggcgactctcccctggagcagcgtgactgacaccggctcctattcagctgggaggagggagaggggaggagaaggggagggccgcgggaggagggtacgagtggccgaccacggatttgcattgccgaggacgggaccccagggcagcgaagcagaatggccaacatgcagggactggtggaaagactggaacgagctgtcagccgcctggagtcgctgtctgcagagtcccacaggccccctgggaactgcggggaagtcaatggtgtcattgcaggtgtggcaccctccgtggaagcctttgacaagctgatggacagtatggtggccgagtttttaaagaacagtaggatccttgctggggacgtggagacccatgcagaaatggtgcacagtgctttccaggcccagcgggctttccttctgatggcctctcagtaccaacaaccccacgagaatgacgtggccgcacttctgaaacccatatcggaaaagattcaggaaatccaaactttcagagagagaaaccgggggagtaacatgtttaatcatctttcggccgtcagcgaaagcatccctgcccttggatggatagctgtgtctcccaaacctggtccttatgtcaaggagatgaatgacgctgccaccttttacactaacagggtcttaaaggactacaaacacagtgatttgcgtcatgtggattgggtgaagtcatatttgaacatttggagtgaacttcaagcatacatcaaggaacaccacaccacgggcctcacatggagcaaaacaggtcctgtagcatccacagtatcagcgttttctgtcctctcctctgggcctggccttcctccaccccctcctcctctgcctcctccagggccacctccacttttcgagaatgaaggcaaaaaagaggaatcttctccttcacgctcagctttatttgcccaacttaaccagggagaagcaattacaaaagggctccgccatgtcacagatgaccagaagacatacaaaaatcccagcctgcgggctcaaggagggcaaactcaatctcccaccaaaagtcacactccaagtcccacatctcctaaatcttatccttctcaaaaacatgccccagtgttggagttggaaggaaagaaatggagagtggagtaccaagaggacaggaatgaccttgtgatttcagagactgagctgaaacaagtggcttacattttcaaatgcgaaaaatcaactattcagataaaagggaaagtaaactccattataattgacaactgtaaaaaactcggcctggtgtttgacaatgtggtgggcattgtggaagtgatcaactcccaggacattcaaatccaggtaatggggagagtgccaacaatttccattaataagacagaaggttgccacatatacctcagtgaagatgcattagactgtgagatcgtgagcgccaagtcatctgaaatgaacatacttatccctcaggatggtgattatagagaatttcccattcctgaacagttcaagacagcatgggatggatccaagttaatcactgaacctgcagaaattatggcctaacttcctgagagaccgaaccccctcacctgaatccccctctatcaaacaaacaaaaaagcagcagtaaagagctagaagttgcagtagcccctactgctttagctttggcctccaacgattctgtgctatagatacagcactgtttctggcacgcctcgtgggcattttgaaatatttaacgtttcctcatgatttgcctttgtgtgtgattttagttccacatgatgacttgtgaacattagggatttaaaggaaaaaaaaaaagaattctgttcccctcatatcatgaacacagtaactgataggtaaaaagactgcatgattcacttttacacttatatttcattgctagttaaaaaataaaacctttgagaatctaagatgtacatttttaccttttaggcaatttcaatataatgtagaagtagtagtgtgccctgaaaaatgtacacgttttttcttattgttaccacatgttcacctttatcagcgtggatactgtcagcatgagtacatatttcaacccacgcttgtaaaagacataagagtttataaaggaccaaattcagttccttggtccttggaagacctatattctctgtagttactg

SEQ ID NO: 3716 - protein, 477 aa, Homo sapiens; identical to SEQ ID NO: 410

SEQ ID NO: 3717 - DNA, 3081 bp, Homo sapiens
cttttctcccacggcccatctgcccctcctttcctccacccccttctcctctctgctcccctttatttccactccccacccgcgtggctttgctctccctctcccccctcagctcgtctgtatttggagctccggaagctgccggcgactctcccctggagcagcgtgactgacaccggctcctattcagctgggaggagggagaggggaggagaaggggagggccgcgggaggagggtacgagtggccgaccacggatttgcattgccgaggacgggaccccagggcagcgaagcagaatggccaacatgcagggactggtggaaagactggaacgagctgtcagccgcctggagtcgctgtctgcagagtcccacaggccccctgggaactgcggggaagtcaatggtgtcattgcaggtgtggcaccctccgtggaagcctttgacaagctgatggacagtatggtggccgagtttttaaagaacagtaggatccttgctggggacgtggagacccatgcagaaatggtgcacagtgctttccaggcccagcgggctttccttctgatggcctctcagtaccaacaaccccacgagaatgacgtggccgcacttctgaaacccatatcggaaaagattcaggaaatccaaactttcagagagagaaaccgggggagtaacatgtttaatcatctttcggccgtcagcgaaagcatccctgcccttggatggatagctgtgtctcccaaacctggtccttatgtcaaggagatgaatgacgctgccaccttttacactaacagggtcttaaaggactacaaacacagtgatttgcgtcatgtggattgggtgaagtcatatttgaacatttggagtgaacttcaagcatacatcaaggaacaccacaccacgggcctcacatggagcaaaacaggtcctgtagcatccacagtatcagcgttttctgtcctctcctctgggcctggccttcctccaccccctcctcctctgcctcctccagggccacctccacttttcgagaatgaaggcaaaaaagaggaatcttctccttcacgctcagctttatttgcccaacttaaccagggagaagcaattacaaaagggctccgccatgtcacagatgaccagaagacatacaaaaatcccagcctgcgggctcaaggagggcaaactcaatctcccaccaaaagtcacactccaagtcccacatctcctaaatcttatccttctcaaaaacatgccccagtgttggagttggaaggaaagaaatggagagtggagtaccaagaggacaggaatgaccttgtgatttcagagactgagctgaaacaagtggcttacattttcaaatgcgaaaaatcaactattcagataaaagggaaagtaaactccattataattgacaactgtaaaaaactcggcctggtgtttgacaatgtggtgggcattgtggaagtgatcaactcccaggacattcaaatccaggtaatggggagagtgccaacaatttccattaataagacagaaggttgccacatatacctcagtgaagatgcattagactgtgagatcgtgagcgccaagtcatctgaaatgaacatacttatccctcaggatggtgattatagagaatttcccattcctgaacagttcaagacagcatgggatggatccaagttaatcactgaacctgcagaaattatggcctaacttcctgagagaccgaaccccctcacctgaatccccctctatcaaacaaacaaaaaagcagcagtaaagagctagaagttgcagtagcccctactgctttagctttggcctccaacgattctgtgctatagatacagcactgtttctggcacgcctcgtgggcattttgaaatatttaacgtttcctcatgatttgcctttgtgtgtgattttagttccacatgatgacttgtgaacattagggatttaaaggaaaaaaaaaaagaattctgttcccctcatatcatgaacacagtaactgataggtaaaaagactgcatgattcacttttacacttatatttcattgctagttaaaaaataaaacctttgagaatctaagatgtacatttttaccttttaggcaatttcaatataatgtagaagtagtagtgtgccctgaaaaatgtacacgttttttcttattgttaccacatgttcacctttatcagcgtggatactgtcagcatgagtacatatttcaacccacgcttgtaaaagacataagagtttataaaggaccaaattcagttccttggtccttggaagacctatattctctgtagttactgaaaaccgaaagtcaattctaattattcatcttacatatttttccaccatgtcatttgaaaacttgcttttcttctgcataagagattcttatgccaaaaacattaaacagaagaaatcattttttttgctatgtaatacctcgcaactttgctctaaaatcaagctcagttattattttccaagtttgaacatgttaaatatcagatgccttgtaaattatgtctttaacgttttcttatagactaatttcctcttttccacctgccagacttgctaaccaagctcgaaaatgaacatgaaaaagccatacatgtattatttctcctaaaacctaaggcattatctgttggtttggcttgctgctcctattttgtagtcttgatagtagatgcttcttcagcgtaagagtagctatgatattcctttttatcttttcagtacatagtgctgaaaaatctgcaacttcttggatcatatttaatgaattatagtataatgcttgcaggcccagtacaagcatatatattgtgcctcttacagcctttggaatacattgtttccattttttaaatatcttctatatccatatagtattcaaattattaatgctcatgtaccaaggttttgctataaaagttttgtctgtatgaataatgtggctttagtaaataatcatttttcaactgtaaacttattctgaaataaagtaaaattctaattgtttaaatactgtgatg

SEQ ID NO: 3718 - protein, 477 aa, Homo sapiens; identical to SEQ ID NO: 410

SEQ ID NO: 3719 - DNA, 2825 bp, Homo sapiens
cttttctcccacggcccatctgcccctcctttcctccacccccttctcctctctgctcccctttatttccactccccacccgcgtggctttgctctccctctcccccctcagctcgtctgtatttggagctccggaagctgccggcgactctcccctggagcagcgtgactgacaccggctcctattcagctgggaggagggagaggggaggagaaggggagggccgcgggaggagggtacgagtggccgaccacggatttgcattgccgaggacgggaccccagggcagcgaagcagaatggccaacatgcagggactggtggaaagactggaacgagctgtcagccgcctggagtcgctgtctgcagagtcccacaggccccctgggaactgcggggaagtcaatggtgtcattgcaggtgtggcaccctccgtggaagcctttgacaagctgatggacagtatggtggccgagtttttaaagaacagtaggatccttgctggggacgtggagacccatgcagaaatggtgcacagtgctttccaggcccagcgggctttccttctgatggcctctcagtaccaacaaccccacgagaatgacgtggccgcacttctgaaacccatatcggaaaagattcaggaaatccaaactttcagagagagaaaccgggggagtaacatgtttaatcatctttcggccgtcagcgaaagcatccctgcccttggatggatagctgtgcccctcctcctctgcctcctccagggccacctccacttttcgagaatgaaggcaaaaaagaggaatcttctccttcacgctcagctttatttgcccaacttaaccagggagaagcaattacaaaagggctccgccatgtcacagatgaccagaagacatacaaaaatcccagcctgcgggctcaaggagggcaaactcaatctcccaccaaaagtcacactccaagtcccacatctcctaaatcttatccttctcaaaaacatgccccagtgttggagttggaaggaaagaaatggagagtggagtaccaagaggacaggaatgaccttgtgatttcagagactgagctgaaacaagtggcttacattttcaaatgcgaaaaatcaactattcagataaaagggaaagtaaactccattataattgacaactgtaaaaaactcggcctggtgtttgacaatgtggtgggcattgtggaagtgatcaactcccaggacattcaaatccaggtaatggggagagtgccaacaatttccattaataagacagaaggttgccacatatacctcagtgaagatgcattagactgtgagatcgtgagcgccaagtcatctgaaatgaacatacttatccctcaggatggtgattatagagaatttcccattcctgaacagttcaagacagcatgggatggatccaagttaatcactgaacctgcagaaattatggcctaacttcctgagagaccgaaccccctcacctgaatccccctctatcaaacaaacaaaaaagcagcagtaaagagctagaagttgcagtagcccctactgctttagctttggcctccaacgattctgtgctatagatacagcactgtttctggcacgcctcgtgggcattttgaaatatttaacgtttcctcatgatttgcctttgtgtgtgattttagttccacatgatgacttgtgaacattagggatttaaaggaaaaaaaaaaagaattctgttcccctcatatcatgaacacagtaactgataggtaaaaagactgcatgattcacttttacacttatatttcattgctagttaaaaaataaaacctttgagaatctaagatgtacatttttaccttttaggcaatttcaatataatgtagaagtagtagtgtgccctgaaaaatgtacacgttttttcttattgttaccacatgttcacctttatcagcgtggatactgtcagcatgagtacatatttcaacccacgcttgtaaaagacataagagtttataaaggaccaaattcagttccttggtccttggaagacctatattctctgtagttactgaaaaccgaaagtcaattctaattattcatcttacatatttttccaccatgtcatttgaaaacttgcttttcttctgcataagagattcttatgccaaaaacattaaacagaagaaatcattttttttgctatgtaatacctcgcaactttgctctaaaatcaagctcagttattattttccaagtttgaacatgttaaatatcagatgccttgtaaattatgtctttaacgttttcttatagactaatttcctcttttccacctgccagacttgctaaccaagctcgaaaatgaacatgaaaaagccatacatgtattatttctcctaaaacctaaggcattatctgttggtttggcttgctgctcctattttgtagtcttgatagtagatgcttcttcagcgtaagagtagctatgatattcctttttatcttttcagtacatagtgctgaaaaatctgcaacttcttggatcatatttaatgaattatagtataatgcttgcaggcccagtacaagcatatatattgtgcctcttacagcctttggaatacattgtttccattttttaaatatcttctatatccatatagtattcaaattattaatgctcatgtaccaaggttttgctataaaagttttgtctgtatgaataatgtggctttagtaaataatcatttttcaactgtaaacttattctgaaataaagtaaaattctaattgtttaaatactgtgatg

SEQ ID NO: 3720 - protein, 258 aa, Homo sapiens
MANMQGLVERLERAVSRLESLSAESHRPPGNCGEVNGVIAGVAPSVEAFDKLMDSMVAEFLKNSRILAGDVETHAEMVHSAFQAQRAFLLMASQYQQPHENDVAALLKPISEKIQEIQTFRERNRGSNMFNHLSAVSESIPALGWIAVPLLLCLLQGHLHFSRMKAKKRNLLLHAQLYLPNLTREKQLQKGSAMSQMTRRHTKIPACGLKEGKLNLPPKVTLQVPHLLNLILLKNMPQCWSWKERNGEWSTKRTGMTL

SEQ ID NO: 3721 - DNA, 735 bp, Homo sapiens
ggagcacctgccctgattcttcctttctgttctgtgttcgctgacataagcaaaacggaacagacaacatgtgcaggggtgaatttgtgagcatgcccagggctgctgtgcttggggtgaatcacattacccttgggtacctcttcacttgcatctgggaaaaaactgattgagtctcacatgcatgatattcctctgtggaaatgcatggcatgtatctacagctcagtccatgccagaagttcctgagagctggctgggtgtggtggttcaggcctgtaatcccagcatttttagaggccaagtggggggaattgcttgaggccaggagttcaagaccagcctgggtgacagaggaggctctgtcctaaaaaaagaagaaaaaaatatgcttttagaggattgtttccaatgtcctgaattaatcatgttactgaatactgcagaatatatgttctttgtcttgcctcttgccttgacgcctcttttccctacttgccgtctttctaaaactgtgcccataattggaaatttgttgttgttttctatctagacttcgagataactctgttgtttgcctggaggctgcttcagcaatacttttgtacaaaaggaatgacctctttacatactgatttcgtttagcttatcttgttatttctattcatgcacccattcccacaaaacacacagacacacacacacacacacacgtgcgcacgtgcactccctcca

SEQ ID NO: 3722 - protein, 55 aa, Homo sapiens [sequence omitted]

SEQ ID NO: 3723 - DNA, 1038 bp, Homo sapiens
gagtccaccggtaaatgggtgttgcatggtgtggagtatgctgcttagtccgctttcagaagctcaagggtgacctgggagtgctttgactactcctagcagtaaaacgaatgcatttgcacttccagctgcatttcttcggcttcttgtacagtcttgagtctgggtcaacacatgagacgtccccaggtgcctctgcatttgctgaccaatggtcacttctgttgctgccatctaagagctcagagggagatccactcttgagtccagggccagaagcaggtgtgagctatggcacccggcctgactggtgtctttataagaagaggagatgaagacagagacacacacagaggaggcgtggggagagaccaaccctgccgtcaccttgatcctggacttccagcctccagaactaattcaggtgaagatgagctgaacctgctccctggccttcccctagtttctgtggcttgtgacagaaggtggaaaggaccaacatggaagagatgcatgaacaaactgcatgttttcagcaaacgtttccaagggttatcttagctggatgcgactgtactttggaagagtattttaggactccatgtctttatgaccctagcttctgctttaaagttgaagaactgagtcctgttatcagcttcatctctgtttggctcccaaagtaagggaattgttttgcaaaagtaagatgagttttatcagcaagctttgtagaaactttacccaaaaaggaaaaccagattcccactcaggctgttttgtaagagacggcacaaactctgggagtttgacctcaaagatgtatcactgagcaaaacaaaataggcctgttatttctggaacccatggttctcatgtagttctgtatcaggtggaaaatggttcagtcattgttacttctttttaacgaatttctttttctgattataaaaatcaatatatgctcttcgtgaaacactgaaaaatacagacgtaaaacataagtaaacaataaacattctgcattccaccacatgg

SEQ ID NO: 3724 - protein, 89 aa, Homo sapiens
MAPGLTGVFIRRGDEDRDTHRGGVGRDQPCRHLDPGLPASRTNSGEDELNLLPGLPLVSVACDRRWKGPTWKRCMNKLHVFSKRFQGLS

SEQ ID NO: 3725 - DNA, 965 bp, Homo sapiens
agggccacctccacttttcgagaatgaaggcaaaaaagaggaatcttctccttcacgctcagctttatttgcccaacttaaccagggagaagcaattacaaaagggctccgccatgtcacagatgaccagaagacatacaaaaatcccagcctgcgggctcaaggagggcaaactcaatctcccaccaaaagtcacactccaagtcccacatctcctaaatcttatccttctcaaaaacatgccccagtgttggagttggaaggaaagaaatggagagtggagtaccaagaggacaggaatgaccttgtgatttcagagactgagctgaaacaagtggcttacattttcaaatgcgaaaaatcaactattcagataaaagggaaagtaaactccattataattgacaactgtaaaaaactcggcctggtgtttgacaatgtggtgggcattgtggaagtgatcaactcccaggacattcaaatccaggtaatggggagagtgccaacaatttccattaataagacagaaggttgccacatatacctcagtgaagatgcattagactgtgagatcgtgagcgccaagtcatctgaaatgaacatacttatccctcaggatggtgattatagagaatttcccattcctgaacagttcaagacagcatgggatggatccaagttaatcactgaacctgcagaaattatggcctaacttcctgagagaccgaaccccctcacctgaatccccctctatcaaacaaacaaaaaagcagcagtaaagagctagaagttgcagtagcccctactgctttagctttggcctccaacgattctgtgctatagatacagcactgtttctggcacgcctcgtgggcattttgaaatatttaacgtttcctcatgatttgcctttgtgtgtgattttagttccacatgatgacttgtgaacattagggatttaaagg

SEQ ID NO: 3726 - protein, 95 aa, Homo sapiens
MKAKKRNLLLHAQLYLPNLTREKQLQKGSAMSQMTRRHTKIPACGLKEGKLNLPPKVTLQVPHLLNLILLKNMPQCWSWKERNGEWSTKRTGMTL

SEQ ID NO: 3727 - DNA, 1317 bp, Homo sapiens
agagaatttcccattcctgaacagttcaagacagcatgggatggatccaagttaatcactgaacctgcagaaattatggcctaacttcctgagagaccgaaccccctcacctgaatccccctctatcaaacaaacaaaaaagcagcagtaaagagctagaagttgcagtagcccctactgctttagctttggcctccaacgattctgtgctatagatacagcactgtttctggcacgcctcgtgggcattttgaaatatttaacgtttcctcatgatttgcctttgtgtgtgattttagttccacatgatgacttgtgaacattagggatttaaaggaaaaaaaaaaagaattctgttcccctcatatcatgaacacagtaactgataggtaaaaagactgcatgattcacttttacacttatatttcattgctagttaaaaaataaaacctttgagaatctaagatgtacatttttaccttttaggcaatttcaatataatgtagaagtagtagtgtgccctgaaaaatgtacacgttttttcttattgttaccacatgttcacctttatcagcgtggatactgtcagcatgagtacatatttcaacccacgcttgtaaaagacataagagtttataaaggaccaaattcagttccttggtccttggaagacctatattctctgtagttactgaaaaccgaaagtcaattctaattattcatcttacatatttttccaccatgtcatttgaaaacttgcttttcttctgcataagagattcttatgccaaaaacattaaacagaagaaatcattttttttgctatgtaatacctcgcaactttgctctaaaatcaagctcagttataaatgaacatgaaaaagccatacatgtattatttctcctaaaacctaaggcattatctgttggtttggcttgctgctcctattttgtagtcttgatagtagatgcttcttcagcgtaagagtagctatgatattcctttttatcttttcagtacatagtgctgaaaaatctgcaacttcttggatcatatttaatgaattatagtataatgcttgcaggcccagtacaagcatatatattgtgcctcttacagcctttggaatacattgtttccattttttaaatatcttctatatccatatagtattcaaattattaatgctcatgtaccaaggttttgctataaaagttttgtctgtatgaataatgtggctttagtaaataatcatttttcaactgtaaacttattctgaaataaagtaaaattctaattgtttaaatactgtgatg

SEQ ID NO: 3728 - protein, 66 aa, Homo sapiens
MPKTLNRRNHFFCYVIPRNFALKSSSVINEHEKAIHVLFLLKPKALSVGLACCSYFVVLIVDASSA

SEQ ID NO: 3729 - DNA, 459 bp, Homo sapiens
actgtgcaagcagagtggagagtcactggcatacactgtggctcgagatagccccagctggttctaaacagagtgactctgttttccctgagtttcctcggctgagtgtgtagactttctctacccactctagtcacaaattcacttctgtactcatttactaagcattttaagtgctggatactatgacaggtattgggaatgcaaagatgagtgaaacaccattttggttgttgagagtatgacagactagatgggagagactgccaggtaaacaggtacgggggtcaagtgtgaacccaaaggagggagtggtcagttctacctttgagagacagaggtgacaactgggaaaggctttagagaggaggtggctttgagttgagcttaaaagtattataagaacatggccactgtatccagcttgtgatatacttttaataaatttctcttaaactt

SEQ ID NO: 3730 - protein, 36 aa, Homo sapiens
CASRVESHWHTLWLEIAPAGSKQSDSVFPEFPRLSV

SEQ ID NO: 3731 - DNA, 1533 bp, Homo sapiens
ggggaggggccattgggggagggaaacggagcagtgacaggtatcccagagggtgctgctgaggcgacgatggccgaggggcccgaggaagcccgaggccaccctcccgggcaggacgatggcggaggggaccacgagcccgtcccttccctgagaggccctcctaccaccgccgtcccatgcccccgcgacgacccccaggccgaaccccaggccccgggccggcccacagccccgggcctcgcggctgccgccgcagccgacaaattggagccgccgcgcgagctcaggaagcgcggggaggcggcctccggctccggtgcagagctgcaggagcaggcgggctgcgaggcgcccgaagccgcggcgccacgagagagaccagctcggctgagcgcccgcgagtactcccggcaagtgcacgagtggctgtggcagtcctactgcggctacctcacctggcacagcggcctggccgccttcccagcctactgcagcccccagccctccccgcagagcttcccttcgggcggcgctgcagtcccccaggccgcggcgccgccgcccccgcagctgggctattacaaccccttctacttcctgagccccggggccgcggggcctgacccgcggacagctgccggcatcagcacccctgctccagtcgcgggcctgggaccccgggctcctcacgtgcaggcgtcggtccgggccactccagtgacgagggtaggatccgcagccccttcgcgaagcccgagcgagaccgggcgacaggcaggcagagaatatgttattccatccttggcccacagatttatggcagagatggtggatttctttattctcttctttataaaagcaaccattgtcttaagcattatgcacctcagtgggataaaggatatctctaagtttgctatgcattatataatagaagaaatagatgaagacacatcaatggaagacttgcagaaaatgatggttgtggcacttatatacagattattagtttgtttctatgagataatttgcatttggggagcaggtggagctaccccagggaagttcctgctggggcttcgagttgtgacatgtgatacatcagtgcttattgcaccaagtcgggttttagtgattccttcctcaaatgttagcattacaacgtccactatccgagctttgatcaagaatttttcaattgcttcttttttccctgctttcatcacactgctgttttttcagcataatcgaacagcttatgacattgtagcaggaaccattgtggtaaaaagaaatggggtcagatgatgccccccaaaaccctgatttccacacactaagactaaattatgtatcaaggccatcagtatccctgggttacactaattgatgatttagaaattaaagcagtcactccagtgtgatgcaggtgactactctgaaagtattgattatacttgaatgccaaagaacttgtccagaagaaaaacctgttaaattcaagtattaaaatttttagatcaaaaaggc

SEQ ID NO: 3732 - protein, 413 aa, Homo sapiens; identical to SEQ ID NO: 412

SEQ ID NO: 3733 - DNA, 4691 bp, Homo sapiens
ggggaggggccattgggggagggaaacggagcagtgacaggtatcccagagggtgctgctgaggcgacgatggccgaggggcccgaggaagcccgaggccaccctcccgggcaggacgatggcggaggggaccacgagcccgtcccttccctgagaggccctcctaccaccgccgtcccatgcccccgcgacgacccccaggccgaaccccaggccccgggccggcccacagccccgggcctcgcggctgccgccgcagccgacaaattggagccgccgcgcgagctcaggaagcgcggggaggcggcctccggctccggtgcagagctgcaggagcaggcgggctgcgaggcgcccgaagccgcggcgccacgagagagaccagctcggctgagcgcccgcgagtactcccggcaagtgcacgagtggctgtggcagtcctactgcggctacctcacctggcacagcggcctggccgccttcccagcctactgcagcccccagccctccccgcagagcttcccttcgggcggcgctgcagtcccccaggccgcggcgccgccgcccccgcagctgggctattacaaccccttctacttcctgagccccggggccgcggggcctgacccgcggacagctgccggcatcagcacccctgctccagtcgcgggcctgggaccccgggctcctcacgtgcaggcgtcggtccgggccactccagtgacgagggtaggatccgcagccccttcgcgaagcccgagcgagaccgggcgacaggcaggcagagaatatgttattccatccttggcccacagatttatggcagagatggtggatttctttattctcttctttataaaagcaaccattgtcttaagcattatgcacctcagtgggataaaggatatctctaagtttgctatgcattatataatagaagaaatagatgaagacacatcaatggaagacttgcagaaaatgatggttgtggcacttatatacagattattagtttgtttctatgagataatttgcatttggggagcaggtggagctaccccagggaagttcctgctggggcttcgagttgtgacatgtgatacatcagtgcttattgcaccaagtcgggttttagtgattccttcctcaaatgttagcattacaacgtccactatccgagctttgatcaagaatttttcaattgcttcttttttccctgctttcatcacactgctgttttttcagcataatcgaacagcttatgacattgtagcaggaaccattgtggtaaaaagaaatggggtcagatgatgccccccaaaaccctgatttccacacactaagactaaattatgtatcaaggccatcagtatccctgggttacactaattgatgatttagaaattaaagcagtcactccagtgtgatgcaggtgactactctgaaagtattgattatacttgaatgccaaagaacttgtccagaagaaaaacctgttaaattcaagtattaaaatttttagatcaaaaaggcaaatgattttataaacaatggacaatatatactttcttaagatctaaggtactttcttaagatctaagaatttgctgaaagcattttcagctttgaaatctccaaatgaaactttaaaatttattttggtttatcccaaaataatggaaaatgtccagttgtgttttgtaaacacctatgtaactcatcttttagtttacacttcctggggaaattgtctttggtgtttagaggagggaatgagaacacaaattggataatccactgtctcccatcccaggaggtggtgagttggctacaagagaaagggacaagtgaggcaggcctagcagttcccttacctgaagttttcaaatccatactgcagttccctctcgtaatgatgtaactttacaactattcttaatgcttgaacatgtatttaggggcaagtttctcatgatgatgaaaaagtatcaagtcatattgctatgttaattggtttttttttttaaaaggtaagttagtgattactgttaatggtgggggagtaagttttcactgtaaattgaacttataatttatgtgcaagtgttttcagtgccctgaatcaaactataaatgtggggagaaatcacctccatcaaacagttgcatatttactgtaaaagtattcccagtatgtgtgcagcatgaagaaagtattagtgcttctcagtgttctcagtgtaaattctatttatatacagcatattcacatactactttccttatattttatatagttctatgactgttgaaacatcaaggagttaaaaaaatcttaatatttcatgattaactctaagtactattaattaatagcttgcgaaatattagcaattttcccattatggactattctctctaaagcaagagagactagcattcccagacatcattctagggtctttaagctcattttgggtctgctaaagtttggggggaaatgttacgcaaagtgatactgtgtatgttgccattttgctttattcttctgttgaagcaaaattgtggggttttattatgtgtgtgtgcttttcctagatgtcccagttagctgtgctgagatatacctgtactatttatggtttaagttttgattcttaggtattttctccagctctgacattgttttccaaagacacactaaactgcattgcacagttcaaaatttgattacttaagggatcaatctaggtggtgttcttggtcttaaatttaacagcaaacacagcacatatctattatcactatattaattttcaaaggtttttctttgacgtttaaaactgtgacaacagatattcacatttgattatagaaacttaatgtctattaataattttagtacaaaatttcataaaccgtgtttttcaaaataagtttatgtcaaatccagcttcccagaaacactaataattaagtacatcaatgtactaaataaatcattcagttgcacccatggggaagattgtgttactgcccttcacagtgaaaaaaagaaaaatctttcatttttaaaattaggagatgttacgtaacttggcactttagtagtgtatacactagcattagtttatacaccacttttgccgctggggaattcaagttgaaatgtccctcaatcatataggtctggaatacatctttcattcataatttctgctcagataattgaatagtttgccatcgagattattttcatttatactataaaacaaaagcaaactagtccagtttaattttttgtacttagaatattgcacattttctatatatgagttattcagattagtatctatgtaggttcagtcagatccaaccatggattcgaggtattatactgtataaccctacaaaatacatagaagtattatttgccttcataatagaacccaagagtctgtttcaatttatgaattcagtatttgcaccgagattttgattcccaaagtttggaaaaaaatgacaaaacaacgagggaagaaggaaccagaccttagtgccacatatttttctcttggggttgtaaggtagtctcctgctttccagaacactttattatatttcacttatagacctgattttctgtgtcaaagtataattctcatgctgaagctgtagcctaaaaagccaaaagaaagttgtcttcattgtacaaacatattcatcactttaacaataagggaacaaaatttagtattcaagctgagtgagaatactgtttcaatgagcatgtccctaagataaaccagaattggcagttaatttaggcgtctagaaaatctcagttcccaccagtaaaattatcctgagtagctaatgcaccttgagaaaaatctggcatactgaataaataacattaacttgggagccaagagctgggtaagccttacctttagactactctgtgactacagaaataaagccagcacttttggaactaataagccttcacttgtcagtatcataaagagtattgcccaactgaactttgctcccactggtttaatagttacttatttctgcctaagcactcaccttccgattttacccaagtatatatataggatagaaaaaaatgcattatatttgagagctacttcgcccaaattacaaaatgagtgtttttagattcaagtgacagtaaaaggatttgttcccttcagtgacttgagtgttttagttatgcataagtatttctagcaaaggaagggtagaaaggaattgaaaattaatttacactagttgctacttgggaataaagggctttttgaggggggtatggatattaaatgttttcgttatatacttatccctattaaaacaggcagttgtttctttgaatatgcctaaataacagtattcttaaaatctgacagacaagtaacatgtcaattacttgatattccttgtctccagtaccacaggccactcttgacatcccatgtttgcctggataaagttcctcatttcaaacagtatacatacttctttgcagttcattatagtaaggcttaacctgtaaacagtatctgatggcccacctataaataaaattcagcattctatttttaataatttgtatgccaccaatttgtattatttgtctcaataaatacttagtcatcaatgca

SEQ ID NO: 3734 - protein, 413 aa, Homo sapiens; identical to SEQ ID NO: 412

SEQ ID NO: 3735 - DNA, 3908 bp, Homo sapiens
gcacgaggtaggatccgcagccccttcgcgaagcccgagcgagaccgggcgacaggcaggcagagaatatgttattccatccttggcccacagatttatggcagagatggtggatttctttattctcttctttataaaagcaaccattgtcttaagcattatgcacctcagtgggataaaggatatctctaagtttgctatgcattatataatagaagaaatagatgaagacacatcaatggaagacttgcagaaaatgatggttgtggcacttatatacagattattagtttgtttctatgagataatttgcatttggggagcaggtggagctaccccagggaagttcctgctggggcttcgagttgtgacatgtgatacatcagtgcttattgcaccaagtcgggttttagtgattccttcctcaaatgttagcattacaacgtccactatccgagctttgatcaagaatttttcaattgcttcttttttccctgctttcatcacactgctgttttttcagcataatcgaacagcttatgacattgtagcaggaaccattgtggtaaaaagaaatggggtcagatgatgccccccaaaaccctgatttccacacactaagactaaattatgtatcaaggccatcagtatccctgggttacactaattgatgatttagaaattaaagcagtcactccagtgtgatgcaggtgactactctgaaagtattgattatacttgaatgccaaagaacttgtccagaagaaaaacctgttaaattcaagtattaaaatttttagatcaaaaaggcaaatgattttataaacaatggacaatatatactttcttaagatctaaggtactttcttaagatctaagaatttgctgaaagcattttcagctttgaaatctccaaatgaaactttaaaatttattttggtttatcccaaaataatggaaaatgtccagttgtgttttgtaaacacctatgtaactcatcttttagtttacacttcctggggaaattgtctttggtgtttagaggagggaatgagaacacaaattggataatccactgtctcccatcccaggaggtggtgagttggctacaagagaaagggacaagtgaggcaggcctagcagttcccttacctgaagttttcaaatccatactgcagttccctctcgtaatgatgtaactttacaactattcttaatgcttgaacatgtatttaggggcaagtttctcatgatgatgaaaaagtatcaagtcatattgctatgttaattggtttttttttttaaaaggtaagttagtgattactgttaatggtgggggagtaagttttcactgtaaattgaacttataatttatgtgcaagtgttttcagtgccctgaatcaaactataaatgtggggagaaatcacctccatcaaacagttgcatatttactgtaaaagtattcccagtatgtgtgcagcatgaagaaagtattagtgcttctcagtgttctcagtgtaaattctatttatatacagcatattcacatactactttccttatattttatatagttctatgactgttgaaacatcaaggagttaaaaaaatcttaatatttcatgattaactctaagtactattaattaatagcttgcgaaatattagcaattttcccattatggactattctctctaaagcaagagagactagcattcccagacatcattctagggtctttaagctcattttgggtctgctaaagtttggggggaaatgttacgcaaagtgatactgtgtatgttgccattttgctttattcttctgttgaagcaaaattgtggggttttattatgtgtgtgtgcttttcctagatgtcccagttagctgtgctgagatatacctgtactatttatggtttaagttttgattcttaggtattttctccagctctgacattgttttccaaagacacactaaactgcattgcacagttcaaaatttgattacttaagggatcaatctaggtggtgttcttggtcttaaatttaacagcaaacacagcacatatctattatcactatattaattttcaaaggtttttctttgacgtttaaaactgtgacaacagatattcacatttgattatagaaacttaatgtctattaataattttagtacaaaatttcataaaccgtgtttttcaaaataagtttatgtcaaatccagcttcccagaaacactaataattaagtacatcaatgtactaaataaatcattcagttgcacccatggggaagattgtgttactgcccttcacagtgaaaaaaagaaaaatctttcatttttaaaattaggagatgttacgtaacttggcactttagtagtgtatacactagcattagtttatacaccacttttgccgctggggaattcaagttgaaatgtccctcaatcatataggtctggaatacatctttcattcataatttctgctcagataattgaatagtttgccatcgagattattttcatttatactataaaacaaaagcaaactagtccagtttaattttttgtacttagaatattgcacattttctatatatgagttattcagattagtatctatgtaggttcagtcagatccaaccatggattcgaggtattatactgtataaccctacaaaatacatagaagtattatttgccttcataatagaacccaagagtctgtttcaatttatgaattcagtatttgcaccgagattttgattcccaaagtttggaaaaaaatgacaaaacaacgagggaagaaggaaccagaccttagtgccacatatttttctcttggggttgtaaggtagtctcctgctttccagaacactttattatatttcacttatagacctgattttctgtgtcaaagtataattctcatgctgaagctgtagcctaaaaagccaaaagaaagttgtcttcattgtacaaacatattcatcactttaacaataagggaacaaaatttagtattcaagctgagtgagaatactgtttcaatgagcatgtccctaagataaaccagaattggcagttaatttaggcgtctagaaaatctcagttcccaccagtaaaattatcctgagtagctaatgcaccttgagaaaaatctggcatactgaataaataacattaacttgggagccaagagctgggtaagccttacctttagactactctgtgactacagaaataaagccagcacttttggaactaataagccttcacttgtcagtatcataaagagtattgcccaactgaactttgctcccactggtttaatagttacttatttctgcctaagcactcaccttccgattttacccaagtatatatataggatagaaaaaaatgcattatatttgagagctacttcgcccaaattacaaaatgagtgtttttagattcaagtgacagtaaaaggatttgttcccttcagtgacttgagtgttttagttatgcataagtatttctagcaaaggaagggtagaaaggaattgaaaattaatttacactagttgctacttgggaataaagggctttttgaggggggtatggatattaaatgttttcgttatatacttatccctattaaaacaggcagttgtttctttgaatatgcctaaataacagtattcttaaaatctgacagacaagtaacatgtcaattacttgatattccttgtctccagtaccacaggccactcttgacatcccatgtttgcctggataaagttcctcatttcaaacagtatacatacttctttgcagttcattatagtaaggcttaacctgtaaacagtatctgatggcccacctataaataaaattcagcattctattttt

SEQ ID NO: 3736 - protein, 163 aa, Homo sapiens
MAEMVDFFILFFIKATIVLSIMHLSGIKDISKFAMHYIIEEIDEDTSMEDLQKMMVVALIYRLLVCFYEIICIWGAGGATPGKFLLGLRVVTCDTSVLIAPSRVLVIPSSNVSITTSTIRALIKNFSIASFFPAFITLLFFQHNRTAYDIVAGTIVVKRNGVR

SEQ ID NO: 3737 - DNA, 3969 bp, Homo sapiens
gcacgaggtaggatccgcagccccttcgcgaagcccgagcgagaccgggcgacaggcaggcagagaatatgttattccatccttggcccacagatttatggcagagatggtggatttctttattctcttctttataaaagcaaccattgtcttaagcattatgcacctcagtgggataaaggatatctctaagtttgctatgcattatataatagaagaaatagatgaagacacatcaatggaagacttgcagaaaatgatggttgtggcacttatatacagattattagtttgtttctatgagataatttgcatttggggagcaggtggagctaccccagggaagttcctgctggggcttcgagttgtgacatgtgatacatcagtgcttattgcaccaagtcgggttttagtgattccttcctcaaatgttagcattacaacgtccactatccgagctttgatcaagaatttttcaattgcttcttttttccctgctttcatcacactgctgttttttcagcataatcgaacagcttatgacattgtagcaggaaccattgtggtaaaaagaaatggggtcagatgatgccccccaaaaccctgatttccacacactaagactaaattatgtatcaaggccatcagtatccctgggttacactaattgatgatttagaaattaaagcagtcactccagtgtgatgcaggtgactactctgaaagtattgattatacttgaatgccaaagaacttgtccagaagaaaaacctgttaaattcaagtattaaaatttttagatcaaaaaggcaaatgattttataaacaatggacaatatatactttcttaagatctaaggtactttcttaagatctaagaatttgctgaaagcattttcagctttgaaatctccaaatgaaactttaaaatttattttggtttatcccaaaataatggaaaatgtccagttgtgttttgtaaacacctatgtaactcatcttttagtttacacttcctggggaaattgtctttggtgtttagaggagggaatgagaacacaaattggataatccactgtctcccatcccaggaggtggtgagttggctacaagagaaagggacaagtgaggcaggcctagcagttcccttacctgaagttttcaaatccatactgcagttccctctcgtaatgatgtaactttacaactattcttaatgcttgaacatgtatttaggggcaagtttctcatgatgatgaaaaagtatcaagtcatattgctatgttaattggtttttttttttaaaaggtaagttagtgattactgttaatggtgggggagtaagttttcactgtaaattgaacttataatttatgtgcaagtgttttcagtgccctgaatcaaactataaatgtggggagaaatcacctccatcaaacagttgcatatttactgtaaaagtattcccagtatgtgtgcagcatgaagaaagtattagtgcttctcagtgttctcagtgtaaattctatttatatacagcatattcacatactactttccttatattttatatagttctatgactgttgaaacatcaaggagttaaaaaaatcttaatatttcatgattaactctaagtactattaattaatagcttgcgaaatattagcaattttcccattatggactattctctctaaagcaagagagactagcattcccagacatcattctagggtctttaagctcattttgggtctgctaaagtttggggggaaatgttacgcaaagtgatactgtgtatgttgccattttgctttattcttctgttgaagcaaaattgtggggttttattatgtgtgtgtgcttttcctagatgtcccagttagctgtgctgagatatacctgtactatttatggtttaagttttgattcttaggtattttctccagctctgacattgttttccaaagacacactaaactgcattgcacagttcaaaatttgattacttaagggatcaatctaggtggtgttcttggtcttaaatttaacagcaaacacagcacatatctattatcactatattaattttcaaaggtttttctttgacgtttaaaactgtgacaacagatattcacatttgattatagaaacttaatgtctattaataattttagtacaaaatttcataaaccgtgtttttcaaaataagtttatgtcaaatccagcttcccagaaacactaataattaagtacatcaatgtactaaataaatcattcagttgcacccatggggaagattgtgttactgcccttcacagtgaaaaaaagaaaaatctttcatttttaaaattaggagatgttacgtaacttggcactttagtagtgtatacactagcattagtttatacaccacttttgccgctggggaattcaagttgaaatgtccctcaatcatataggtctggaatacatctttcattcataatttctgctcagataattgaatagtttgccatcgagattattttcatttatactataaaacaaaagcaaactagtccagtttaattttttgtacttagaatattgcacattttctatatatgagttattcagattagtatctatgtaggttcagtcagatccaaccatggattcgaggtattatactgtataaccctacaaaatacatagaagtattatttgccttcataatagaacccaagagtctgtttcaatttatgaattcagtatttgcaccgagattttgattcccaaagtttggaaaaaaatgacaaaacaacgagggaagaaggaaccagaccttagtgccacatatttttctcttggggttgtaaggtagtctcctgctttccagaacactttattatatttcacttatagacctgattttctgtgtcaaagtataattctcatgctgaagctgtagcctaaaaagccaaaagaaagttgtcttcattgtacaaacatattcatcactttaacaataagggaacaaaatttagtattcaagctgagtgagaatactgtttcaatgagcatgtccctaagataaaccagaattggcagttaatttaggcgtctagaaaatctcagttcccaccagtaaaattatcctgagtagctaatgcaccttgagaaaaatctggcatactgaataaataacattaacttgggagccaagagctgggtaagccttacctttagactactctgtgactacagaaataaagccagcacttttggaactaataagccttcacttgtcagtatcataaagagtattgcccaactgaactttgctcccactggtttaatagttacttatttctgcctaagcactcaccttccgattttacccaagtatatatataggatagaaaaaaatgcattatatttgagagctacttcgcccaaattacaaaatgagtgtttttagattcaagtgacagtaaaaggatttgttcccttcagtgacttgagtgttttagttatgcataagtatttctagcaaaggaagggtagaaaggaattgaaaattaatttacactagttgctacttgggaataaagggctttttgaggggggtatggatattaaatgttttcgttatatacttatccctattaaaacaggcagttgtttctttgaatatgcctaaataacagtattcttaaaatctgacagacaagtaacatgtcaattacttgatattccttgtctccagtaccacaggccactcttgacatcccatgtttgcctggataaagttcctcatttcaaacagtatacatacttctttgcagttcattatagtaaggcttaacctgtaaacagtatctgatggcccacctataaataaaattcagcattctatttttaataatttgtatgccaccaatttgtattatttgtctcaataaatacttagtcatcaatgca

SEQ ID NO: 3738 - protein, 163 aa, Homo sapiens; identical to SEQ ID NO: 3736

SEQ ID NO: 3739 - DNA, 984 bp, Homo sapiens
aataaagaagccccaccctgcctcacccacccttttttaaataaataaatagctagactggtgactgattcttcagcaaaaatattttatgatccagcagattattcactgatttgacatagtctggctgtacccaggaatggagcctgcacggtgaatggctttgtatagaacctctttgtctacaccattatgtgcgctgataagcgttcatggaacgcgttgaaattgtaattatatctgaggaattctgtatagattagaattctgtatagattagagagtgttgaaacggatgatttctatgctgagtttgtgctggtgtatgtgtgaagtgagtgagttgggtgtattgtgcgctaaacttttctgatagaggaagcctgattaaagaatggtccgtgctaaggacttgttagatctagttcactctccatttaataattatatgctatttctatattttcattctcctatcacctgtcttgcctttttcattattttattatgaaacttgtgtaaatacaattttgtttctgtactttttggcataacataaatctgtgaacttgaaatttgaattttgtgttagagatttttttgttgtttgtttagtcttgtctcagattttattatgtaaatcccattattcaaagttgcctaaatccatttggaaatctttaaaaaaaaaattggggattcttaaagttgaatttattggcttttctgatccagttttgtttggaccaaaaaccagtattgtacaaagtattaagcatatatttttatatttactaaaatggactgtggtgactttggataataaggaaaagtttaatattaaagccatgtttattacagtataattaacatgttaaaccatgggataaatgccatcaataaaaaattatgacatactttttgttctagttttacctcataatgaaggcacacagtattattggggggactttgtaaaataaa

SEQ ID NO: 3740 - protein, 38 aa, Homo sapiens
MVRAKDLLDLVHSPFNNYMLFLYFHSPITCLAFFIILL

SEQ ID NO: 3741 - DNA, 2097 bp, Homo sapiens
atgtttggtgtaaatgcaattgcttctgttctttccctactgctcgtttagtatcaactctagtcagccttccagcttctaaacctatatctttgtaaaaatcccttgttgttttaatgcacttttcaaagaagatagagctaagtgtatttgttgatttcactgtctttaaccataagtccagggtgcccttttccccttggtcataggtaagttgtgtgatttgttggaggtgtcaagtatgtactatgtgtcagtggagaaaatagttttctttagattaaaagaccagaatattttaattctttgcatgtttttatatgtaaaggtcagagtctttaatttaaaaacctatcatgttgcggccgggtgcagtggcttacgcctgtaatccagcactttgggaggccgaggtggacagatcacaaggtcaggagatcgagaccatcctggccaacatggtgaaaccacgtctctactaaaatacaaaaaattagccaggcatggtggcacgcacctatatagtcccagctactggggaggctgaggcaggggaatcacttgaacccaggaggcaagggttgcagtgagccaagattgtgccactgtactccagcctgggcaagagagcgagactccgtctcaaaaaacaaacaaacaaacaaaaaaacctatcattttgccctaatgaagtatttctgctttaactattgcaggttcggctttccagtttggcagcagcactacaaatttcaacttcacaaacaacagtccatcaggagtgttcacatttggtgcaaattctagcacacctgcagcctcagcccagccttcaggctcggggggctttccatttaaccagtctccagcagcatttacagtggggtcaaatgggaaaaatgtgttctcttcttctggaacttcattctctggtcgcaagataaagactgctgttagacgcaggaaataaaggtcacattggtgttgtactcaattttaacaacagctggtgccctgctttcagatactggattgtactttgtgctggggttatctgaagtcagatctgcctaaggacttctttaattttggaattttcctcctttctctttcgttacagaagccccaccctgcctcacccacccttttttaaataaataaatagctagactggtgactgattcttcagcaaaaatattttatgatccagcagattattcactgatttgacatagtctggctgtacccaggaatggagcctgcacggtgaatggctttgtatagaacctctttgtctacaccattatgtgcgctgataagcgttcatggaacgcgttgaaattgtaattatatctgaggaattctgtatagattagaattctgtatagattagagagtgttgaaacggatgatttctatgctgagtttgtgctggtgtatgtgtgaagtgagtgagttgggtgtattgtgcgctaaacttttctgatagaggaagcctgattaaagaatggtccgtgctaaggacttgttagatctagttcactctccatttaataattatatgctatttctatattttcattctcctatcacctgtcttgcctttttcattattttattatgaaacttgtgtaaatacaattttgtttctgtactttttggcataacataaatctgtgaacttgaaatttgaattttgtgttagagatttttttgttgtttgtttagtcttgtctcagattttattatgtaaatcccattattcaaagttgcctaaatccatttggaaatctttaaaaaaaaaattggggattcttaaagttgaatttattggcttttctgatccagttttgtttggaccaaaaaccagtattgtacaaagtattaagcatatatttttatatttactaaaatggactgtggtgactttggataataaggaaaagtttaatattaaagccatgtttattacagtataattaacatgttaaaccatgggataaatgccatcaataaaaaattatgacatactttttgttctagttttacctcataatgaaggcacacagtattattggggggactttgtaaaataaa

SEQ ID NO: 3742 - protein, 49 aa, Homo sapiens
MYYVSVEKIVFFRLKDQNILILCMFLYVKVRVFNLKTYHVAAGCSGLRL

SEQ ID NO: 3743 - DNA, 6291 bp, Homo sapiens
ggctttgtgcctctgcggcgccccggagatctccttccccgtccctcttcctttccgagaagccgcgttccgttgttgaactacgtttcccagcgtgccgcgcggccgagagcgtggactcgaccagcccttcctctttgcctatcagctcgtcgcagcatgatgatgcaaatgcgtcgggcgccgatgagtgacgacattctggctcgcgaccgcggcagccgccttagcaggggtaataggcgcaacggcggcggaggctgcagggacgacgacgacgacggcggcggggcgggcgctgtgcgcacaggggaggggtaggcgggcgtcgccagcggcttcaactgcggcagctacggctagggcgacggaagaactcccaccagtcggcggtcgagttaggcctcagcaccgcggggaactgttcgtgctgtcctctgcgggagatctccatagagaccgtgacacacacagaggcgggggtccgcagaggcggccggaccggagcctcctcggcctctgcggccgccacccccttccccgctgccagcactcaccctctctccgctcctgctcgcaacctcgcggttcctggggtgcttgtgcccactgtgtggacagcgcgggcggacttttgggccggggccgggcggcgggggaggctctctaaggcctccgcctctgcctctcccgcccccttacccgccccggagcgggaagcggcggaggctccgccatggcctcgggagccggaggagtcggagggggcggtggcggcaagatccggacgcggcgttgccaccaggggccaattaagccttaccagcaggggcgacaacagcatcagggcattcttagcagggttacagaatctgttaagaatattgtgccagggtggctacaaagatacttcaacaagaatgaagatgtatgcagctgttcaacagacacaagcgaggttccacgctggccagaaaataaagaggaccatctggtatatgccgatgaggagagctctaatattactgatgggagaatcacacctgagccagcagtcagtaatacagaagaaccttcaacaactagtactgcttcaaattatccagatgtgttaacaaggccttctcttcatcggagccatctgaatttttccatgttggaatcccctgcattacactgtcagccatctacatcctcggcattcccaattggcagttcgggattttcccttgtaaaggaaattaaagattctacctctcagcatgatgatgataacatctcaactaccagtggtttttcttcaagagcttctgataaagatataactgtttcaaagaacacttcattgccacctctgtggtccccagaagctgaacgttctcactcactctcacagcacactgccaccagctcaaaaaaaccagcattcaacttgtctgcctttggaacactttccccttcacttgggaattcttcaatccttaaaaccagtcagcttggagattctcctttttatcctggaaaaacaacatacggtggggcagcagctgctgtaagacagtctaaactacgaaatacaccttatcaggcaccagttagaagacaaatgaaagctaagcaactcagtgcacaatcttacggtgtgaccagttcaacagctcggcgaatattgcagtctttagagaagatgtcaagccctttagcggatgcaaaaagaattccatccattgtttcttctcctctgaattctcctcttgataggagtgggatagatatcacagattttcaggccaaaagagaaaaggtggattctcaatatcctcctgttcagagacttatgaccccaaagccagtttccatagcaacaaatcgaagtgtttattttaaaccatctctgactccttctggtgaattcaggaagactaatcaaagaatagataacaagtgcagtactggatatgaaaaaaatatgacacccggacaaaatagagaacaacgagaaagtggcttttcatatccaaatttcagtttgcctgcagccaatggtttatcttctggagtaggtggtggaggtggcaagatgagacgagaaagaacacgctttgttgcttctaaacctctggaggaggaggaaatggaagttccagtattaccgaaaatctctctaccgatcaccagttcttcactgcctacctttaattttagttcccctgagatcacaacttcctctccatcacccatcaattcgtctcaagcattaacaaacaaggtacaaatgacctctccgagcagcactggcagtcccatgtttaaattttcatctccaatcgtaaaatctactgaggcaaatgtactacctccatcatctattggatttacatttagtgtgcctgttgcaaaaacagcagaactttctggttctagtagtactttagaaccaattataagtagttcagctcatcatgtcactacagtgaacagtacaaattgtaagaagacaccacctgaagattgtgagggtccttttagacctgcagaaatcctgaaagaaggaagtgttctagatattctgaaaagccctggtttcgcatcgccgaagatagattctgttgctgctcagcccaccgcaacaagcccagtagtttatacaagaccagcaataagtagcttttcttctagtggaattgggtttggggagagtttaaaagctgggtcatcatggcagtgtgatacatgtctactccagaacaaagttacagacaacaaatgcatagcctgtcaagcagcaaaattgtcacccagagatactgctaaacagactggaattgaaacaccaaataaaagtggcaaaacaactctttctgcatcagggacaggctttggagacaaatttaaaccagtgataggcacttgggattgtgatacctgtttagtgcaaaataaacctgaagcaataaaatgtgtagcctgtgaaacaccgaaacctggaacttgtgtgaagcgagcccttacattgacagtggtttcggaaagtgctgagactatgactgcttcatcttccagctgcactgtaaccactggtaccttaggatttggagataaattcaaaaggcccattggatcttgggagtgttcagtatgctgtgtttctaataatgcagaagacaataagtgtgtgtcctgtatgtctgagaaaccaggaagttcagtacctgcttcaagtagcagcactgtacctgtctctctgccttctggaggctctctaggattggaaaagttcaagaaacccgagggaagctgggactgtgaattgtgcctagtgcagaataaggcagactctaccaaatgtttggcatgtgaaagtgcaaagccaggcacaaaatctgggtttaaaggctttgacacatcttcctcatcttcgaactcagcagcctcctcatccttcaaatttggtgtctcatcatcctcttctgggccttctcagactttaacaagcactggaaattttaaatttggagatcagggaggattcaaaataggtgtgtcatccgattctgggtctataaaccccatgagtgaaggctttaaattttctaaaccaataggagattttaaatttggagtttcatctgaatctaagcccgaagaagttaaaaaagatagtaagaatgataattttaagtttggactttcttctggtttaagcaacccagtttctttaactccatttcaatttggggtatctaatcttggacaggaagaaaagaaagaggaactgcccaaatcttcctctgcaggttttagctttggtacaggtgttattaactccacccctgctcctgctaacaccatagtgacctctgagaacaagagcagcttcaaccttggaaccatagaaaccaagagtgcttcagtggctcctttcacatgtaagacatcagaagctaaaaaagaagaaatgcctgccaccaaaggaggattctcttttggcaacgtggagcctgcctctctgccatctgcctcagtgtttgttttgggaaggacagaagagaaacagcaagagcctgtcacttctacttccctagtttttgggaagaaagctgacaatgaagagccaaagtgtcaaccagtgttttcctttgggaattcagagcaaaccaaagatgagaattcttcaaagtccacatttagttttagtatgacaaaaccatctgagaaggaatctgaacagccagcaaaagccacttttgcctttggagctcaaactagtactacagctgatcaaggtgcagcaaagccagtttttagtttcttgaacaacagttcctctagttcaagtacaccagccacttctgctggtggtggcatatttggtagttccacctcttcctccaatccacctgtggctacctttgtgtttggacagtccagcaatcctgtgagcagctctgcctttggtaacactgctgaatccagcacctctcagtctttgctattttctcaagatagcaaactagcaaccacatccagcacaggtacagctgtcaccccatttgtctttggtccaggagccagcagtaataatactaccacctctggtttcggctttggagccacaaccacatctagctctgcaggatcctcctttgtatttggaactggaccctcagcaccatctgccagtccagcatttggtgctaaccagaccccaacatttggacaaagtcaaggtgccagccagcccaatcccccaggctttggatctatatcatcttccacagcattatttcccactggttctcagcctgcaccacctacttttgggacagtgtcaagcagtagccagccccctgtgtttggacagcaacctagtcagtctgcatttggctctggaacaactcctaattctagttcggctttccagtttggcagcagcactacaaatttcaacttcacaaacaacagtccatcaggagtgttcacatttggtgcaaattctagcacacctgcagcctcagcccagccttcaggctcggggggctttccatttaaccagtctccagcagcatttacagtggggtcaaatgggaaaaatgtgttctcttcttctggaacttcattctctggtcgcaagataaagactgctgttagacgcaggaaataaaggtcacattggtgttgtactcaattttaacaacagctggtgccctgctttcagatactggattgtactttgtgctggggttatctgaagtcagatctgcctaaggacttctttaattttggaattttcctcctttctctttcgttacagaagccccaccctgcctcacccacccttttttaaataaataaatagctagactggtgactgattcttcagcaaaaatattttatgatccagcagattattcactgatttgacatagtctggctgtacccaggaatggagcctgcacggtgaatggctttgtatagaacctctttgtctacaccattatgtgcgctgataagcgttcatggaacgcgttgaaattgtaattatatctgaggaattctgtatagattagaattctgtatagattagagagtgttgaaacggatgatttctatgctgagtttgtgctggtgtatgtgtgaagtgagtgagttgggtgtattgtgcgctaaacttttctgatagaggaagcctgattaaagaatggtccgtgctaaggacttgttagatctagttcactctccatttaataattatatgctatttctatattttcattctcctatcacctgtcttgcctttttcattattttattatgaaacttgtgtaaatacaattttgtttctgtactttttggcataacataaatctgtgaacttgaaatttgaattttgtgttagagatttttttgttgtttgtttagtcttgtctcagattttattatgtaaatcccattattcaaagttgcctaaatccatttggaaatctttaaaaaaaaaattggggattcttaaagttgaatttattggcttttctgatccagttttgtttggaccaaaaaccagtattgtacaaagtattaagcatatatttttatatttactaaaatggactgtggtgactttggataataaggaaaagtttaatattaaagccatgtttattacagtataattaacatgttaaaccatgggataaatgccatcaataaaaaattatgacatactttttgttctagttttacctcataatgaaggcacacagtattattggggggactttgtaaaataaa

SEQ ID NO: 3744 - protein, 1475 aa, Homo sapiens; identical to SEQ ID NO: 414

SEQ ID NO: 3745 - DNA, 918 bp, Homo sapiens
aataaagaagccccaccctgcctcacccacccttttttaaataaataaatagctagactggtgactgattcttcagcaaaaatattttatgatccagcagattattcactgatttgacatagtctggctgtacccaggaatggagcctgcacggtgaatggctttgtatagaacctctttgtctacaccattatgtgcgctgataagcgttcatggaacgcgttgaaattgtaattatatctgaggaattctgtatagattagaattctgtatagattagagagtgttgaaacggatgatttctatgctgagtttgtgctggtgtatgtgtgaagtgagtgagttgggtgtattgtgcgctaaacttttctgatagaggaagcctgattaaagaatggtccgtgctaaggacttgttagatctagttcactctccatttaataattatatgctatttctatattttcattctcctatcacctgtcttgcctttttcattattttattatgaaacttgtgtaaatacaattttgtttctgtactttttggcataacataaatctgtgaacttgaaatttgaattttgtgttagagatttttttgttgtttgtttagtcttgtctcagattttattatgtaaatcccattattcaaagttgcctaaatccatttggaaatctttaaaaaaaaaattggggattcttaaagttgaatttattggcttttctgatccagttttgtttggaccaaaaaccagtattgtacaaagtattaagcatatatttttatatttactaaaatggactgtggtgactttggataataaggaaaagtttaatattaaagccatgtttattacagtataattaacatgttaaaccatgggataaatgccatcaataaaaaattatgacatac

SEQ ID NO: 3746 - protein, 38 aa, Homo sapiens; identical to SEQ ID NO: 3740

SEQ ID NO: 3747 - DNA, 2031 bp, Homo sapiens
atgtttggtgtaaatgcaattgcttctgttctttccctactgctcgtttagtatcaactctagtcagccttccagcttctaaacctatatctttgtaaaaatcccttgttgttttaatgcacttttcaaagaagatagagctaagtgtatttgttgatttcactgtctttaaccataagtccagggtgcccttttccccttggtcataggtaagttgtgtgatttgttggaggtgtcaagtatgtactatgtgtcagtggagaaaatagttttctttagattaaaagaccagaatattttaattctttgcatgtttttatatgtaaaggtcagagtctttaatttaaaaacctatcatgttgcggccgggtgcagtggcttacgcctgtaatccagcactttgggaggccgaggtggacagatcacaaggtcaggagatcgagaccatcctggccaacatggtgaaaccacgtctctactaaaatacaaaaaattagccaggcatggtggcacgcacctatatagtcccagctactggggaggctgaggcaggggaatcacttgaacccaggaggcaagggttgcagtgagccaagattgtgccactgtactccagcctgggcaagagagcgagactccgtctcaaaaaacaaacaaacaaacaaaaaaacctatcattttgccctaatgaagtatttctgctttaactattgcaggttcggctttccagtttggcagcagcactacaaatttcaacttcacaaacaacagtccatcaggagtgttcacatttggtgcaaattctagcacacctgcagcctcagcccagccttcaggctcggggggctttccatttaaccagtctccagcagcatttacagtggggtcaaatgggaaaaatgtgttctcttcttctggaacttcattctctggtcgcaagataaagactgctgttagacgcaggaaataaaggtcacattggtgttgtactcaattttaacaacagctggtgccctgctttcagatactggattgtactttgtgctggggttatctgaagtcagatctgcctaaggacttctttaattttggaattttcctcctttctctttcgttacagaagccccaccctgcctcacccacccttttttaaataaataaatagctagactggtgactgattcttcagcaaaaatattttatgatccagcagattattcactgatttgacatagtctggctgtacccaggaatggagcctgcacggtgaatggctttgtatagaacctctttgtctacaccattatgtgcgctgataagcgttcatggaacgcgttgaaattgtaattatatctgaggaattctgtatagattagaattctgtatagattagagagtgttgaaacggatgatttctatgctgagtttgtgctggtgtatgtgtgaagtgagtgagttgggtgtattgtgcgctaaacttttctgatagaggaagcctgattaaagaatggtccgtgctaaggacttgttagatctagttcactctccatttaataattatatgctatttctatattttcattctcctatcacctgtcttgcctttttcattattttattatgaaacttgtgtaaatacaattttgtttctgtactttttggcataacataaatctgtgaacttgaaatttgaattttgtgttagagatttttttgttgtttgtttagtcttgtctcagattttattatgtaaatcccattattcaaagttgcctaaatccatttggaaatctttaaaaaaaaaattggggattcttaaagttgaatttattggcttttctgatccagttttgtttggaccaaaaaccagtattgtacaaagtattaagcatatatttttatatttactaaaatggactgtggtgactttggataataaggaaaagtttaatattaaagccatgtttattacagtataattaacatgttaaaccatgggataaatgccatcaataaaaaattatgacatac

SEQ ID NO: 3748 - protein, 49 aa, Homo sapiens; identical to SEQ ID NO: 3742

SEQ ID NO: 3749 - DNA, 6225 bp, Homo sapiens
ggctttgtgcctctgcggcgccccggagatctccttccccgtccctcttcctttccgagaagccgcgttccgttgttgaactacgtttcccagcgtgccgcgcggccgagagcgtggactcgaccagcccttcctctttgcctatcagctcgtcgcagcatgatgatgcaaatgcgtcgggcgccgatgagtgacgacattctggctcgcgaccgcggcagccgccttagcaggggtaataggcgcaacggcggcggaggctgcagggacgacgacgacgacggcggcggggcgggcgctgtgcgcacaggggaggggtaggcgggcgtcgccagcggcttcaactgcggcagctacggctagggcgacggaagaactcccaccagtcggcggtcgagttaggcctcagcaccgcggggaactgttcgtgctgtcctctgcgggagatctccatagagaccgtgacacacacagaggcgggggtccgcagaggcggccggaccggagcctcctcggcctctgcggccgccacccccttccccgctgccagcactcaccctctctccgctcctgctcgcaacctcgcggttcctggggtgcttgtgcccactgtgtggacagcgcgggcggacttttgggccggggccgggcggcgggggaggctctctaaggcctccgcctctgcctctcccgcccccttacccgccccggagcgggaagcggcggaggctccgccatggcctcgggagccggaggagtcggagggggcggtggcggcaagatccggacgcggcgttgccaccaggggccaattaagccttaccagcaggggcgacaacagcatcagggcattcttagcagggttacagaatctgttaagaatattgtgccagggtggctacaaagatacttcaacaagaatgaagatgtatgcagctgttcaacagacacaagcgaggttccacgctggccagaaaataaagaggaccatctggtatatgccgatgaggagagctctaatattactgatgggagaatcacacctgagccagcagtcagtaatacagaagaaccttcaacaactagtactgcttcaaattatccagatgtgttaacaaggccttctcttcatcggagccatctgaatttttccatgttggaatcccctgcattacactgtcagccatctacatcctcggcattcccaattggcagttcgggattttcccttgtaaaggaaattaaagattctacctctcagcatgatgatgataacatctcaactaccagtggtttttcttcaagagcttctgataaagatataactgtttcaaagaacacttcattgccacctctgtggtccccagaagctgaacgttctcactcactctcacagcacactgccaccagctcaaaaaaaccagcattcaacttgtctgcctttggaacactttccccttcacttgggaattcttcaatccttaaaaccagtcagcttggagattctcctttttatcctggaaaaacaacatacggtggggcagcagctgctgtaagacagtctaaactacgaaatacaccttatcaggcaccagttagaagacaaatgaaagctaagcaactcagtgcacaatcttacggtgtgaccagttcaacagctcggcgaatattgcagtctttagagaagatgtcaagccctttagcggatgcaaaaagaattccatccattgtttcttctcctctgaattctcctcttgataggagtgggatagatatcacagattttcaggccaaaagagaaaaggtggattctcaatatcctcctgttcagagacttatgaccccaaagccagtttccatagcaacaaatcgaagtgtttattttaaaccatctctgactccttctggtgaattcaggaagactaatcaaagaatagataacaagtgcagtactggatatgaaaaaaatatgacacccggacaaaatagagaacaacgagaaagtggcttttcatatccaaatttcagtttgcctgcagccaatggtttatcttctggagtaggtggtggaggtggcaagatgagacgagaaagaacacgctttgttgcttctaaacctctggaggaggaggaaatggaagttccagtattaccgaaaatctctctaccgatcaccagttcttcactgcctacctttaattttagttcccctgagatcacaacttcctctccatcacccatcaattcgtctcaagcattaacaaacaaggtacaaatgacctctccgagcagcactggcagtcccatgtttaaattttcatctccaatcgtaaaatctactgaggcaaatgtactacctccatcatctattggatttacatttagtgtgcctgttgcaaaaacagcagaactttctggttctagtagtactttagaaccaattataagtagttcagctcatcatgtcactacagtgaacagtacaaattgtaagaagacaccacctgaagattgtgagggtccttttagacctgcagaaatcctgaaagaaggaagtgttctagatattctgaaaagccctggtttcgcatcgccgaagatagattctgttgctgctcagcccaccgcaacaagcccagtagtttatacaagaccagcaataagtagcttttcttctagtggaattgggtttggggagagtttaaaagctgggtcatcatggcagtgtgatacatgtctactccagaacaaagttacagacaacaaatgcatagcctgtcaagcagcaaaattgtcacccagagatactgctaaacagactggaattgaaacaccaaataaaagtggcaaaacaactctttctgcatcagggacaggctttggagacaaatttaaaccagtgataggcacttgggattgtgatacctgtttagtgcaaaataaacctgaagcaataaaatgtgtagcctgtgaaacaccgaaacctggaacttgtgtgaagcgagcccttacattgacagtggtttcggaaagtgctgagactatgactgcttcatcttccagctgcactgtaaccactggtaccttaggatttggagataaattcaaaaggcccattggatcttgggagtgttcagtatgctgtgtttctaataatgcagaagacaataagtgtgtgtcctgtatgtctgagaaaccaggaagttcagtacctgcttcaagtagcagcactgtacctgtctctctgccttctggaggctctctaggattggaaaagttcaagaaacccgagggaagctgggactgtgaattgtgcctagtgcagaataaggcagactctaccaaatgtttggcatgtgaaagtgcaaagccaggcacaaaatctgggtttaaaggctttgacacatcttcctcatcttcgaactcagcagcctcctcatccttcaaatttggtgtctcatcatcctcttctgggccttctcagactttaacaagcactggaaattttaaatttggagatcagggaggattcaaaataggtgtgtcatccgattctgggtctataaaccccatgagtgaaggctttaaattttctaaaccaataggagattttaaatttggagtttcatctgaatctaagcccgaagaagttaaaaaagatagtaagaatgataattttaagtttggactttcttctggtttaagcaacccagtttctttaactccatttcaatttggggtatctaatcttggacaggaagaaaagaaagaggaactgcccaaatcttcctctgcaggttttagctttggtacaggtgttattaactccacccctgctcctgctaacaccatagtgacctctgagaacaagagcagcttcaaccttggaaccatagaaaccaagagtgcttcagtggctcctttcacatgtaagacatcagaagctaaaaaagaagaaatgcctgccaccaaaggaggattctcttttggcaacgtggagcctgcctctctgccatctgcctcagtgtttgttttgggaaggacagaagagaaacagcaagagcctgtcacttctacttccctagtttttgggaagaaagctgacaatgaagagccaaagtgtcaaccagtgttttcctttgggaattcagagcaaaccaaagatgagaattcttcaaagtccacatttagttttagtatgacaaaaccatctgagaaggaatctgaacagccagcaaaagccacttttgcctttggagctcaaactagtactacagctgatcaaggtgcagcaaagccagtttttagtttcttgaacaacagttcctctagttcaagtacaccagccacttctgctggtggtggcatatttggtagttccacctcttcctccaatccacctgtggctacctttgtgtttggacagtccagcaatcctgtgagcagctctgcctttggtaacactgctgaatccagcacctctcagtctttgctattttctcaagatagcaaactagcaaccacatccagcacaggtacagctgtcaccccatttgtctttggtccaggagccagcagtaataatactaccacctctggtttcggctttggagccacaaccacatctagctctgcaggatcctcctttgtatttggaactggaccctcagcaccatctgccagtccagcatttggtgctaaccagaccccaacatttggacaaagtcaaggtgccagccagcccaatcccccaggctttggatctatatcatcttccacagcattatttcccactggttctcagcctgcaccacctacttttgggacagtgtcaagcagtagccagccccctgtgtttggacagcaacctagtcagtctgcatttggctctggaacaactcctaattctagttcggctttccagtttggcagcagcactacaaatttcaacttcacaaacaacagtccatcaggagtgttcacatttggtgcaaattctagcacacctgcagcctcagcccagccttcaggctcggggggctttccatttaaccagtctccagcagcatttacagtggggtcaaatgggaaaaatgtgttctcttcttctggaacttcattctctggtcgcaagataaagactgctgttagacgcaggaaataaaggtcacattggtgttgtactcaattttaacaacagctggtgccctgctttcagatactggattgtactttgtgctggggttatctgaagtcagatctgcctaaggacttctttaattttggaattttcctcctttctctttcgttacagaagccccaccctgcctcacccacccttttttaaataaataaatagctagactggtgactgattcttcagcaaaaatattttatgatccagcagattattcactgatttgacatagtctggctgtacccaggaatggagcctgcacggtgaatggctttgtatagaacctctttgtctacaccattatgtgcgctgataagcgttcatggaacgcgttgaaattgtaattatatctgaggaattctgtatagattagaattctgtatagattagagagtgttgaaacggatgatttctatgctgagtttgtgctggtgtatgtgtgaagtgagtgagttgggtgtattgtgcgctaaacttttctgatagaggaagcctgattaaagaatggtccgtgctaaggacttgttagatctagttcactctccatttaataattatatgctatttctatattttcattctcctatcacctgtcttgcctttttcattattttattatgaaacttgtgtaaatacaattttgtttctgtactttttggcataacataaatctgtgaacttgaaatttgaattttgtgttagagatttttttgttgtttgtttagtcttgtctcagattttattatgtaaatcccattattcaaagttgcctaaatccatttggaaatctttaaaaaaaaaattggggattcttaaagttgaatttattggcttttctgatccagttttgtttggaccaaaaaccagtattgtacaaagtattaagcatatatttttatatttactaaaatggactgtggtgactttggataataaggaaaagtttaatattaaagccatgtttattacagtataattaacatgttaaaccatgggataaatgccatcaataaaaaattatgacatac

SEQ ID NO: 3750 - protein, 1475 aa, Homo sapiens; identical to SEQ ID NO: 414

SEQ ID NO: 3751 - DNA, 594 bp, Homo sapiens
cttctttaattttggaattttcctcctttctctttcgttacagaagccccaccctgcctcacccacccttttttaaataaataaatagctagactggtgactgattcttcagcaaaaatattttatgatccagcagattattcactgatttgacatagtctggctgtacccaggaatggagcctgcacggtgaatggctttgtatagaacctctttgtctacaccattatgtgcgctgataagcgttcatggaacgcgttgaaattgtaattatatctgaggaattctgtatagattagaattctgtatagattagagagtgttgaaacggatgatttctatgctgagtttgtgctggtgtatgtgtgaagtgagtgagttgggtgtattgtgcgctaaactttttgatccagttttgtttggaccaaaaaccagtattgtacaaagtattaagcatatatttttatatttactaaaatggactgtggtgactttggataataaggaaaagtttaatattaaagccatgtttattacagtataattaacatgttaaaccatgggataaatgccatcaataaaaaattatgacat

SEQ ID NO: 3752 - protein, 70 aa, Homo sapiens
MISMLSLCWCMCEVSELGVLCAKLFDPVLFGPKTSIVQSIKHIFLYLLKWTVVTLDNKEKFNIKAMFITV

SEQ ID NO: 3753 - DNA, 1176 bp, Homo sapiens
atgtttggtgtaaatgcaattgcttctgttctttccctactgctcgtttagtatcaactctagtcagccttccagcttctaaacctatatctttgtaaaaatcccttgttgttttaatgcacttttcaaagaagatagagctaagtgtatttgttgatttcactgtctttaaccataagtccagggtgcccttttccccttggtcataggtaagttgtgtgatttgttggaggtgtcaagtatgtactatgtgtcagtggagaaaatagttttctttagattaaaagaccagaatattttaattctttgcatgtttttatatgtaaaggtcagagtctttaatttaaaaacctatcatgttgcggccgggtgcagtggcttacgcctgtaatccagcactttgggaggccgaggtggacagatcacaaggtcaggagatcgagaccatcctggccaacatggtgaaaccacgtctctactaaaatacaaaaaattagccaggcatggtggcacgcacctatatagtcccagctactggggaggctgaggcaggggaatcacttgaacccaggaggcaagggttgcagtgagccaagattgtgccactgtactccagcctgggcaagagagcgagactccgtctcaaaaaacaaacaaacaaacaaaaaaacctatcattttgccctaatgaagtatttctgctttaactattgcaggttcggctttccagtttggcagcagcactacaaatttcaacttcacaaacaacagtccatcaggagtgttcacatttggtgcaaattctagcacacctgcagcctcagcccagccttcaggctcggggggctttccatttaaccagtctccagcagcatttacagtggggtcaaatgggaaaaatgtgttctcttcttctggaacttcattctctggtcgcaagataaagactgctgttagacgcaggaaataaaggtcacattggtgttgtactcaattttaacaacagctggtgccctgctttcagatactggattgtactttgtgctggggttatctgaagtcagatctgcctaaggacttctttaattttggaattttcctcctttctctttcgttacagaagccccaccctgcctcacccacccttttttaaataaataaatagctagactggtg

SEQ ID NO: 3754 - protein, 49 aa, Homo sapiens; identical to SEQ ID NO: 3742

SEQ ID NO: 3755 - DNA, 339 bp, Homo sapiens
ctttaaaaaaataacaaataaaaaaaactcctcttcactcatgtttgtatcacctcctcccctctttgggcctcttctcttcattctggccaactgccaattttgtgtcacaggattcttcacccagtccttcccatcactggctctgttccaccctgaagttataatgtccacatttctgaggaaagaggtactaatgtgatgttggccccacactttctgcccaccttgtggtttgtttgtttatttatttgtcagagtcttgctctgtctcccagggtggagtgcatgagctgagatcgtaccactgcactcctgcctgggtgacagattgagact

SEQ ID NO: 3756 - protein, 31 aa, Homo sapiens [sequence omitted]

SEQ ID NO: 3757 - DNA, 1147 bp, Homo sapiens
atgttaagtgtcttttcaaagtctaatttacagccaagaacagcaaaagtaccccttggctttgtgcctctgcggcgccccggagatctccttccccgtccctcttcctttccgagaagccgcgttccgttgttgaactacgtttcccagcgtgccgcgcggccgagagcgtggactcgaccagcccttcctctttgcctatcagctcgtcgcagcatgatgatgcaaatgcgtcgggcgccgatgagtgacgacattctggctcgcgaccgcggcagccgccttagcaggggtaataggcgcaacggcggcggaggctgcagggacgacgacgacgacggcggcgggttaggcctcagcaccgcggggaactgttcgtgctgtcctctgcgggagatctccatagagaccgtgacacacacagaggcgggggtccgcagaggcggccggaccggagcctcctcggcctctgcggccgccacccccttccccgctgccagcactcaccctctctccgctcctgctcgcaacctcgcggttcctggggtgcttgtgcccactgtgtggacagcgcgggcggacttttgggccggggccgggcggcgggggaggctctctaaggcctccgcctctgcctctcccgcccccttacccgccccggagcgggaagcggcggaggctccgccatggcctcgggagccggaggagtcggagggggcggtggcggcaagatccggacgcggcgttgccaccaggggccaattaagccttaccagcaggggcgacaacagcatcaggtatgggaccccgacgccgcggtggcctggcgggtggggaaactcggctggaggggacgggcggttcgaggccccggcgccccacgtggagcagacaggagggcctgaggaaaggcccgagtgaggctccgggggagctcaggccgttgggggtggcgacgggaagtgggctgagacaggcccagccttgcggcgcacacgtgtggtttgggccgcctttcccccaactctctgggtcaggggctttcccaggcaggctctgggcgggaaaagaaattgtaggcccatgatgcgcgcgtttctttattttttggcggggatttggaatttgagggtattactcatgttct

SEQ ID NO: 3758 - protein, 306 aa, Homo sapiens
MLSVFSKSNLQPRTAKVPLGFVPLRRPGDLLPRPSSFPRSRVPLLNYVSQRAARPRAWTRPALPLCLSARRSMMMQMRRAPMSDDILARDRGSRLSRGNRRNGGGGCRDDDDDGGGLGLSTAGNCSCCPLREISIETVTHTEAGVRRGGRTGASSASAAATPFPAASTHPLSAPARNLAVPGVLVPTVWTARADFWAGAGRRGRLSKASASASPAPLPAPEREAAEAPPWPREPEESEGAVAARSGRGVATRGQLSLTSRGDNSIRYGTPTPRWPGGWGNSAGGDGRFEAPAPHVEQTGGPEERPE

SEQ ID NO: 3759 - DNA, 5845 bp, Homo sapiens
gcggccgcgctcgaggggcgcgcggctgcagcggcggcggcgccgcgcgtgaggggccgcctaaggccgagcgggcgcggcgagcggccgggcgagcgcagccaacatgtcggataccaaggtaaaagttgccgtccgggtccggcccatgaaccgacgagaactggaactgaacaccaagtgcgtggtggagatggaagggaatcaaacggtcctgcaccctcctccttctaacaccaaacagggagaaaggtatttgcctttgattattgcttttggtccatggatgaatctaacactacaaaatacgctggtcaagaagtggttttcaagtgccttggggaaggaattcttgaaaaagcctttcaggggtataatgcgtgtatttttgcatatggacagacaggttcgggaaaatccttttccatgatgggccatgctgagcagctgggccttattccaaggctctgctgtgctttatttaaaaggatctctttggagcaaaatgagtcacagacctttaaagttgaagtgtcctatatggaaatttataatgagaaagttcgggatcttttagaccccaaagggagtagacagtctcttaaagttcgagaacataaagttttgggaccatatgtagatggtttatctcaactagctgtcactagttttgaggatattgagtcattgatgtctgagggaaataagtctcgaacggtagctgctaccaacatgaacgaagaaagcagccgctcccatgctgtgttcaacatcataatcacacagacactttatgacctgcagtctgggaattccggggagaaagtcagtaaggtcagcttggtagacctggcgggtagcgaaagagtatctaaaacaggagctgcaggagagcgactgaaagaaggcagcaacattaacaaatcgcttacaaccttggggttggttatatcatcactggctgaccaggcagctggcaagggtaaaagcaaatttgtgccttatcgagattcagtcctcacttggctgcttaaggacaacttggggggcaacagccaaacctctatgatagccacaatcagcccagccgcagacaactatgaagagaccctctccacattaagatatgcagaccgagccaaaaggattgtgaaccatgctgttgtgaatgaggaccccaacgcaaaagtgatccgagaactgcgggaggaagtcgagaaactgagagagcagctctctcaggcagaggccatgaaggcccctgaactgaaggagaagctcgaagagtctgaaaagctgataaaagaactaacagtgacttgggaagagaagctgagaaaaacagaagagatagcacaggaaagacaacgacaacttgaaagcatggggatttccctggagatgtccggtatcaaggtgggggatgacaaatgctacttagtcaatctgaatgcagaccctgctcttaacgaacttctggtttattatttaaaggatcacaccagggtgggtgcagatacctctcaagatatccagctttttggcataggaattcagcctcagcactgtgagattgacattgcatctgatggagacgtcactctcactccaaaagaaaatgcaaggtcctgtgtgaacggcacccttgtgtgcagtaccacccagctgtggcatggtgaccgaatcctatggggaaataatcacttttttagaataaacttacctaagaggaaacgtcgagattggttgaaagactttgaaaaagaaacgggcccgccagagcatgacctggatgcagccagtgaggcttcctctgaaccagactataactatgaatttgcacagatggaagttatcatgaaaaccctgaatagtaatgacccagttcaaaatgtggttcaggtcctggagaaacaatacctagaagaaaagagaagtgccctagaggagcagcggctcatgtatgagcgggaactggagcaactccgccagcagctctcccccgacaggcagccacagagtagcggccctgaccgcctggcctacagcagccagacagcgcagcagaaggtgacccagtgggcagaagagagggatgaactcttccgacaaagcctggcaaaactgcgagagcagctggttaaagctaataccttggtgagggaagcaaacttcctggctgaggaaatgagcaaactcaccgattaccaagtgactcttcagatccctgctgcaaacctcagtgccaataggaagagaggtgcaatagtgagtgaaccagctatccaagtgaggaggaaaggaaagagcacccaagtgtggaccattgagaagctggagaataaattaattgacatgagagacctttaccaagaatggaaggaaaaagttcctgaggcaaagagactctacggaaaacgaggtgaccctttctatgaagcccaagaaaatcacaacctcatcggggtggcgaatgtattcttggaatgcctcttctgtgatgtgaaacttcagtatgcagtccctatcatcagccagcagggggaggttgcagggcgtctccacgtggaagtgatgcgtgttacaggagctgttccagagcgtgtggtggaggatgactcttcggagaattccagtgaaagtgggagccttgaagtcgtagacagcagcggggaaatcattcaccgagtcaaaaagctgacatgtcgggtaaaaattaaagaagcaacggggctgcccttaaacctctcaaattttgtcttctgtcaatacacattctgggaccagtgtgagtctacggtggctgccccggtggtggaccccgaggtgccttcaccacagtccaaggatgcccagtacacagtgaccttctcccactgtaaggactatgtggtgaatgtaacagaagaatttctggagttcatttcagatggagcactggccattgaagtatggggccaccggtgtgctggaaatggcagctccatctgggaggtcgattctcttcatgctaagacaagaacactgcatgacaggtggaatgaagtaacgcgaagaatagaaatgtggatctccatattagaattgaatgagttaggagagtatgctgcagtggaacttcatcaggcaaaagatgtcaacacaggaggcatctttcaacttagacagggtcattcccgtagagtacaagtcacggtgaaacctgtgcagcattcagggacactgccacttatggttgaagccatcctgtcagtatccatcggctgtgtaactgccaggtccaccaaactccaaagagggctggacagttaccaggaagaagacttaaactgcgtaagggagaggtggtcagatgcactcattaaacgacgagaatacctggatgaacagataaaaaaagtcagcaataaaacagagaaaacagaggacgatgtggagcgggaagcccagcttgtggagcagtgggtagggctgactgaggaaaggaatgctgtgctggtgccagccccaggcagtgggattcctggggcacctgccgactggatcccacctcctggaatggaaacccacataccagttctcttcctcgatttgaatgcggatgacctcagtgccaatgagcagcttgttggcccccatgcatccggcgtgaactccatcctgcccaaggagcatggcagccagtttttctacctgcccatcataaagcacagtgatgatgaggtttcagccacagcctcttgggattcctcggtgcatgattctgttcacttgaatagggtcacaccacagaatgaaaggatttacctaattgtgaaaaccacagttcaactcagccaccctgctgctatggagttagtattacgaaaacgaattgcagccaatatttacaacaaacagagtttcacgcagagtttgaagaggagaatatccctgaaaaatatattttattcctgtggtgtaacctatgaaatagtatccaatataccaaaggcaactgaggagatagaggaccgggaaacgctggctctcctggcagcaaggagtgaaaacgaaggcacatcagatggggagacgtacattgagaagtacactcgaggcgtgctgcaggtggaaaacattctgagtcttgaacggctccggcaggccgtcacagtcaaagaagcactttccaccaaagcccggcacattcggaggagcctcagtacaccaaatgttcataatgtctcttccagccgaccggacctttctggctttgatgaagatgacaagggttggccagagaaccagttggacatgtctgactatagctccagttaccaagatgtagcatgttatggaactttacccagggattctcctcgaaggaataaagaaggttgtacatcagagactcctcatgccttaaccgtcagcccttttaaagcattctctcctcagccaccaaagtttttcaagcccctaatgcctgtaaaagaggagcataagaaaaggatagccctggaagcaaggcctcttctaagccaggaggactctgaggaggaagaaaatgagctggaagctattaacaggaagctaataagttcacagccttatgtacctgtggagtttgctgacttcagtgtttacaatgccagcttggagaacagggaatggttttcctctaaagtagatctgtcaaactcacgggtcttggagaaagaagtgtcccgtagccctaccaccagcagtattaccagtggctacttttcccacagtgcctccaatgccaccctgtctgacatggtggtcccttctagtgacagctcagaccagctggccattcagacgaaggatgcagactccaccgagcactccacaccatcgcttgtgcatgatttcaggccgtcctcaaacaaagagttgacagaagtcgaaaaaggcttggtaaaggacaagataattgtggtgccactcaaggaaaacagtgccttagccaaagggagcccatcatcccagagcatccctgagaaaaactccaaatcactgtgcaggactggctcatgttcagaactagatgcctgccccagcaaaattagccagccagccaggggattctgccccagggaggtgacggtagaacacaccaccaacatccttgaagaccattctttcacagaatttatgggagtgtcagagggaaaagattttgatggtttgacagattcttctgctggagagctttccagtaggaggagtctaccaaataaaacaggcggcaagactgtctccgatgggctccaccaccccagccagctgcattccaagttagagaatgaccagggaggcacaacctcacggtgagagcagcaagcacccctcctcaggccacagcttggcgtctttgttcgcctggtcaccttgggcaagcaccagccccatctctaaaacatgctgccgcctggctggacctcagaccagaagctggagaatccacaccgtgcacttcctgggccacctcctttcccctccccagtgggagaagcggcactttgtcacttgggtgaatcaacagcctctgctttttccagaaagcaagagaactgaaaatcctggattaactaagtgacagtatttttttttgcacttactacacacctccactgtatagaaacctctacagattccaacagactttattcttgtacaattttaatcagttcttactgtagaatctggagtcaatgctctaatctgttttttataaataatatatattatgtatatgaaatgtgtatctatagtatgtctggagacagacaaggctgcacactaaaatgcagataaaggtgatttgtagaaaatc

SEQ ID NO: 3760 - protein, 1686 aa, Homo sapiens
MDESNTTKYAGQEVVFKCLGEGILEKAFQGYNACIFAYGQTGSGKSFSMMGHAEQLGLIPRLCCALFKRISLEQNESQTFKVEVSYMEIYNEKVRDLLDPKGSRQSLKVREHKVLGPYVDGLSQLAVTSFEDIESLMSEGNKSRTVAATNMNEESSRSHAVFNIIITQTLYDLQSGNSGEKVSKVSLVDLAGSERVSKTGAAGERLKEGSNINKSLTTLGLVISSLADQAAGKGKSKFVPYRDSVLTWLLKDNLGGNSQTSMIATISPAADNYEETLSTLRYADRAKRIVNHAVVNEDPNAKVIRELREEVEKLREQLSQAEAMKAPELKEKLEESEKLIKELTVTWEEKLRKTEEIAQERQRQLESMGISLEMSGIKVGDDKCYLVNLNADPALNELLVYYLKDHTRVGADTSQDIQLFGIGIQPQHCEIDIASDGDVTLTPKENARSCVNGTLVCSTTQLWHGDRILWGNNHFFRINLPKRKRRDWLKDFEKETGPPEHDLDAASEASSEPDYNYEFAQMEVIMKTLNSNDPVQNVVQVLEKQYLEEKRSALEEQRLMYERELEQLRQQLSPDRQPQSSGPDRLAYSSQTAQQKVTQWAEERDELFRQSLAKLREQLVKANTLVREANFLAEEMSKLTDYQVTLQIPAANLSANRKRGAIVSEPAIQVRRKGKSTQVWTIEKLENKLIDMRDLYQEWKEKVPEAKRLYGKRGDPFYEAQENHNLIGVANVFLECLFCDVKLQYAVPIISQQGEVAGRLHVEVMRVTGAVPERVVEDDSSENSSESGSLEVVDSSGEIIHRVKKLTCRVKIKEATGLPLNLSNFVFCQYTFWDQCESTVAAPVVDPEVPSPQSKDAQYTVTFSHCKDYVVNVTEEFLEFISDGALAIEVWGHRCAGNGSSIWEVDSLHAKTRTLHDRWNEVTRRIEMWISILELNELGEYAAVELHQAKDVNTGGIFQLRQGHSRRVQVTVKPVQHSGTLPLMVEAILSVSIGCVTARSTKLQRGLDSYQEEDLNCVRERWSDALIKRREYLDEQIKKVSNKTEKTEDDVEREAQLVEQWVGLTEERNAVLVPAPGSGIPGAPADWIPPPGMETHIPVLFLDLNADDLSANEQLVGPHASGVNSILPKEHGSQFFYLPIIKHSDDEVSATASWDSSVHDSVHLNRVTPQNERIYLIVKTTVQLSHPAAMELVLRKRIAANIYNKQSFTQSLKRRISLKNIFYSCGVTYEIVSNIPKATEEIEDRETLALLAARSENEGTSDGETYIEKYTRGVLQVENILSLERLRQAVTVKEALSTKARHIRRSLSTPNVHNVSSSRPDLSGFDEDDKGWPENQLDMSDYSSSYQDVACYGTLPRDSPRRNKEGCTSETPHALTVSPFKAFSPQPPKFFKPLMPVKEEHKKRIALEARPLLSQEDSEEEENELEAINRKLISSQPYVPVEFADFSVYNASLENREWFSSKVDLSNSRVLEKEVSRSPTTSSITSGYFSHSASNATLSDMVVPSSDSSDQLAIQTKDADSTEHSTPSLVHDFRPSSNKELTEVEKGLVKDKIIVVPLKENSALAKGSPSSQSIPEKNSKSLCRTGSCSELDACPSKISQPARGFCPREVTVEHTTNILEDHSFTEFMGVSEGKDFDGLTDSSAGELSSRRSLPNKTGGKTVSDGLHHPSQLHSKLENDQGGTTSR

SEQ ID NO: 3761 - DNA, 5784 bp, Homo sapiens
gcggccgcgctcgaggggcgcgcggctgcagcggcggcggcgccgcgcgtgaggggccgcctaaggccgagcgggcgcggcgagcggccgggcgagcgcagccaacatgtcggataccaaggtaaaagttgccgtccgggtccggcccatgaaccgacgagaactggaactgaacaccaagtgcgtggtggagatggaagggaatcaaacggtcctgcaccctcctccttctaacaccaaacagggagaaaggtatttgcctttgattattgcttttggtccatggatgaatctaacactacaaaatacgctggtcaagaagtggttttcaagtgccttggggaaggaattcttgaaaaagcctttcaggggtataatgcgtgtatttttgcatatggacagacaggttcgggaaaatccttttccatgatgggccatgctgagcagctgggccttattccaaggctctgctgtgctttatttaaaaggatctctttggagcaaaatgagtcacagacctttaaagttgaagtgtcctatatggaaatttataatgagaaagttcgggatcttttagaccccaaagggagtagacagtctcttaaagttcgagaacataaagttttgggaccatatgtagatggtttatctcaactagctgtcactagttttgaggatattgagtcattgatgtctgagggaaataagtctcgaacggtagctgctaccaacatgaacgaagaaagcagccgctcccatgctgtgttcaacatcataatcacacagacactttatgacctgcagtctgggaattccggggagaaagtcagtaaggtcagcttggtagacctggcgggtagcgaaagagtatctaaaacaggagctgcaggagagcgactgaaagaaggcagcaacattaacaaatcgcttacaaccttggggttggttatatcatcactggctgaccaggcagctggcaagggtaaaagcaaatttgtgccttatcgagattcagtcctcacttggctgcttaaggacaacttggggggcaacagccaaacctctatgatagccacaatcagcccagccgcagacaactatgaagagaccctctccacattaagatatgcagaccgagccaaaaggattgtgaaccatgctgttgtgaatgaggaccccaacgcaaaagtgatccgagaactgcgggaggaagtcgagaaactgagagagcagctctctcaggcagaggccatgaaggcccctgaactgaaggagaagctcgaagagtctgaaaagctgataaaagaactaacagtgacttgggaagagaagctgagaaaaacagaagagatagcacaggaaagacaacgacaacttgaaagcatggggatttccctggagatgtccggtatcaaggtgggggatgacaaatgctacttagtcaatctgaatgcagaccctgctcttaacgaacttctggtttattatttaaaggatcacaccagggtgggtgcagatacctctcaagatatccagctttttggcataggaattcagcctcagcactgtgagattgacattgcatctgatggagacgtcactctcactccaaaagaaaatgcaaggtcctgtgtgaacggcacccttgtgtgcagtaccacccagctgtggcatggtgaccgaatcctatggggaaataatcacttttttagaataaacttacctaagaggaaacgtcgagattggttgaaagactttgaaaaagaaacgggcccgccagagcatgacctggatgcagccagtgaggcttcctctgaaccagactataactatgaatttgcacagatggaagttatcatgaaaaccctgaatagtaatgacccagttcaaaatgtggttcaggtcctggagaaacaatacctagaagaaaagagaagtgccctagaggagcagcggctcatgtatgagcgggaactggagcaactccgccagcagctctcccccgacaggcagccacagagtagcggccctgaccgcctggcctacagcagccagacagcgcagcagaaggtgacccagtgggcagaagagagggatgaactcttccgacaaagcctggcaaaactgcgagagcagctggttaaagctaataccttggtgagggaagcaaacttcctggctgaggaaatgagcaaactcaccgattaccaagtgactcttcagatccctgctgcaaacctcagtgccaataggaagagaggtgcaatagtgagtgaaccagctatccaagtgaggaggaaaggaaagagcacccaagtgtggaccattgagaagctggagaataaattaattgacatgagagacctttaccaagaatggaaggaaaaagttcctgaggcaaagagactctacggaaaacgaggtgaccctttctatgaagcccaagaaaatcacaacctcatcggggtggcgaatgtattcttggaatgcctcttctgtgatgtgaaacttcagtatgcagtccctatcatcagccagcagggggaggttgcagggcgtctccacgtggaagtgatgcgtgttacaggagctgttccagagcgtgtggtggaggatgactcttcggagaattccagtgaaagtgggagccttgaagtcgtagacagcagcggggaaatcattcaccgagtcaaaaagctgacatgtcgggtaaaaattaaagaagcaacggggctgcccttaaacctctcaaattttgtcttctgtcaatacacattctgggaccagtgtgagtctacggtggctgccccggtggtggaccccgaggtgccttcaccacagtccaaggatgcccagtacacagtgaccttctcccactgtaaggactatgtggtgaatgtaacagaagaatttctggagttcatttcagatggagcactggccattgaagtatggggccaccggtgtgctggaaatggcagctccatctgggaggtcgattctcttcatgctaagacaagaacactgcatgacaggtggaatgaagtaacgcgaagaatagaaatgtggatctccatattagaattgaatgagttaggagagtatgctgcagtggaacttcatcaggcaaaagatgtcaacacaggaggcatctttcaacttagacagggtcattcccgtagagtacaagtcacggtgaaacctgtgcagcattcagggacactgccacttatggttgaagccatcctgtcagtatccatcggctgtgtaactgccaggtccaccaaactccaaagagggctggacagttaccaggaagaagacttaaactgcgtaagggagaggtggtcagatgcactcattaaacgacgagaatacctggatgaacagataaaaaaagtcagcaataaaacagagaaaacagaggacgatgtggagcgggaagcccagcttgtggagcagtgggtagggctgactgaggaaaggaatgctgtgctggtgccagccccaggcagtgggattcctggggcacctgccgactggatcccacctcctggaatggaaacccacataccagttctcttcctcgatttgaatgcggatgacctcagtgccaatgagcagcttgttggcccccatgcatccggcgtgaactccatcctgcccaaggagcatggcagccagtttttctacctgcccatcataaagcacagtgatgatgaggtttcagccacagcctcttgggattcctcggtgcatgattctgttcacttgaatagggtcacaccacagaatgaaaggatttacctaattgtgaaaaccacagttcaactcagccaccctgctgctatggagttagtattacgaaaacgaattgcagccaatatttacaacaaacagagtttcacgcagagtttgaagaggagaatatccctgaaaaatatattttattcctgtggtgtaacctatgaaatagtatccaatataccaaaggcaactgaggagatagaggaccgggaaacgctggctctcctggcagcaaggagtgaaaacgaaggcacatcagatggggagacgtacattgagaagtacactcgaggcgtgctgcaggtggaaaacattctgagtcttgaacggctccggcaggccgtcacagtcaaagaagcactttccaccaaagcccggcacattcggaggagcctcagtacaccaaatgttcataatgtctcttccagccgaccggacctttctggctttgatgaagatgacaagggttggccagagaaccagttggacatgtctgactatagctccagttaccaagatgtagcatgttatggaactttacccagggattctcctcgaaggaataaagaaggttgtacatcagagactcctcatgccttaaccgtcagcccttttaaagcattctctcctcagccaccaaagtttttcaagcccctaatgcctgtaaaagaggagcataagaaaaggatagccctggaagcaaggcctcttctaagccaggaggactctgaggaggaagaaaatgagctggaagctattaacaggaagctaataagttcacagccttatgtacctgtggagtttgctgacttcagtgtttacaatgccagcttggagaacagggaatggttttcctctaaagtagatctgtcaaactcacgggtcttggagaaagaagtgtcccgtagccctaccaccagcagtattaccagtggctacttttcccacagtgcctccaatgccaccctgtctgacatggtggtcccttctagtgacagctcagaccagctggccattcagacgaaggatgcagactccaccgagcactccacaccatcgcttgtgcatgatttcaggccgtcctcaaacaaagagttgacagaagtcgaaaaaggcttggtaaaggacaagataattgtggtgccactcaaggaaaacagtgccttagccaaagggagcccatcatcccagagcatccctgagaaaaactccaaatcactgtgcaggactggctcatgttcagaactagatgcctgccccagcaaaattagccagccagccaggggattctgccccagggaggtgacggtagaacacaccaccaacatccttgaagaccattctttcacagaatttatgggagtgtcagagggaaaagattttgatggtttgacagattcttctgctggagagctttccagtaggaggagtctaccaaataaaacaggcggcaagactgtctccgatgggctccaccaccccagccagctgcattccaagttagagaatgaccaggtaataattccagaggcagccttttgggttctgtgctgtcaatgagtatgtctaactgtatgtcaaccccagaggcccttcaccgcaacaacttggtaggaaagattcatccagttgtttgtgacagcaaagatgagcccacagagaagcaggctcacttcctgcacagctgtctctgtcggagagcaagtctgttttgggaactagaacgcaattgtgaaattataagaccagtggatttttttacctggcacatgggttggtgttgaatgaagtgttcagatggataaggatcaatctcatattcattccctgggatgtttagttaccagttttcccaaagtgttctggtagcatctaccatatttcatcaaatctgtgattcctttgattattatatgaaccattattttatgtatcattaagaaaaaatactgccaattaaactctgtcatatcaaca

SEQ ID NO: 3762 - protein, 1694 aa, Homo sapiens
MDESNTTKYAGQEVVFKCLGEGILEKAFQGYNACIFAYGQTGSGKSFSMMGHAEQLGLIPRLCCALFKRISLEQNESQTFKVEVSYMEIYNEKVRDLLDPKGSRQSLKVREHKVLGPYVDGLSQLAVTSFEDIESLMSEGNKSRTVAATNMNEESSRSHAVFNIIITQTLYDLQSGNSGEKVSKVSLVDLAGSERVSKTGAAGERLKEGSNINKSLTTLGLVISSLADQAAGKGKSKFVPYRDSVLTWLLKDNLGGNSQTSMIATISPAADNYEETLSTLRYADRAKRIVNHAVVNEDPNAKVIRELREEVEKLREQLSQAEAMKAPELKEKLEESEKLIKELTVTWEEKLRKTEEIAQERQRQLESMGISLEMSGIKVGDDKCYLVNLNADPALNELLVYYLKDHTRVGADTSQDIQLFGIGIQPQHCEIDIASDGDVTLTPKENARSCVNGTLVCSTTQLWHGDRILWGNNHFFRINLPKRKRRDWLKDFEKETGPPEHDLDAASEASSEPDYNYEFAQMEVIMKTLNSNDPVQNVVQVLEKQYLEEKRSALEEQRLMYERELEQLRQQLSPDRQPQSSGPDRLAYSSQTAQQKVTQWAEERDELFRQSLAKLREQLVKANTLVREANFLAEEMSKLTDYQVTLQIPAANLSANRKRGAIVSEPAIQVRRKGKSTQVWTIEKLENKLIDMRDLYQEWKEKVPEAKRLYGKRGDPFYEAQENHNLIGVANVFLECLFCDVKLQYAVPIISQQGEVAGRLHVEVMRVTGAVPERVVEDDSSENSSESGSLEVVDSSGEIIHRVKKLTCRVKIKEATGLPLNLSNFVFCQYTFWDQCESTVAAPVVDPEVPSPQSKDAQYTVTFSHCKDYVVNVTEEFLEFISDGALAIEVWGHRCAGNGSSIWEVDSLHAKTRTLHDRWNEVTRRIEMWISILELNELGEYAAVELHQAKDVNTGGIFQLRQGHSRRVQVTVKPVQHSGTLPLMVEAILSVSIGCVTARSTKLQRGLDSYQEEDLNCVRERWSDALIKRREYLDEQIKKVSNKTEKTEDDVEREAQLVEQWVGLTEERNAVLVPAPGSGIPGAPADWIPPPGMETHIPVLFLDLNADDLSANEQLVGPHASGVNSILPKEHGSQFFYLPIIKHSDDEVSATASWDSSVHDSVHLNRVTPQNERIYLIVKTTVQLSHPAAMELVLRKRIAANIYNKQSFTQSLKRRISLKNIFYSCGVTYEIVSNIPKATEEIEDRETLALLAARSENEGTSDGETYIEKYTRGVLQVENILSLERLRQAVTVKEALSTKARHIRRSLSTPNVHNVSSSRPDLSGFDEDDKGWPENQLDMSDYSSSYQDVACYGTLPRDSPRRNKEGCTSETPHALTVSPFKAFSPQPPKFFKPLMPVKEEHKKRIALEARPLLSQEDSEEEENELEAINRKLISSQPYVPVEFADFSVYNASLENREWFSSKVDLSNSRVLEKEVSRSPTTSSITSGYFSHSASNATLSDMVVPSSDSSDQLAIQTKDADSTEHSTPSLVHDFRPSSNKELTEVEKGLVKDKIIVVPLKENSALAKGSPSSQSIPEKNSKSLCRTGSCSELDACPSKISQPARGFCPREVTVEHTTNILEDHSFTEFMGVSEGKDFDGLTDSSAGELSSRRSLPNKTGGKTVSDGLHHPSQLHSKLENDQVIIPEAAFWVLCCQ

SEQ ID NO: 3763 - DNA, 5823 bp, Homo sapiens
gcggccgcgctcgaggggcgcgcggctgcagcggcggcggcgccgcgcgtgaggggccgcctaaggccgagcgggcgcggcgagcggccgggcgagcgcagccaacatgtcggataccaaggtaaaagttgccgtccgggtccggcccatgaaccgacgagaactggaactgaacaccaagtgcgtggtggagatggaagggaatcaaacggtcctgcaccctcctccttctaacaccaaacagggagaaaggtatttgcctttgattattgcttttggtccatggatgaatctaacactacaaaatacgctggtcaagaagtggttttcaagtgccttggggaaggaattcttgaaaaagcctttcaggggtataatgcgtgtatttttgcatatggacagacaggttcgggaaaatccttttccatgatgggccatgctgagcagctgggccttattccaaggctctgctgtgctttatttaaaaggatctctttggagcaaaatgagtcacagacctttaaagttgaagtgtcctatatggaaatttataatgagaaagttcgggatcttttagaccccaaagggagtagacagtctcttaaagttcgagaacataaagttttgggaccatatgtagatggtttatctcaactagctgtcactagttttgaggatattgagtcattgatgtctgagggaaataagtctcgaacggtagctgctaccaacatgaacgaagaaagcagccgctcccatgctgtgttcaacatcataatcacacagacactttatgacctgcagtctgggaattccggggagaaagtcagtaaggtcagcttggtagacctggcgggtagcgaaagagtatctaaaacaggagctgcaggagagcgactgaaagaaggcagcaacattaacaaatcgcttacaaccttggggttggttatatcatcactggctgaccaggcagctggcaagggtaaaagcaaatttgtgccttatcgagattcagtcctcacttggctgcttaaggacaacttggggggcaacagccaaacctctatgatagccacaatcagcccagccgcagacaactatgaagagaccctctccacattaagatatgcagaccgagccaaaaggattgtgaaccatgctgttgtgaatgaggaccccaacgcaaaagtgatccgagaactgcgggaggaagtcgagaaactgagagagcagctctctcaggcagaggccatgaaggcccctgaactgaaggagaagctcgaagagtctgaaaagctgataaaagaactaacagtgacttgggaagagaagctgagaaaaacagaagagatagcacaggaaagacaacgacaacttgaaagcatggggatttccctggagatgtccggtatcaaggtgggggatgacaaatgctacttagtcaatctgaatgcagaccctgctcttaacgaacttctggtttattatttaaaggatcacaccagggtgggtgcagatacctctcaagatatccagctttttggcataggaattcagcctcagcactgtgagattgacattgcatctgatggagacgtcactctcactccaaaagaaaatgcaaggtcctgtgtgaacggcacccttgtgtgcagtaccacccagctgtggcatggtgaccgaatcctatggggaaataatcacttttttagaataaacttacctaagaggaaacgtcgagattggttgaaagactttgaaaaagaaacgggcccgccagagcatgacctggatgcagccagtgaggcttcctctgaaccagactataactatgaatttgcacagatggaagttatcatgaaaaccctgaatagtaatgacccagttcaaaatgtggttcaggtcctggagaaacaatacctagaagaaaagagaagtgccctagaggagcagcggctcatgtatgagcgggaactggagcaactccgccagcagctctcccccgacaggcagccacagagtagcggccctgaccgcctggcctacagcagccagacagcgcagcagaaggtgacccagtgggcagaagagagggatgaactcttccgacaaagcctggcaaaactgcgagagcagctggttaaagctaataccttggtgagggaagcaaacttcctggctgaggaaatgagcaaactcaccgattaccaagtgactcttcagatccctgctgcaaacctcagtgccaataggaagagaggtgcaatagtgagtgaaccagctatccaagtgaggaggaaaggaaagagcacccaagtgtggaccattgagaagctggagaataaattaattgacatgagagacctttaccaagaatggaaggaaaaagttcctgaggcaaagagactctacggaaaacgaggtgaccctttctatgaagcccaagaaaatcacaacctcatcggggtggcgaatgtattcttggaatgcctcttctgtgatgtgaaacttcagtatgcagtccctatcatcagccagcagggggaggttgcagggcgtctccacgtggaagtgatgcgtgttacaggagctgttccagagcgtgtggtggaggatgactcttcggagaattccagtgaaagtgggagccttgaagtcgtagacagcagcggggaaatcattcaccgagtcaaaaagctgacatgtcgggtaaaaattaaagaagcaacggggctgcccttaaacctctcaaattttgtcttctgtcaatacacattctgggaccagtgtgagtctacggtggctgccccggtggtggaccccgaggtgccttcaccacagtccaaggatgcccagtacacagtgaccttctcccactgtaaggactatgtggtgaatgtaacagaagaatttctggagttcatttcagatggagcactggccattgaagtatggggccaccggtgtgctggaaatggcagctccatctgggaggtcgattctcttcatgctaagacaagaacactgcatgacaggtggaatgaagtaacgcgaagaatagaaatgtggatctccatattagaattgaatgagttaggagagtatgctgcagtggaacttcatcaggcaaaagatgtcaacacaggaggcatctttcaacttagacagggtcattcccgtagagtacaagtcacggtgaaacctgtgcagcattcagggacactgccacttatggttgaagccatcctgtcagtatccatcggctgtgtaactgccaggtccaccaaactccaaagagggctggacagttaccagagagatgatgaggatggtgatgatatggatagttatcaggaagaagacttaaactgcgtaagggagaggtggtcagatgcactcattaaacgacgagaatacctggatgaacagataaaaaaagtcagcaataaaacagagaaaacagaggacgatgtggagcgggaagcccagcttgtggagcagtgggtagggctgactgaggaaaggaatgctgtgctggtgccagccccaggcagtgggattcctggggcacctgccgactggatcccacctcctggaatggaaacccacataccagttctcttcctcgatttgaatgcggatgacctcagtgccaatgagcagcttgttggcccccatgcatccggcgtgaactccatcctgcccaaggagcatggcagccagtttttctacctgcccatcataaagcacagtgatgatgaggtttcagccacagcctcttgggattcctcggtgcatgattctgttcacttgaatagggtcacaccacagaatgaaaggatttacctaattgtgaaaaccacagttcaactcagccaccctgctgctatggagttagtattacgaaaacgaattgcagccaatatttacaacaaacagagtttcacgcagagtttgaagaggagaatatccctgaaaaatatattttattcctgtggtgtaacctatgaaatagtatccaatataccaaaggcaactgaggagatagaggaccgggaaacgctggctctcctggcagcaaggagtgaaaacgaaggcacatcagatggggagacgtacattgagaagtacactcgaggcgtgctgcaggtggaaaacattctgagtcttgaacggctccggcaggccgtcacagtcaaagaagcactttccaccaaagcccggcacattcggaggagcctcagtacaccaaatgttcataatgtctcttccagccgaccggacctttctggctttgatgaagatgacaagggttggccagagaaccagttggacatgtctgactatagctccagttaccaagatgtagcatgttatggaactttacccagggattctcctcgaaggaataaagaaggttgtacatcagagactcctcatgccttaaccgtcagcccttttaaagcattctctcctcagccaccaaagtttttcaagcccctaatgcctgtaaaagaggagcataagaaaaggatagccctggaagcaaggcctcttctaagccaggaggactctgaggaggaagaaaatgagctggaagctattaacaggaagctaataagttcacagccttatgtacctgtggagtttgctgacttcagtgtttacaatgccagcttggagaacagggaatggttttcctctaaagtagatctgtcaaactcacgggtcttggagaaagaagtgtcccgtagccctaccaccagcagtattaccagtggctacttttcccacagtgcctccaatgccaccctgtctgacatggtggtcccttctagtgacagctcagaccagctggccattcagacgaaggatgcagactccaccgagcactccacaccatcgcttgtgcatgatttcaggccgtcctcaaacaaagagttgacagaagtcgaaaaaggcttggtaaaggacaagataattgtggtgccactcaaggaaaacagtgccttagccaaagggagcccatcatcccagagcatccctgagaaaaactccaaatcactgtgcaggactggctcatgttcagaactagatgcctgccccagcaaaattagccagccagccaggggattctgccccagggaggtgacggtagaacacaccaccaacatccttgaagaccattctttcacagaatttatgggagtgtcagagggaaaagattttgatggtttgacagattcttctgctggagagctttccagtaggaggagtctaccaaataaaacaggcggcaagactgtctccgatgggctccaccaccccagccagctgcattccaagttagagaatgaccaggtaataattccagaggcagccttttgggttctgtgctgtcaatgagtatgtctaactgtatgtcaaccccagaggcccttcaccgcaacaacttggtaggaaagattcatccagttgtttgtgacagcaaagatgagcccacagagaagcaggctcacttcctgcacagctgtctctgtcggagagcaagtctgttttgggaactagaacgcaattgtgaaattataagaccagtggatttttttacctggcacatgggttggtgttgaatgaagtgttcagatggataaggatcaatctcatattcattccctgggatgtttagttaccagttttcccaaagtgttctggtagcatctaccatatttcatcaaatctgtgattcctttgattattatatgaaccattattttatgtatcattaagaaaaaatactgccaattaaactctgtcatatcaaca

SEQ ID NO: 3764 - protein, 1707 aa, Homo sapiens
MDESNTTKYAGQEVVFKCLGEGILEKAFQGYNACIFAYGQTGSGKSFSMMGHAEQLGLIPRLCCALFKRISLEQNESQTFKVEVSYMEIYNEKVRDLLDPKGSRQSLKVREHKVLGPYVDGLSQLAVTSFEDIESLMSEGNKSRTVAATNMNEESSRSHAVFNIIITQTLYDLQSGNSGEKVSKVSLVDLAGSERVSKTGAAGERLKEGSNINKSLTTLGLVISSLADQAAGKGKSKFVPYRDSVLTWLLKDNLGGNSQTSMIATISPAADNYEETLSTLRYADRAKRIVNHAVVNEDPNAKVIRELREEVEKLREQLSQAEAMKAPELKEKLEESEKLIKELTVTWEEKLRKTEEIAQERQRQLESMGISLEMSGIKVGDDKCYLVNLNADPALNELLVYYLKDHTRVGADTSQDIQLFGIGIQPQHCEIDIASDGDVTLTPKENARSCVNGTLVCSTTQLWHGDRILWGNNHFFRINLPKRKRRDWLKDFEKETGPPEHDLDAASEASSEPDYNYEFAQMEVIMKTLNSNDPVQNVVQVLEKQYLEEKRSALEEQRLMYERELEQLRQQLSPDRQPQSSGPDRLAYSSQTAQQKVTQWAEERDELFRQSLAKLREQLVKANTLVREANFLAEEMSKLTDYQVTLQIPAANLSANRKRGAIVSEPAIQVRRKGKSTQVWTIEKLENKLIDMRDLYQEWKEKVPEAKRLYGKRGDPFYEAQENHNLIGVANVFLECLFCDVKLQYAVPIISQQGEVAGRLHVEVMRVTGAVPERVVEDDSSENSSESGSLEVVDSSGEIIHRVKKLTCRVKIKEATGLPLNLSNFVFCQYTFWDQCESTVAAPVVDPEVPSPQSKDAQYTVTFSHCKDYVVNVTEEFLEFISDGALAIEVWGHRCAGNGSSIWEVDSLHAKTRTLHDRWNEVTRRIEMWISILELNELGEYAAVELHQAKDVNTGGIFQLRQGHSRRVQVTVKPVQHSGTLPLMVEAILSVSIGCVTARSTKLQRGLDSYQRDDEDGDDMDSYQEEDLNCVRERWSDALIKRREYLDEQIKKVSNKTEKTEDDVEREAQLVEQWVGLTEERNAVLVPAPGSGIPGAPADWIPPPGMETHIPVLFLDLNADDLSANEQLVGPHASGVNSILPKEHGSQFFYLPIIKHSDDEVSATASWDSSVHDSVHLNRVTPQNERIYLIVKTTVQLSHPAAMELVLRKRIAANIYNKQSFTQSLKRRISLKNIFYSCGVTYEIVSNIPKATEEIEDRETLALLAARSENEGTSDGETYIEKYTRGVLQVENILSLERLRQAVTVKEALSTKARHIRRSLSTPNVHNVSSSRPDLSGFDEDDKGWPENQLDMSDYSSSYQDVACYGTLPRDSPRRNKEGCTSETPHALTVSPFKAFSPQPPKFFKPLMPVKEEHKKRIALEARPLLSQEDSEEEENELEAINRKLISSQPYVPVEFADFSVYNASLENREWFSSKVDLSNSRVLEKEVSRSPTTSSITSGYFSHSASNATLSDMVVPSSDSSDQLAIQTKDADSTEHSTPSLVHDFRPSSNKELTEVEKGLVKDKIIVVPLKENSALAKGSPSSQSIPEKNSKSLCRTGSCSELDACPSKISQPARGFCPREVTVEHTTNILEDHSFTEFMGVSEGKDFDGLTDSSAGELSSRRSLPNKTGGKTVSDGLHHPSQLHSKLENDQVIIPEAAFWVLCCQ

SEQ ID NO: 3765 - DNA, 5928 bp, Homo sapiens
gcggccgcgctcgaggggcgcgcggctgcagcggcggcggcgccgcgcgtgaggggccgcctaaggccgagcgggcgcggcgagcggccgggcgagcgcagccaacatgtcggataccaaggtaaaagttgccgtccgggtccggcccatgaaccgacgagaactggaactgaacaccaagtgcgtggtggagatggaagggaatcaaacggtcctgcaccctcctccttctaacaccaaacagggagaaaggtatttgcctttgattattgcttttggtccatggatgaatctaacactacaaaatacgctggtcaagaagtggttttcaagtgccttggggaaggaattcttgaaaaagcctttcaggggtataatgcgtgtatttttgcatatggacagacaggttcgggaaaatccttttccatgatgggccatgctgagcagctgggccttattccaaggctctgctgtgctttatttaaaaggatctctttggagcaaaatgagtcacagacctttaaagttgaagtgtcctatatggaaatttataatgagaaagttcgggatcttttagaccccaaagggagtagacagtctcttaaagttcgagaacataaagttttgggaccatatgtagatggtttatctcaactagctgtcactagttttgaggatattgagtcattgatgtctgagggaaataagtctcgaacggtagctgctaccaacatgaacgaagaaagcagccgctcccatgctgtgttcaacatcataatcacacagacactttatgacctgcagtctgggaattccggggagaaagtcagtaaggtcagcttggtagacctggcgggtagcgaaagagtatctaaaacaggagctgcaggagagcgactgaaagaaggcagcaacattaacaaatcgcttacaaccttggggttggttatatcatcactggctgaccaggcagctggcaagggtaaaagcaaatttgtgccttatcgagattcagtcctcacttggctgcttaaggacaacttggggggcaacagccaaacctctatgatagccacaatcagcccagccgcagacaactatgaagagaccctctccacattaagatatgcagaccgagccaaaaggattgtgaaccatgctgttgtgaatgaggaccccaacgcaaaagtgatccgagaactgcgggaggaagtcgagaaactgagagagcagctctctcaggcagaggccatgaaggcccctgaactgaaggagaagctcgaagagtctgaaaagctgataaaagaactaacagtgacttgggaagagaagctgagaaaaacagaagagatagcacaggaaagacaacgacaacttgaaagcatggggatttccctggagatgtccggtatcaaggtgggggatgacaaatgctacttagtcaatctgaatgcagaccctgctcttaacgaacttctggtttattatttaaaggatcacaccagggtgggtgcagatacctctcaagatatccagctttttggcataggaattcagcctcagcactgtgagattgacattgcatctgatggagacgtcactctcactccaaaagaaaatgcaaggtcctgtgtgaacggcacccttgtgtgcagtaccacccagctgtggcatggtgaccgaatcctatggggaaataatcacttttttagaataaacttacctaagaggaaacgtcgagattggttgaaagactttgaaaaagaaacgggcccgccagagcatgacctggatgcagccagtgaggcttcctctgaaccagactataactatgaatttgcacagatggaagttatcatgaaaaccctgaatagtaatgacccagttcaaaatgtggttcaggtcctggagaaacaatacctagaagaaaagagaagtgccctagaggagcagcggctcatgtatgagcgggaactggagcaactccgccagcagctctcccccgacaggcagccacagagtagcggccctgaccgcctggcctacagcagccagacagcgcagcagaaggtgacccagtgggcagaagagagggatgaactcttccgacaaagcctggcaaaactgcgagagcagctggttaaagctaataccttggtgagggaagcaaacttcctggctgaggaaatgagcaaactcaccgattaccaagtgactcttcagatccctgctgcaaacctcagtgccaataggaagagaggtgcaatagtgagtgaaccagctatccaagtgaggaggaaaggaaagagcacccaagtgtggaccattgagaagctggagaataaattaattgacatgagagacctttaccaagaatggaaggaaaaagttcctgaggcaaagagactctacggaaaacgaggtgaccctttctatgaagcccaagaaaatcacaacctcatcggggtggcgaatgtattcttggaatgcctcttctgtgatgtgaaacttcagtatgcagtccctatcatcagccagcagggggaggttgcagggcgtctccacgtggaagtgatgcgtgttacaggagctgttccagagcgtgtggtggaggatgactcttcggagaattccagtgaaagtgggagccttgaagtcgtagacagcagcggggaaatcattcaccgagtcaaaaagctgacatgtcgggtaaaaattaaagaagcaacggggctgcccttaaacctctcaaattttgtcttctgtcaatacacattctgggaccagtgtgagtctacggtggctgccccggtggtggaccccgaggtgccttcaccacagtccaaggatgcccagtacacagtgaccttctcccactgtaaggactatgtggtgaatgtaacagaagaatttctggagttcatttcagatggagcactggccattgaagtatggggccaccggtgtgctggaaatggcagctccatctgggaggtcgattctcttcatgctaagacaagaacactgcatgacaggtggaatgaagtaacgcgaagaatagaaatgtggatctccatattagaattgaatgagttaggagagtatgctgcagtggaacttcatcaggcaaaagatgtcaacacaggaggcatctttcaacttagacagggtcattcccgtagagtacaagtcacggtgaaacctgtgcagcattcagggacactgccacttatggttgaagccatcctgtcagtatccatcggctgtgtaactgccaggtccaccaaactccaaagagggctggacagttaccagagagatgatgaggatggtgatgatatggatagttatcaggaagaagacttaaactgcgtaagggagaggtggtcagatgcactcattaaacgacgagaatacctggatgaacagataaaaaaagtcagcaataaaacagagaaaacagaggacgatgtggagcgggaagcccagcttgtggagcagtgggtagggctgactgaggaaaggaatgctgtgctggtgccagccccaggcagtgggattcctggggcacctgccgactggatcccacctcctggaatggaaacccacataccagttctcttcctcgatttgaatgcggatgacctcagtgccaatgagcagcttgttggcccccatgcatccggcgtgaactccatcctgcccaaggagcatggcagccagtttttctacctgcccatcataaagcacagtgatgatgaggtttcagccacagcctcttgggattcctcggtgcatgattctgttcacttgaatagggtcacaccacagaatgaaaggatttacctaattgtgaaaaccacagttcaactcagccaccctgctgctatggagttagtattacgaaaacgaattgcagccaatatttacaacaaacagagtttcacgcagagtttgaagaggagaatatccctgaaaaatatattttattcctgtggtgtaacctatgaaatagtatccaatataccaaaggcaactgaggagatagaggaccgggaaacgctggctctcctggcagcaaggagtgaaaacgaaggcacatcagatggggagacgtacattgagaagtacactcgaggcgtgctgcaggtggaaaacattctgagtcttgaacggctccggcaggccgtcacagtcaaagaagcactttccaccaaagcccggcacattcggaggagcctcagtacaccaaatgttcataatgtctcttccagccgaccggacctttctggctttgatgaagatgacaagggttggccagagaaccagttggacatgtctgactatagctccagttaccaagatgtagcatgttatggaactttacccagggattctcctcgaaggaataaagaaggttgtacatcagagactcctcatgccttaaccgtcagcccttttaaagcattctctcctcagccaccaaagtttttcaagcccctaatgcctgtaaaagaggagcataagaaaaggatagccctggaagcaaggcctcttctaagccaggagagcatgcctccacctcaggcacataaccctggctgcattgtaccctcaggaagcaatggcagcagcatgccagtagaacacaatagcaaacgtgagaagaagattgactctgaggaggaagaaaatgagctggaagctattaacaggaagctaataagttcacagccttatgtacctgtggagtttgctgacttcagtgtttacaatgccagcttggagaacagggaatggttttcctctaaagtagatctgtcaaactcacgggtcttggagaaagaagtgtcccgtagccctaccaccagcagtattaccagtggctacttttcccacagtgcctccaatgccaccctgtctgacatggtggtcccttctagtgacagctcagaccagctggccattcagacgaaggatgcagactccaccgagcactccacaccatcgcttgtgcatgatttcaggccgtcctcaaacaaagagttgacagaagtcgaaaaaggcttggtaaaggacaagataattgtggtgccactcaaggaaaacagtgccttagccaaagggagcccatcatcccagagcatccctgagaaaaactccaaatcactgtgcaggactggctcatgttcagaactagatgcctgccccagcaaaattagccagccagccaggggattctgccccagggaggtgacggtagaacacaccaccaacatccttgaagaccattctttcacagaatttatgggagtgtcagagggaaaagattttgatggtttgacagattcttctgctggagagctttccagtaggaggagtctaccaaataaaacaggcggcaagactgtctccgatgggctccaccaccccagccagctgcattccaagttagagaatgaccaggtaataattccagaggcagccttttgggttctgtgctgtcaatgagtatgtctaactgtatgtcaaccccagaggcccttcaccgcaacaacttggtaggaaagattcatccagttgtttgtgacagcaaagatgagcccacagagaagcaggctcacttcctgcacagctgtctctgtcggagagcaagtctgttttgggaactagaacgcaattgtgaaattataagaccagtggatttttttacctggcacatgggttggtgttgaatgaagtgttcagatggataaggatcaatctcatattcattccctgggatgtttagttaccagttttcccaaagtgttctggtagcatctaccatatttcatcaaatctgtgattcctttgattattatatgaaccattattttatgtatcattaagaaaaaatactgccaattaaactctgtcatatcaaca

SEQ ID NO: 3766 - protein, 1742 aa, Homo sapiens
MDESNTTKYAGQEVVFKCLGEGILEKAFQGYNACIFAYGQTGSGKSFSMMGHAEQLGLIPRLCCALFKRISLEQNESQTFKVEVSYMEIYNEKVRDLLDPKGSRQSLKVREHKVLGPYVDGLSQLAVTSFEDIESLMSEGNKSRTVAATNMNEESSRSHAVFNIIITQTLYDLQSGNSGEKVSKVSLVDLAGSERVSKTGAAGERLKEGSNINKSLTTLGLVISSLADQAAGKGKSKFVPYRDSVLTWLLKDNLGGNSQTSMIATISPAADNYEETLSTLRYADRAKRIVNHAVVNEDPNAKVIRELREEVEKLREQLSQAEAMKAPELKEKLEESEKLIKELTVTWEEKLRKTEEIAQERQRQLESMGISLEMSGIKVGDDKCYLVNLNADPALNELLVYYLKDHTRVGADTSQDIQLFGIGIQPQHCEIDIASDGDVTLTPKENARSCVNGTLVCSTTQLWHGDRILWGNNHFFRINLPKRKRRDWLKDFEKETGPPEHDLDAASEASSEPDYNYEFAQMEVIMKTLNSNDPVQNVVQVLEKQYLEEKRSALEEQRLMYERELEQLRQQLSPDRQPQSSGPDRLAYSSQTAQQKVTQWAEERDELFRQSLAKLREQLVKANTLVREANFLAEEMSKLTDYQVTLQIPAANLSANRKRGAIVSEPAIQVRRKGKSTQVWTIEKLENKLIDMRDLYQEWKEKVPEAKRLYGKRGDPFYEAQENHNLIGVANVFLECLFCDVKLQYAVPIISQQGEVAGRLHVEVMRVTGAVPERVVEDDSSENSSESGSLEVVDSSGEIIHRVKKLTCRVKIKEATGLPLNLSNFVFCQYTFWDQCESTVAAPVVDPEVPSPQSKDAQYTVTFSHCKDYVVNVTEEFLEFISDGALAIEVWGHRCAGNGSSIWEVDSLHAKTRTLHDRWNEVTRRIEMWISILELNELGEYAAVELHQAKDVNTGGIFQLRQGHSRRVQVTVKPVQHSGTLPLMVEAILSVSIGCVTARSTKLQRGLDSYQRDDEDGDDMDSYQEEDLNCVRERWSDALIKRREYLDEQIKKVSNKTEKTEDDVEREAQLVEQWVGLTEERNAVLVPAPGSGIPGAPADWIPPPGMETHIPVLFLDLNADDLSANEQLVGPHASGVNSILPKEHGSQFFYLPIIKHSDDEVSATASWDSSVHDSVHLNRVTPQNERIYLIVKTTVQLSHPAAMELVLRKRIAANIYNKQSFTQSLKRRISLKNIFYSCGVTYEIVSNIPKATEEIEDRETLALLAARSENEGTSDGETYIEKYTRGVLQVENILSLERLRQAVTVKEALSTKARHIRRSLSTPNVHNVSSSRPDLSGFDEDDKGWPENQLDMSDYSSSYQDVACYGTLPRDSPRRNKEGCTSETPHALTVSPFKAFSPQPPKFFKPLMPVKEEHKKRIALEARPLLSQESMPPPQAHNPGCIVPSGSNGSSMPVEHNSKREKKIDSEEEENELEAINRKLISSQPYVPVEFADFSVYNASLENREWFSSKVDLSNSRVLEKEVSRSPTTSSITSGYFSHSASNATLSDMVVPSSDSSDQLAIQTKDADSTEHSTPSLVHDFRPSSNKELTEVEKGLVKDKIIVVPLKENSALAKGSPSSQSIPEKNSKSLCRTGSCSELDACPSKISQPARGFCPREVTVEHTTNILEDHSFTEFMGVSEGKDFDGLTDSSAGELSSRRSLPNKTGGKTVSDGLHHPSQLHSKLENDQVIIPEAAFWVLCCQ

SEQ ID NO: 3767 - DNA, 915 bp, Homo sapiens
tggagaaagaagtgtcccgtagccctaccaccagcagtattaccagtggctacttttcccacagtgcctccaatgccaccctgtctgacatggtggtcccttctagtgacagctcagaccagctggccattcagacgaaggatgcagactccaccgagcactccacaccatcgcttgtgcatgatttcaggccgtcctcaaacaaagagttgacagaagtcgaaaaaggcttggtaaaggacaagataattgtggtgccactcaaggaaaacagtgccttagccaaagggagcccatcatcccagagcatccctgagaaaaactccaaatcactgtgcaggactggctcatgttcagaactagatgcctgccccagcaaaattagccagccagccaggggattctgccccagggaggtgacggtagaacacaccaccaacatccaatgaccaggtaataattccagaggcagccttttgggttctgtgctgtcaatgagtatgtctaactgtatgtcaaccccagaggcccttcaccgcaacaacttggtaggaaagattcatccagttgtttgtgacagcaaagatgagcccacagagaagcaggctcacttcctgcacagctgtctctgtcggagagcaagtctgttttgggaactagaacgcaattgtgaaattataagaccagtggatttttttacctggcacatgggttggtgttgaatgaagtgttcagatggataaggatcaatctcatattcattccctgggatgtttagttaccagttttcccaaagtgttctggtagcatctaccatatttcatcaaatctgtgattcctttgattattatatgaaccattattttatgtatcattaagaaaaaatactgccaattaaactctgtcatatcaaca

SEQ ID NO: 3768 - protein, 119 aa, Homo sapiens
MVVPSSDSSDQLAIQTKDADSTEHSTPSLVHDFRPSSNKELTEVEKGLVKDKIIVVPLKENSALAKGSPSSQSIPEKNSKSLCRTGSCSELDACPSKISQPARGFCPREVTVEHTTNIQ

SEQ ID NO: 3769 - DNA, 606 bp, Homo sapiens
gtctcttccagccgaccggacctttctggctttgatgaagatgacaagggttggccagagaaccagttggacatgtctgactatagctccagttaccaagatgtagcatgttatggaactttacccagggattctcctcgaaggaataaagaaggttgtacatcagagactcctcatgccttaaccgtcagcccttttaaagcattctctcctcagccaccaaagtttttcaagcccctaatgcctgtaaaagaggagcataagaaaaggatagccctggaagcaaggcctcttctaagccaggaggtaaatgcttgacttgtctgtactatgcagaatagagcagagttgtgtcacctgtgaagcagcagtgtgcattaacaagctgagtgctgcatgtggacatgcacggtcatcactccatggttcccgttctcgaattcctctttctcaagcatgcagagtcatggtagaatctcttgtttgttgttgctgctgtggttttatttctttgtgtttatggcttttcaaagtatttttttatgtttcaagtgagaaagatgttttctaggtgttttgaaaagattaaaggccttttttaaaatt

SEQ ID NO: 3770 - protein, 81 aa, Homo sapiens
MSDYSSSYQDVACYGTLPRDSPRRNKEGCTSETPHALTVSPFKAFSPQPPKFFKPLMPVKEEHKKRIALEARPLLSQEVNA

SEQ ID NO: 3771 - DNA, 3096 bp, Homo sapiens
aaataaacgtggcgggacgtatgtgtcatggcgctctccatctaaagtctgtgcagcttccggagagtggcgggttgattttctcactttggactggtttttacttcccgacttctggactcatctttcaagaggactttagactaattgcagataattaagagaatatgccttctgcatcctgtgatacactactggatgacatcgaagatatcgtgtctcaggaagattcaaaaccacaagataggcattttgtaagaaaggatgttgtcccgaaggtacgaaggcgaaatacccaaaaatatttgcaagaggaagaaaacagtccaccaagtgacagaaaatgcatccgatgcagatttatggctcctgaacagttgcactgtaaaaaacccagctgaagaccactttagaaactcaattaaaaaagctcaagaggagaacaagaaaatcgtactggctggatgcgttcctcaagcccagcctcgccaggactaccttaagggactgagtatcattggggttcagcagatagatcgtgtggtagaagttgtggaggagacaattaaaggtcactctgtgagactgctgggtcagaaaaaggataatggaaggcggcttgggggagcacgattggatttgccgaagattaggaagaatccactgatagaaatcatttccatcaataccgggtgtctcaatgcttgtacctactgcaaaactaaacacgccagaggaaatttggccagttatccaattgatgaactagtagatagagccaaacaatcttttcaagagggtgtttgtgagatatggttgaccagtgaagacacgggggcttatggcagagatattggcaccaatctccccacactcctgtggaaactggttgaagtgattcctgagggagcaatgctgaggcttggcatgacaaatccgccctatattttagagcatctggaggaaatggcaaaaatccttaatcaccccagagtctacgcttttctgcacataccagtccagtctgcctccgacagcgtactcatggaaatgaaaagagaatactgtgtggctgacttcaaaagagtagtggattttctgaaagagaaagttcctggaataactattgctacagatattatctgtggttttcctggagaaacagatcaggattttcaagaaacagtgaaacttgttgaagagtacaaattcccaagcctgtttattaaccaattttacccaagaccaggaactcctgctgcaaaaatggaacaagttccagcacaagtgattggtgaaagacaacaagtgttagtaacagaagaatcttttgattccaagttttatgttgcacacaatcaattctatgagcaggttttagtgccaaagaaccctgcgttcatggggaagatggttgaagtggacatctatgaatcaggcaaacattttatgaaagggcagccagtatctgatgccaaagtgtacacgccctccatcagcaaaccgctagcaaagggagaagtctcgggtttgacaaaggacttcagaaatgggcttgggaaccagctgagttcaggatcccacacctctgctgcatctcagtgtgactcagcgagttccagaatggtgctgcccatgccaaggctacatcaagactgtgcgctgaggatgtccgtgggcttggctctgctgggtcttctttttgctttttttgtcaaggtctataattagaatacaactaatggaaacatctataaagaagaatacatttctaattaaaatcttcaatgaacaggaaagcgacatctccattctccaagggcaataatttgtactggtcatgctgcctccttctcagccactcttcttaatgaggctccccctgtctcacattgagttgggcccattggttatttgacctaaaacctaatcaccgctaccatagcacatccttcaaattaaactgcttttggtttacttttagcaagaaatgcaagcggttgcatttttttctgtttgtttcaatctctaatctttaagtcagaacctaattgtacagtggctctggccatcttttcctcatgtggaagaattttctatctttaataaactttttctttgttttttttttccagatggagtttcgctcttgtcccccaggctggagtggtgcagtggcacgatctcaggtcactgcaacctctgcctcctgggttcaaacgattctcctgcctcagcctcccaagtagctgggattacaggcatgcgccaccaagcccagacaatttttttgtgttttcagtagagacggagtttcaccatgttggccaggctagtctcgaactcctgacctcaagtgatccgcccgcctcggcctcccaaagtgctaggattacaggcgtgagccactgcgcccggcctctttaataaatatttttaagtgcatcttccccttcaggctttgtttggagtcccagtgctacaaacattgtatttttcacagcagatgtgttcctgaaaagtgtatagaaacctgttctgggaacctgaatgcttttggaatgcacggggagagtctgccagctaaaggactcctggcaacattctgtgaaatatgaaactggaaaactggatttgtcgaaaactaattgtgcccattttctcacatttttgatccattggggttttttttttgtttttgtttttttttttttttgagtcaaggtctcactctgtcaccctggctggagtgcaatggcactatcttggctcactgcagccttgacctcctggactcaagcagtcctcctacctcagcctccctaatagccaggggctacaggcatataccaccatgcccaactaattttttaattttttgtagagatgagtgtcactatgttgcccaggcttgcctggaactcctagcctcaagcagtcttcttgcctcagcctcccaaagtgctgggattacaggcgtgagccactccacccagcccagattaaatgtttttatttctacctgccatcattggtctttactaagtgaagtgacttctttctttaacaataaatagaattggtatactaagcaaa

SEQ ID NO: 3772 - protein, 488 aa, Homo sapiens
MLSRRYEGEIPKNICKRKKTVHQVTENASDADLWLLNSCTVKNPAEDHFRNSIKKAQEENKKIVLAGCVPQAQPRQDYLKGLSIIGVQQIDRVVEVVEETIKGHSVRLLGQKKDNGRRLGGARLDLPKIRKNPLIEIISINTGCLNACTYCKTKHARGNLASYPIDELVDRAKQSFQEGVCEIWLTSEDTGAYGRDIGTNLPTLLWKLVEVIPEGAMLRLGMTNPPYILEHLEEMAKILNHPRVYAFLHIPVQSASDSVLMEMKREYCVADFKRVVDFLKEKVPGITIATDIICGFPGETDQDFQETVKLVEEYKFPSLFINQFYPRPGTPAAKMEQVPAQVIGERQQVLVTEESFDSKFYVAHNQFYEQVLVPKNPAFMGKMVEVDIYESGKHFMKGQPVSDAKVYTPSISKPLAKGEVSGLTKDFRNGLGNQLSSGSHTSAASQCDSASSRMVLPMPRLHQDCALRMSVGLALLGLLFAFFVKVYN

SEQ ID NO: 3773 - DNA, 2435 bp, Homo sapiens
gcgggttgattttctcactttggactggtttttacttcccgacttctggactcatctttcaagaggactttagactaattgcagataattaagagaatatgccttctgcatcctgtgatacactactggatgacatcgaagatatcgtgtctcaggaagattcaaaaccacaagataggcattttgtaagaaaggatgttgtcccgaaggtacgaaggcgaaatacccaaaaatatttgcaagaggaagaaaacagtccaccaagtgacagcactattccaggcatacagaaaatttggatacgaacatggggttgttctcataataattcagatggagaatatatggctggacagctagctgcttatggctataaaattacagaaaagctcaagaggagaacaagaaaatcgtactggctggatgcgttcctcaagcccagcctcgccaggactaccttaagggactgagtatcattggggttcagcagatagatcgtgtggtagaagttgtggaggagacaattaaaggtcactctgtgagactgctgggtcagaaaaaggataatggaaggcggcttgggggagcacgattggatttgccgaagattaggaagaatccactgatagaaatcatttccatcaataccgggtagagggtgtttgtgagatatggttgaccagtgaagacacgggggcttatggcagagatattggcaccaatctccccacactcctgtggaaactggttgaagtgattcctgagggagcaatgctgaggcttggcatgacaaatccgccctatattttagagcatctggaggaaatggcaaaaatccttaatcaccccagagtctacgcttttctgcacataccagtccagtctgcctccgacagcgtactcatggaaatgaaaagagaatactgtgtggctgacttcaaaagagtagtggattttctgaaagagaaagttcctggaataactattgctacagatattatctgtggttttcctggagaaacagatcaggattttcaagaaacagtgaaacttgttgaagagtacaaattcccaagcctgtttattaaccaattttacccaagaccaggaactcctgctgcaaaaatggaacaagttccagcacaagtgaaaaagcaaaggacaaaagatctttctcgggtgtttcattcttacagtccatatgatcacaagattggtgaaagacaacaagtgttagtaacagaagaatcttttgattccaagttttatgttgcacacaatcaattctatgagcaggttttagtgccaaagaaccctgcgttcatggggaagatggttgaagtggacatctatgaatcaggcaaacattttatgaaagggcagccagtatctgatgccaaagtgtacacgccctccatcagcaaaccgctagcaaagggagaagtctcgggtttgacaaaggacttcagaaatgggcttgggaaccagctgagttcaggatcccacacctctgctgcatctcagtgtgactcagcgagttccagaatggtgctgcccatgccaaggctacatcaagactgtgcgctgaggatgtccgtgggcttggctctgctgggtcttctttttgctttttttgtcaaggtctataattagaatacaactaatggaaacatctataaagaagaatacatttctaattaaaatcttcaatgaacaggaaagcgacatctccattctccaagggcaataatttgtactggtcatgctgcctccttctcagccactcttcttaatgaggctccccctgtctcacattgagttgggcccattggttatttgacctaaaacctaatcaccgctaccatagcacatccttcaaattaaactgcttttggtttacttttagcaagaaatgcaagcggttgcatttttttctgtttgtttcaatctctaatctttaagtcagaacctaattgtacagtggctctggccatcttttcctcatgtggaagaattttctatctttaataaactttttctttgttttttttttccagatggagtttcgctcttgtcccccaggctggagtggtgcagtggcacgatctcaggtcactgcaacctctgcctcctgggttcaaacgattctcctacctcagcctccctaatagccaggggctacaggcatataccaccatgcccaactaattttttaattttttgtagagatgagtgtcactatgttgcccaggcttgcctggaactcctagcctcaagcagtcttcttgcctcagcctcccaaagtgctgggattacaggcgtgagccactccacccagcccagattaaatgtttttatttctacctgccatcattggtctttactaagtgaagtgacttctttctttaacaataaatagaattggtatactaagc

SEQ ID NO: 3774 - protein, 293 aa, Homo sapiens
MLRLGMTNPPYILEHLEEMAKILNHPRVYAFLHIPVQSASDSVLMEMKREYCVADFKRVVDFLKEKVPGITIATDIICGFPGETDQDFQETVKLVEEYKFPSLFINQFYPRPGTPAAKMEQVPAQVKKQRTKDLSRVFHSYSPYDHKIGERQQVLVTEESFDSKFYVAHNQFYEQVLVPKNPAFMGKMVEVDIYESGKHFMKGQPVSDAKVYTPSISKPLAKGEVSGLTKDFRNGLGNQLSSGSHTSAASQCDSASSRMVLPMPRLHQDCALRMSVGLALLGLLFAFFVKVYN

SEQ ID NO: 3775 - DNA, 1999 bp, Homo sapiens
gctttcagacagggtatcgctctgttgcccaggctggagtgcagtgctgcaatcttggctcactgtagccccaacctcctgggctcaagcagtccttccacctcagcatctcaagtagctgggactacagaaaaagcaaaggacaaaagatctttctcgggtgtttcattcttacagtccatatgatcacaagattggtgaaagacaacaagtgttagtaacagaagaatcttttgattccaagttttatgttgcacacaatcaattctatgagcaggttttagtgccaaagaaccctgcgttcatggggaagatggttgaagtggacatctatgaatcaggcaaacattttatgaaagggcagccagtatctgatgccaaagtgtacacgccctccatcagcaaaccgctagcaaagggagaagtctcgggtttgacaaaggacttcagaaatgggcttgggaaccagctgagttcaggatcccacacctctgctgcatctcagtgtgactcagcgagttccagaatggtgctgcccatgccaaggctacatcaagactgtgcgctgaggatgtccgtgggcttggctctgctgggtcttctttttgctttttttgtcaaggtctataattagaatacaactaatggaaacatctataaagaagaatacatttctaattaaaatcttcaatgaacaggaaagcgacatctccattctccaagggcaataatttgtactggtcatgctgcctccttctcagccactcttcttaatgaggctccccctgtctcacattgagttgggcccattggttatttgacctaaaacctaatcaccgctaccatagcacatccttcaaattaaactgcttttggtttacttttagcaagaaatgcaagcggttgcatttttttctgtttgtttcaatctctaatctttaagtcagaacctaattgtacagtggctctggccatcttttcctcatgtggaagaattttctatctttaataaactttttctttgttttttttttccagatggagtttcgctcttgtcccccaggctggagtggtgcagtggcacgatctcaggtcactgcaacctctgcctcctgggttcaaacgattctcctgcctcagcctcccaagtagctgggattacaggcatgcgccaccaagcccagacaatttttttgtgttttcagtagagacggagtttcaccatgttggccaggctagtctcgaactcctgacctcaagtgatccgcccgcctcggcctcccaaagtgctaggattacaggcgtgagccactgcgcccggcctctttaataaatatttttaagtgcatcttccccttcaggctttgtttggagtcccagtgctacaaacattgtatttttcacagcagatgtgttcctgaaaagtgtatagaaacctgttctgggaacctgaatgcttttggaatgcacggggagagtctgccagctaaaggactcctggcaacattctgtgaaatatgaaactggaaaactggatttgtcgaaaactaattgtgcccattttctcacatttttgatccattggggttttttttttgtttttgtttttttttttttttgagtcaaggtctcactctgtcaccctggctggagtgcaatggcactatcttggctcactgcagccttgacctcctggactcaagcagtcctcctacctcagcctccctaatagccaggggctacaggcatataccaccatgcccaactaattttttaattttttgtagagatgagtgtcactatgttgcccaggcttgcctggaactcctagcctcaagcagtcttcttgcctcagcctcccaaagtgctgggattacaggcgtgagccactccacccagcccagattaaatgtttttatttctacctgccatcattggtctttactaagtgaagtgacttctttctttaacaataaatagaattggtatactaagcaaa

SEQ ID NO: 3776 - protein, 109 aa, Homo sapiens [sequence omitted]

SEQ ID NO: 3777 - DNA, 1812 bp, Homo sapiens
ttgagcagctagaagatagagtccactttgtaggggatcccagaacagaaaaatgacattgagggacaatgaggaaacctggataattaggttttagtgccaaagaaccctgcgttcatggggaagatggttgaagtggacatctatgaatcaggcaaacattttatgaaagggcagccagtatctgatgccaaagtgtacacgccctccatcagcaaaccgctagcaaagggagaagtctcgggtttgacaaaggacttcagaaatgggcttgggaaccagctgagttcaggatcccacacctctgctgcatctcagtgtgactcagcgagttccagaatggtgctgcccatgccaaggctacatcaagactgtgcgctgaggatgtccgtgggcttggctctgctgggtcttctttttgctttttttgtcaaggtctataattagaatacaactaatggaaacatctataaagaagaatacatttctaattaaaatcttcaatgaacaggaaagcgacatctccattctccaagggcaataatttgtactggtcatgctgcctccttctcagccactcttcttaatgaggctccccctgtctcacattgagttgggcccattggttatttgacctaaaacctaatcaccgctaccatagcacatccttcaaattaaactgcttttggtttacttttagcaagaaatgcaagcggttgcatttttttctgtttgtttcaatctctaatctttaagtcagaacctaattgtacagtggctctggccatcttttcctcatgtggaagaattttctatctttaataaactttttctttgttttttttttccagatggagtttcgctcttgtcccccaggctggagtggtgcagtggcacgatctcaggtcactgcaacctctgcctcctgggttcaaacgattctcctgcctcagcctcccaagtagctgggattacaggcatgcgccaccaagcccagacaatttttttgtgttttcagtagagacggagtttcaccatgttggccaggctagtctcgaactcctgacctcaagtgatccgcccgcctcggcctcccaaagtgctaggattacaggcgtgagccactgcgcccggcctctttaataaatatttttaagtgcatcttccccttcaggctttgtttggagtcccagtgctacaaacattgtatttttcacagcagatgtgttcctgaaaagtgtatagaaacctgttctgggaacctgaatgcttttggaatgcacggggagagtctgccagctaaaggactcctggcaacattctgtgaaatatgaaactggaaaactggatttgtcgaaaactaattgtgcccattttctcacatttttgatccattggggttttttttttgtttttgtttttttttttttttgagtcaaggtctcactctgtcaccctggctggagtgcaatggcactatcttggctcactgcagccttgacctcctggactcaagcagtcctcctacctcagcctccctaatagccaggggctacaggcatataccaccatgcccaactaattttttaattttttgtagagatgagtgtcactatgttgcccaggcttgcctggaactcctagcctcaagcagtcttcttgcctcagcctcccaaagtgctgggattacaggcgtgagccactccacccagcccagattaaatgtttttatttctacctgccatcattggtctttactaagtgaagtgacttctttctttaacaataaatagaattggtatactaagcaaa

SEQ ID NO: 3778 - protein, 109 aa, Homo sapiens [sequence omitted]

SEQ ID NO: 3779 - DNA, 1254 bp, Homo sapiens
tgctttttttgtcaaggtctataattagaatacaactaatggaaacatctataaagaagaatacatttctaattaaaatcttcaatgaacaggaaagcgacatctccattctccaagggcaataatttgtactggtcatgctgcctccttctcagccactcttcttaatgaggctccccctgtctcacattgagttgggcccattggttatttgacctaaaacctaatcaccgctaccatagcacatccttcaaattaaactgcttttggtttacttttagcaagaaatgcaagcggttgcatttttttctgtttgtttcaatctctaatctttaagtcagaacctaattgtacagtggctctggccatcttttcctcatgtggaagaattttctatctttaataaactttttctttgttttttttttccagatggagtttcgctcttgtcccccaggctggagtggtgcagtggcacgatctcaggtcactgcaacctctgcctcctgggttcaaacgattctcctgcctcggcctcccaaagtgctaggattacaggcgtgagccactgcgcccggcctctttaataaatatttttaagtgcatcttccccttcaggctttgtttggagtcccagtgctacaaacattgtatttttcacagcagatgtgttcctgaaaagtgtatagaaacctgttctgggaacctgaatgcttttggaatgcacggggagagtctgccagctaaaggactcctggcaacattctgtgaaatatgaaactggaaaactggatttgtcgaaaactaattgtgcccattttctcacatttttgatccattggggttttttttttgtttttgtttttttttttttttgagtcaaggtctcactctgtcaccctggctggagtgcaatggcactatcttggctcactgcagccttgacctcctggactcaagcagtcctcctacctcagcctccctaatagccaggggctacaggcatataccaccatgcccaactaattttttaattttttgtagagatgagtgtcactatgttgcccaggcttgcctggaactcctagcctcaagcagtcttcttgcctcagcctcccaaagtgctgggattacaggcgtgagccactccacccagcccagattaaatgtttttatttctacctgccatcattggtctttactaagtgaagtgacttctttctttaacaataaatagaattggtatactaagca

SEQ ID NO: 3780 - protein, 61 aa, Homo sapiens [sequence omitted]

SEQ ID NO: 3781 - DNA, 384 bp, Homo sapiens
aagaggaagttaatatatatgtttctcccaaaagtgtctttgagcacccaaaagtactagagtcttgccttcttccttgtgtgattatgaatatgttgaaaagtagtgtgtggagaagtcagtcgccaagagaaaacaggattttctggccaagttcaaagtcccgagcagatcccatgacttcctccctgcagggcagacatctgaccattttttttttctttacagattttactggagatttgtggttttgcagggaggatcacatggcacatggcagatcacacagccttcaactatattcctttctcctttttatccccacccgtatgtaccacattgaaaataatgaattaaatcttcagaaaataatgatctcaaagg

SEQ ID NO: 3782 - protein, 98 aa, Homo sapiens
MNMLKSSVWRSQSPRENRIFWPSSKSRADPMTSSLQGRHLTIFFFFTDFTGDLWFCREDHMAHGRSHSLQLYSFLLFIPTRMYHIENNELNLQKIMIS

SEQ ID NO: 3783 - DNA, 2077 bp, Homo sapiens
gtgcaatggtgccatcttggctcaccgcaacctctgccttccaggttcaagcaattctcctgccttagcctcctgagtagctggaattacaggcatgcgccaccacgcccaggaggcgatcccgcgccctgggtgcggtgaggccgctgggacagcggaggtgcctcccgacgcgaagcagcgagctgaggcggcggccagcggggaagatgagcggcagcagcgccaggtccagccacctgtctcagcccgtcgtgaagagcgtgcttgtgtaccgcaacggggaccccttctacgcggggcgccgcgtcgtcatccatgagaagaaggtgtccagcttcgaagtcttcctgaaggaggtgaccggcggcgttcaggcaccctttggggccgtcaggaacatctacaccccgcggactggccaccgaatccggaagctagaccagatccagagcgggggcaattacgtggctggaggccaggaagccttcaagaaactcaattacttggacataggagaaatcaagaaaagaccaatggaagttgttaatacagaggtaaaaccagtaatccatagcaggatcaacgtgtcagctcgctttagaaaaccgcttcaggagccgtgcactatcttcttgattgcaaatggagacctcataaacccagcttctcgcctccttatccccagaaaaaccttgaatcagtgggatcatgtactacaaatggtcacagaaaaaatcactctgaggagcggggctgttcacaggctttatactttagaaggaaaacttgttgagagtggagcagagttggagaatgggcagttttatgtggctgttggcagagataagtttaagaaactgccttacagtgagttactttttgacaagtcaacgatgagaaggccttttggtcagaaagcttcttcactacctcctattgtaggatccagaaagtctaaagggagtggaaatgatcgccactctaagtcaacagttggatccagtgacaactcatctcctcagcccctgaagaggaaagggaaaaaagaagacgtgaattcagaaaaactgacgaaattgaaacaaaatgtaaaattaaagaattcacaagaaaccattccaaatagtgatgaaggcattttcaaagctggagcagagaggtctgaaacacggggggcagcagaagtccaagaagatgaagatactcaggttgaggttccagtcgatcagaggccagcagaaatagtagacgaggaagaagatggagagaaggcaaacaaggatgcagaacagaaagaagacttttcaggaatgaatggtgaccttgaagaggaaggaggtagggaggctacagatgcccctgagcaagtcgaggagattctggatcacagtgagcagcaggcacgccctgctcgtgtaaatggaggcaccgatgaggagaatggtgaggagctgcagcaggttaataatgagcttcaactggtcctagacaaggaaagaaagtctcaaggagctggcagtggacaagatgaggctgatgtagaccctcaaagaccaccaaggccagaagtaaaaattaccagtccagaagaaaatgaaaacaaccaacaaaacaaggactatgctgccgtggcttagaacatttttaaaaagagagtatatggatcgcaagaaaaatgaagggttatcatacttgaaagataagcacatagttattgctgaatataatgtgacactatggtcgaatactacctacgaattataacattagaagcctagtggaaagaccagataactttaaatggctactaaaggataattacttacttttattgcatgtgttttaaaagtcatatagaaatattaaataagacggacagaggagaatttgcactggaagacaattgccacttgtaaaggatgaaaaataggatcactcttattgtacgctttattataagtttagaaggcagtttattctaaataatttttctctaggaaggcgtagaattttaaagaactggtaataggaaagcatgtactattttcttaaagcaataaactcttgaatgaac

SEQ ID NO: 3784 - protein, 476 aa, Homo sapiens
MSGSSARSSHLSQPVVKSVLVYRNGDPFYAGRRVVIHEKKVSSFEVFLKEVTGGVQAPFGAVRNIYTPRTGHRIRKLDQIQSGGNYVAGGQEAFKKLNYLDIGEIKKRPMEVVNTEVKPVIHSRINVSARFRKPLQEPCTIFLIANGDLINPASRLLIPRKTLNQWDHVLQMVTEKITLRSGAVHRLYTLEGKLVESGAELENGQFYVAVGRDKFKKLPYSELLFDKSTMRRPFGQKASSLPPIVGSRKSKGSGNDRHSKSTVGSSDNSSPQPLKRKGKKEDVNSEKLTKLKQNVKLKNSQETIPNSDEGIFKAGAERSETRGAAEVQEDEDTQVEVPVDQRPAEIVDEEEDGEKANKDAEQKEDFSGMNGDLEEEGGREATDAPEQVEEILDHSEQQARPARVNGGTDEENGEELQQVNNELQLVLDKERKSQGAGSGQDEADVDPQRPPRPEVKITSPEENENNQQNKDYAAVA

SEQ ID NO: 3785 - DNA, 782 bp, Homo sapiens
tgccatcttggctcaccgcaacctctgccttccaggttcaagcaattctcctgccttagcctcctgagtagctggaattacaggcatgcgccaccacgcccaggaggcgatcccgcgccctgggtgcggtgaggccgctgggacagcggaggtgcctcccgacgcgaagcagcgagctgaggcggcggccagcggggaagatgagcggcagcagcgccaggtccagccacctgtctcagcccgtcgtgaagagcgtgcttgtgtaccgcaacggggaccccttctacgcggggcgccgcgtcgtcatccatgagaagaaggtgtccagcttcgaagtcttcctgaaggaggtgaccggcggcgttcaggcaccctttggggccgtcaggaacatctacaccccgcggactggccaccgaatccggaagctagaccagatccagagcgggggcaattacgtggctggaggccaggaagccttcaagaaactcaagtgagtcggtctcccccaccgcccacccatttaggtgccctatagtgtggggttgatatgaagaaatgcagatccctacccccccacacctcagtggttgaggggctgtgacttctcggtgtgattgatgcccctcaaaactctcgttgcagttggggggtagaggttgacactgtgactggagaaggaatttcacttgggtcagcagtaggagtaaacttaaaatctgtgtataaacaacaggaatcttaaagaaaataaaaaggtatccttgcaaaggttagtgacc

SEQ ID NO: 3786 - protein, 75 aa, Homo sapiens
MRHHAQEAIPRPGCGEAAGTAEVPPDAKQRAEAAASGEDERQQRQVQPPVSARREERACVPQRGPLLRGAPRRHP

SEQ ID NO: 3787 - DNA, 3933 bp, Homo sapiens
cgcggcacgccccgcgcatgcctggtgcacagagtctgcaggtcgggcggtagcgacaggtcagagctgcggcctgagcagccagcgtccggcatgaaggtctggggtctggctgctgcctgcttcttgctccagcaccatggaatgcctgcgcagtttaccctgcctcctgccccgcgcgatgagacttccccggcggacgctgtgtgccctggccttggacgtgacctctgtgggtcctcccgttgctgcctgcggccgccgagccaacctgattggaaggagccgagcggcgcagctttgcgggcccgaccggctccgcgtggcaggtgaagtgcaccggtttagaacctctgacgtctctcaagccactttagccagtgtagccccagtatttactgtgacaaaatttgacaaacagggaaacgttacttcttttgtatttgaaagctgtgataactccagagtgtcttctgatattagattatcgtaatttaaacttagagcaatggctgttccgggaactcccttcacagttgtctggagagggtcaactcgttacataccctttaccttttgagtttagagctatagaagcactcctgcaatattggatcaacacccttcaggggaaacttagcattttgcagccactgatccttgagaccttggatgctttggtggaccccaaacattcttctgtagacagaagcaaactgcacattttactacagaatggcaaaagtctatcagagttagaaacagatattaaaattttcaaagagtcaattttggagatcttggatgaggaagagttgctagaagagctctgtgtatcaaaatggagtgacccacaagtctttgaaaagagcagtgctgggattgaccatgcagaagagatggagttgctgttggaaaactactaccgattggctgacgatctctccaatgcagctcgtgagcttagggtgctgattgatgattcacaaagtattattttcattaatctggacagccaccgaaacgtgatgatgaggttgaatctacagctgaccatgggaaccttctctctttcgctctttggactaatgggagttgcttttggaatgaatttggaatcttcccttgaagaggtgagaatgtattattatttctaaaacttgggggttttggccgggcatggtggctcatgtcagtaatcctagcactttaggaggctgaggcaggtggatcacctgaggtcaggagtttgagaccaacctggccaacatggcgaaaccctgtctctactaaaaatacaaaaattagacaggcacggtggcaggcacctgtaatcccagctacttgggaggctgaggcaggagaatcacttgaacccgggaggcggaggttgcagtgagctgagatcgcgccgttgcactccagcctgggagacagagtgagactctgtctccaaaaaaaaagattgggttttgaagatcgatatttttaatggatttaaaaaataaaggctgggcaccttggctcaacgcctgtaatcccagcactttgggaggctgaggcaggtagatcacgaggtcaggagatcgaggccatcctggctaacccggtgaaaccctgtctctactaaaaatacaaaaaattagccgggcgtggtggcagacgcctgtagtcccagctactccggaggctgaggcaggagaatggcatgaacctgggaggcggagcttgcagtgagccaggatcacaccactgcactccagcctgggcgacaggacagagtgagactctgtctcaaaaaataaataaataaaaagtctaacctgtaaactaccatggtgaaataaaatatataatgtaactcacaattcaggcagtactgttggaccatgttataacctagataaatacagcctaggttactttgtttcccaaaacatataattacagatgggaaaggtgtgataaaacagtgtctctgtgaagcagtgttaatgaagagtttttattttttaattcttacatgtctggcaacgtaccaggcggtttgcatactttatttggctcaatcattgcaactctgaaaatagatatattatccctactttgtagatgagaagactgaggctcagaacatttaacttgcccacaggcatagagctggaaaaataacagaattaggacatgaccccaaagacttgcactttctactgctctgttgcctttctgtattaagataatacttaactcccagagtttttcatttcactgtggttttgtacagtcatccctcagtatccaagaagaattggttacaggatccccacagataccaaagtctgtgggtattcaagtctctgatataaaatgacccagtacagtcaaccttgcatatctgcagatacagaacccactgactgtgttttcacagaatagcttattgtaagttttctagaactgaacctggatgtgcatctggcacagtgtgatgctggattctgtgtcctcattagtctaacgagtctactctgttgcccacatcacctcccattaggaccactatgcccttttaaaaagtggtctttataagatgtaagtattatgacacccttctgcatacaactattcaatggcttttgattagccttaggataaaaatcccgtcctgccgcaccgacttgtccatcttgtgggtagccacttgttactacctctctcagtgtccttcccagacatgctgcttccactcctctcccctcagatccccgttttgcttagttacttcctcctcatctttcaggtctcaaagtagttgtcccttcactgaatgcaccgacaacctggcccagtaaagttactttgtcgtctgcgcccaaataatcctacccttccatctgctacattccttaaatctgcaatcccttgttcaaagcctgcaaaagagcatgagctccttgaagcaaagacagtattagtcatttttaatgtaaagtataaaagaaaaggaaatacatgtgttcattcatctcacaaatacgtttttttattgcctgttatataccaagcactgctttaggcccatttagcagtgagtctgcccttgcgtaggttatattgtagtggaggagagagttcataaacaaacaaagtatgttaagtgctaagtgcctcagagaaaaataaagccagagaagcggatagagaatgttaggcagtaggatgtgtggcattttagagatagggtggtcaaggaagatgtaaggcggtaacaccctggtggaggcaggaagatctgggggagagtgttctaagtagagggaaccacagaagtaaagattgaggcaggaacgatctgagcttgttcatgaaatggcaagaaggttggaatggttagaagagcatgagtcaggtggaaaatgaggtcccagatgcagataagtatgatcatgtcagtgacgtagagcgtggtaggggtttggatttctaagtgggataggaacccactggaggtttgaactcaaatctagatcattggaaagttcagaagcaagcagaataccttgtgcaacataatccagccattgacattctcaaaagatacatccaaagacctttacagattccctaagtgtgactacaggactttctctacaagtccctgtcttttctctaaatacataatcatgtttatgtatatatactcaatctacaagctaactccattttatactttgatatttttctctcacttaattgccaacttttcaaaacaatggaagatttttcaaattcctttcttatagttttagtatgtgcaatcctaggtacagcacagcccatttgtaatgagataagagtggtaggtggtagtgagctacgcttgctcagtagtaggctgaaaagattcaaattaatgtcttatcagaattacaa

SEQ ID NO: 3788 - protein, 117 aa, Homo sapiens
MECLRSLPCLLPRAMRLPRRTLCALALDVTSVGPPVAACGRRANLIGRSRAAQLCGPDRLRVAGEVHRFRTSDVSQATLASVAPVFTVTKFDKQGNVTSFVFESCDNSRVSSDIRLS

SEQ ID NO: 3789 - DNA, 1788 bp, Homo sapiens
cgcggcacgccccgcgcatgcctggtgcacagagtctgcaggtcgggcggtagcgacaggtcagagctgcggcctgagcagccagcgtccggcatgaaggtctggggtctggctgctgcctgcttcttgctccagcaccatggaatgcctgcgcagtttaccctgcctcctgccccgcgcgatgagacttccccggcggacgctgtgtgccctggccttggacgtgacctctgtgggtcctcccgttgctgcctgcggccgccgagccaacctgattggaaggagccgagcggcgcagctttgcgggcccgaccggctccgcgtggcaggtgaagtgcaccggtttagaacctctgacgtctctcaagccactttagccagtgtagccccagtatttactgtgacaaaatttgacaaacagggaaacgttacttcttttgaaaggaagaaaactgaattataccaagagttaggtcttcaagccagagatttgagatttcagcatgtaatgagtatcacagtcagaaacaataggattatcatgagaatggagtatttgaaagctgtgataactccagagtgtcttctgatattagattatcgtaatttaaacttagagcaatggctgttccgggaactcccttcacagttgtctggagagggtcaactcgttacataccctttaccttttgagtttagagctatagaagcactcctgcaatattggatcaacacccttcaggggaaacttagcattttgcagccactgatccttgagaccttggatgctttggtggaccccaaacattcttctgtagacagaagcaaactgcacattttactacagaatggcaaaagtctatcagagttagaaacagatattaaaattttcaaagagtcaattttggagatcttggatgaggaagagttgctagaagagctctgtgtatcaaaatggagtgacccacaagtctttgaaaagagcagtgctgggattgaccatgcagaagagatggagttgctgttggaaaactactaccgattggctgacgatctctccaatgcagctcgtgagcttagggtgctgattgatgattcacaaagtattattttcattaatctggacagccaccgaaacgtgatgatgaggttgaatctacagctgaccatgggaaccttctctctttcgctctttggactaatgggagttgcttttggaatgaatttggaatcttcccttgaagaggaccatagaattttttggctgattacaggaattatgttcatgggaagtggcctcatctggaggcgcctgctttcattccttggacgacagctagaagctccattgcctcctatggtatgaaggatatggttcacggcggtattgtggaagggttatgatcatgggccctaaagtcagagcgcctgggattaagttgtcacaggcactatggcccttgcgagttgctttctcaaacttccttcagtttccctatctgtcagttaagtcggtattacctgcttcatagggttatgggaagaattaaacaatatgtgtaaagcacttactagcacactgcctaacacaataagttagaaatataatttgtgtagaactctgacaacatacatttaaacagatgttagtaattctggtataaggtttgtcataaccaaatggaaatgtaggaaacatttataacgttcttaaaagatagaaaattcacctccattttctttgtacttgaagatggcaccactggaataaatacttaagacactgat

SEQ ID NO: 3790 - protein, 408 aa, Homo sapiens
MECLRSLPCLLPRAMRLPRRTLCALALDVTSVGPPVAACGRRANLIGRSRAAQLCGPDRLRVAGEVHRFRTSDVSQATLASVAPVFTVTKFDKQGNVTSFERKKTELYQELGLQARDLRFQHVMSITVRNNRIIMRMEYLKAVITPECLLILDYRNLNLEQWLFRELPSQLSGEGQLVTYPLPFEFRAIEALLQYWINTLQGKLSILQPLILETLDALVDPKHSSVDRSKLHILLQNGKSLSELETDIKIFKESILEILDEEELLEELCVSKWSDPQVFEKSSAGIDHAEEMELLLENYYRLADDLSNAARELRVLIDDSQSIIFINLDSHRNVMMRLNLQLTMGTFSLSLFGLMGVAFGMNLESSLEEDHRIFWLITGIMFMGSGLIWRRLLSFLGRQLEAPLPPMV

SEQ ID NO: 3791 - DNA, 2572 bp, Homo sapiens
cgcggcacgccccgcgcatgcctggtgcacagagtctgcaggtcgggcggtagcgacaggtcagagctgcggcctgagcagccagcgtccggcatgaaggtctggggtctggctgctgcctgcttcttgctccagcaccatggaatgcctgcgcagtttaccctgcctcctgccccgcgcgatgagacttccccggcggacgctgtgtgccctggccttggacgtgacctctgtgggtcctcccgttgctgcctgcggccgccgagccaacctgattggaaggagccgagcggcgcagctttgcgggcccgaccggctccgcgtggcaggtgaagtgcaccggtttagaacctctgacgtctctcaagccactttagccagtgtagccccagtatttactgtgacaaaatttgacaaacagggaaacgttacttcttttgaaaggaagaaaactgaattataccaagagttaggtcttcaagccagagatttgagatttcagcatgtaatgagtatcacagtcagaaacaataggattatcatgagaatggagtatttgaaagctgtgataactccagagtgtcttctgatattagattatcgtaatttaaacttagagcaatggctgttccgggaactcccttcacagttgtctggagagggtcaactcgttacataccctttaccttttgagtttagagctatagaagcactcctgcaatattggatcaacacccttcaggggaaacttagcattttgcagccactgatccttgagaccttggatgctttggtggaccccaaacattcttctgtagacagaagcaaactgcacattttactacagaatggcaaaagtctatcagagttagaaacagatattaaaattttcaaagagtcaattttggagatcttggatgaggaagagttgctagaagagctctgtgtatcaaaatggagtgacccacaagtctttgaaaagagcagtgctgggattgaccatgcagaagagatggagttgctgttggaaaactactaccgattggctgacgatctctccaatgcagctcgtgagcttagggtgctgattgatgattcacaaagtattattttcattaatctggacagccaccgaaacgtgatgatgaggttgaatctacagctgaccatgggaaccttctctctttcgctctttggactaatgggagttgcttttggaatgaatttggaatcttcccttgaagaggaccatagaattttttggctgattacaggaattatgttcatgggaagtggcctcatctggaggcgcctgctttcattccttggacgacagctagaagctccattgcctcctatggtatgaaggatatggttcacggcggtattgtggaagggttatgatcatgggccctaaagtcagagcgcctgggattaagttgtcacaggcactatggcccttgcgagttgctttctcaaacttccttcagtttccctatctgtcagttaagtcggtattacctgcttcatagggttatgggaagaattaaacaatatgtgtaaagcacttactagcacactgcctaacacaataagttagaaatataatttgtgtagaactctgacaacatacatttaaacagatgttagtaattctggtataaggtttgtcataaccaaatggaaatgtaggaaacatttataacgttcttaaaagatagaaaattcacctccattttctttgtacttgaagatggcaccactggaataaatacttaagacactgatactgcttatagtcctttcttcactgagtagttacataatacatcattttactagtggcttttcttttaaaaaagatactaaaattaatacttctgctttatttagatggcttctttacctaaaaagactcttctggcagatagaagcatggaattgaaaaatagcctcagactggatggacttggatcaggaaggagcatcctaacaaaccgttaggaacagccccgtggatactgaagttttttttatggtagttacaggaaacttctgatactctttttattattttcttgtatagagtcagacacttgaaaaaaactaatgtttgaagacaaaaatattttggcagtcacaataccagaactggattgcatttccagaattctgagttaaagaaacaaagtatttgctttgtaaaaggccaaaattctatttcctacaaactttaaatgctgtttttatagatgtgatatgaggcaacacaagcacagacagttgcatagattttaatttatacatatcaagaaaagtgcaatttcatgctgaatgaagcgtaggaacttgacaagcccataggtagctatagttctttgtcagtatagggaattatgttcatgtgaatttcctgattctcaggtgactaaaaagctagcattctatgtattaaccttacaacagactctgtaagtttgagctttaaaaaccaaactttgacataaccttatttcttgtatttgcccccttttttttataaaaggtgaataaaaagaaataatttaatatc

SEQ ID NO: 3792 - protein, 408 aa, Homo sapiens; identical to SEQ ID NO: 3790

SEQ ID NO: 3793 - DNA, 2039 bp, Homo sapiens
cgcggcacgccccgcgcatgcctggtgcacagagtctgcaggtcgggcggtagcgacaggtcagagctgcggcctgagcagccagcgtccggcatgaaggtctggggtctggctgctgcctgcttcttgctccagcaccatggaatgcctgcgcagtttaccctgcctcctgccccgcgcgatgagacttccccggcggacgctgtgtgccctggccttggacgtgacctctgtgggtcctcccgttgctgcctgcggccgccgagccaacctgattggaaggagccgagcggcgcagctttgcgggcccgaccggctccgcgtggcaggtgaagtgcaccggtttagaacctctgacgtctctcaagccactttagccagtgtagccccagtatttactgtgacaaaatttgacaaacagggaaacgttacttcttttgaaaggaagaaaactgaattataccaagagttaggtcttcaagccagagatttgagatttcagcatgtaatgagtatcacagtcagaaacaataggattatcatgagaatggagtatttgaaagctgtgataactccagagtgtcttctgatattagattatcgtaatttaaacttagagcaatggctgttccgggaactcccttcacagttgtctggagagggtcaactcgttacataccctttaccttttgagtttagagctatagaagcactcctgcaatattggatcaacacccttcaggggaaacttagcattttgcagccactgatccttgagaccttggatgctttggtggaccccaaacattcttctgtagacagaagcaaactgcacattttactacagaatggcaaaagtctatcagagttagaaacagatattaaaattttcaaagagtcaattttggagatcttggatgaggaagagttgctagaagagctctgtgtatcaaaatggagtgacccacaagtctttgaaaagagcagtgctgggattgaccatgcagaagagatggagttgctgttggaaaactactaccgattggctgacgatctctccaatgcagctcgtgagcttagggtgctgattgatgattcacaaagtattattttcattaatctggacagccaccgaaacgtgatgatgaggttgaatctacagctgaccatgggaaccttctctctttcgctctttggactaatgggagttgcttttggaatgaatttggaatcttcccttgaagaggaccatagaattttttggctgattacaggaattatgttcatgggaagtggcctcatctggaggcgcctgctttcattccttggacgacagctagaagctccattgcctcctatgatggcttctttacctaaaaagactcttctggcagatagaagcatggaattgaaaaatagcctcagactggatggacttggatcaggaaggagcatcctaacaaaccgttaggaacagccccgtggatactgaagttttttttatggtagttacaggaaacttctgatactctttttattattttcttgtatagagtcagacacttgaaaaaaactaatgtttgaagacaaaaatattttggcagtcacaataccagaactggattgcatttccagaattctgagttaaagaaacaaagtatttgctttgtaaaaggccaaaattctatttcctacaaactttaaatgctgtttttatagatgtgatatgaggcaacacaagcacagacagttgcatagattttaatttatacatatcaagaaaagtgcaatttcatgctgaatgaagcgtaggaacttgacaagcccataggtagctatagttctttgtcagtatagggaattatgttcatgtgaatttcctgattctcaggtgactaaaaagctagcattctatgtattaaccttacaacagactctgtaagtttgagctttaaaaaccaaactttgacataaccttatttcttgtatttgcccccttttttttataaaaggtgaataaaaagaaataatttaatatc

SEQ ID NO: 3794 - protein, 443 aa, Homo sapiens; identical to SEQ ID NO: 420

SEQ ID NO: 3795 - DNA, 3891 bp, Homo sapiens
cgcggcacgccccgcgcatgcctggtgcacagagtctgcaggtcgggcggtagcgacaggtcagagctgcggcctgagcagccagcgtccggcatgaaggtctggggtctggctgctgcctgcttcttgctccagcaccatggaatgcctgcgcagtttaccctgcctcctgccccgcgcgatgagacttccccggcggacgctgtgtgccctggccttggacgtgacctctgtgggtcctcccgttgctgcctgcggccgccgagccaacctgattggaaggagccgagcggcgcagctttgcgggcccgaccggctccgcgtggcaggtgaagtgcaccggtttagaacctctgacgtctctcaagccactttagccagtgtagccccagtatttactgtgacaaaatttgacaaacagggaaacgttacttcttttgaaaggaagaaaactgaattataccaagagttaggtcttcaagccagagatttgagatttcagcatgtaatgagtatcacagtcagaaacaataggattatcatgagaatggagtatttgaaagctgtgataactccagagtgtcttctgatattagattatcgtaatttaaacttagagcaatggctgttccgggaactcccttcacagttgtctggagagggtcaactcgttacataccctttaccttttgagtttagagctatagaagcactcctgcaatattggatcaacacccttcaggggaaacttagcattttgcagccactgatccttgagaccttggatgctttggtggaccccaaacattcttctgtagacagaagcaaactgcacattttactacagaatggcaaaagtctatcagagttagaaacagatattaaaattttcaaagagtcaattttggagatcttggatgaggaagagttgctagaagagctctgtgtatcaaaatggagtgacccacaagtctttgaaaagagcagtgctgggattgaccatgcagaagagatggagttgctgttggaaaactactaccgattggctgacgatctctccaatgcagctcgtgagcttagggtgctgattgatgattcacaaagtattattttcattaatctggacagccaccgaaacgtgatgatgaggttgaatctacagctgaccatgggaaccttctctctttcgctctttggactaatgggagttgcttttggaatgaatttggaatcttcccttgaagaggaccatagaattttttggctgattacaggaattatgttcatgggaagtggcctcatctggaggcgcctgctttcattccttggacgacagctagaagctccattgcctcctatggtatgaaggatatggttcacggcggtattgtggaagggttatgatcatgggccctaaagtcagagcgcctgggattaagttgtcacaggcactatggcccttgcgagttgctttctcaaacttccttcagtttccctatctgtcagttaagtcggtattacctgcttcatagggttatgggaagaattaaacaatatgtgtaaagcacttactagcacactgcctaacacaataagttagaaatataatttgtgtagaactctgacaacatacatttaaacagatgttagtaattctggtataaggtttgtcataaccaaatggaaatgtaggaaacatttataacgttcttaaaagatagaaaattcacctccattttctttgtacttgaagatggcaccactggaataaatacttaagacactgatactgcttatagtcctttcttcactgagtagttacataatacatcattttactagtggcttttcttttaaaaaagatactaaaattaatacttctgctttatttagatggcttctttacctaaaaagactcttctggcagatagaagcatggaattgaaaaatagcctcagactggatggacttggatcaggaaggagcatcctaacaaaccgttaggaacagccccgtggatactgaagttttttttatggtagttacaggaaacttctgatactctttttattattttcttgtatagagtcagacacttgaaaaaaactaatgtttgaagacaaaaatattttggcagtcacaataccagaactggattgcatttccagaattctgagttaaagaaacaaagtatttgctttgtaaaaggccaaaattctatttcctacaaactttaaatgctgtttttatagatgtgatatgaggcaacacaagcacagacagttgcatagattttaatttatacatatcaagaaaagtgcaatttcatgctgaatgaagcgtaggaacttgacaagcccataggtagctatagttctttgtcagtatagggaattatgttcatgtgaatttcctgattctcaggtgactaaaaagctagcattctatgtattaaccttacaacagactctgtaagtttgagctttaaaaaccaaactttgacataaccttatttcttgtatttgcccccttttttttataaaaggtgaataaaaagaaataatttaatatcaccattgtatggattcctaatcaagatttcacgttctcagcccctgagactagttttctttgctctctgtaattagagcctttggaagcaaagttgaaaggaagtatttccattctgttactgttttgtagcactttgtccatttattgatttttaaagtagatatttagataccacccctgccctgccccaaaaagaaaaatgtttattgtcctgctaatctatatgcctacacctcagaagctgacagatgagcttcctaaaacatgaggatgaataaatgttagaactgtgatatcttctcatttccacagagatttgggtttaaaacaaatggctaatatttgtaagcctgaaagctgccatcctctttaacatcctacctaccttttaaaatattttctggaggttaagtacagttaggcactagaacatttgttaagcctcccaaagtagtgtgcatggaagattctagagtgtccagctcttgcactacaaatgtaataataacagaataaatacacttaccctgatgatattgagggtacatgattagcctaatgtgatgtcatatgaggaagtttaggagtccatttttcaggtggtttggtgataggaataaaaatgttactcccgtcgctgatttggaagaaaaccgatgaagtacaagtaaggtttccccactcctgtgtgtggtcatgggaagccattagagggaagctgcagaacagaatggaacaggacaggctgggctagactcgagcacgcagtggcccctgtgccaccacactgtgggtcaggaacacgcgtcatggtgttcttgtcggaatgtgaacatacagcaccctctagcattacgaatctcttaggatttttaagattgtatttgataatacttatatttcacagggcacacttttggcacacctcagagcacactgctgctattttgggtcgtatcactgtaaaatacataataagtactacttaactgtgacatgaagaattggaatcccagagggcaacatttgatttgactaagatcaggcataagatagaatttttgtcatttttccttgcagttttattgacttagtttatgagcttggataaaataattttttgatgaatcatgtcaataaaaggaaaaataatgtaactacctcataagtctgataaaaggaagttgctagtgttttatagaatttctgaaggtggttaaatcaagtatgatttcaaaatatcaactagttccacttttgtgattgcaggatgcttcttatactaaagttctcataaataataaatcagcttatgcc

SEQ ID NO: 3796 - protein, 408 aa, Homo sapiens; identical to SEQ ID NO: 3790

SEQ ID NO: 3797 - DNA, 3358 bp, Homo sapiens
cgcggcacgccccgcgcatgcctggtgcacagagtctgcaggtcgggcggtagcgacaggtcagagctgcggcctgagcagccagcgtccggcatgaaggtctggggtctggctgctgcctgcttcttgctccagcaccatggaatgcctgcgcagtttaccctgcctcctgccccgcgcgatgagacttccccggcggacgctgtgtgccctggccttggacgtgacctctgtgggtcctcccgttgctgcctgcggccgccgagccaacctgattggaaggagccgagcggcgcagctttgcgggcccgaccggctccgcgtggcaggtgaagtgcaccggtttagaacctctgacgtctctcaagccactttagccagtgtagccccagtatttactgtgacaaaatttgacaaacagggaaacgttacttcttttgaaaggaagaaaactgaattataccaagagttaggtcttcaagccagagatttgagatttcagcatgtaatgagtatcacagtcagaaacaataggattatcatgagaatggagtatttgaaagctgtgataactccagagtgtcttctgatattagattatcgtaatttaaacttagagcaatggctgttccgggaactcccttcacagttgtctggagagggtcaactcgttacataccctttaccttttgagtttagagctatagaagcactcctgcaatattggatcaacacccttcaggggaaacttagcattttgcagccactgatccttgagaccttggatgctttggtggaccccaaacattcttctgtagacagaagcaaactgcacattttactacagaatggcaaaagtctatcagagttagaaacagatattaaaattttcaaagagtcaattttggagatcttggatgaggaagagttgctagaagagctctgtgtatcaaaatggagtgacccacaagtctttgaaaagagcagtgctgggattgaccatgcagaagagatggagttgctgttggaaaactactaccgattggctgacgatctctccaatgcagctcgtgagcttagggtgctgattgatgattcacaaagtattattttcattaatctggacagccaccgaaacgtgatgatgaggttgaatctacagctgaccatgggaaccttctctctttcgctctttggactaatgggagttgcttttggaatgaatttggaatcttcccttgaagaggaccatagaattttttggctgattacaggaattatgttcatgggaagtggcctcatctggaggcgcctgctttcattccttggacgacagctagaagctccattgcctcctatgatggcttctttacctaaaaagactcttctggcagatagaagcatggaattgaaaaatagcctcagactggatggacttggatcaggaaggagcatcctaacaaaccgttaggaacagccccgtggatactgaagttttttttatggtagttacaggaaacttctgatactctttttattattttcttgtatagagtcagacacttgaaaaaaactaatgtttgaagacaaaaatattttggcagtcacaataccagaactggattgcatttccagaattctgagttaaagaaacaaagtatttgctttgtaaaaggccaaaattctatttcctacaaactttaaatgctgtttttatagatgtgatatgaggcaacacaagcacagacagttgcatagattttaatttatacatatcaagaaaagtgcaatttcatgctgaatgaagcgtaggaacttgacaagcccataggtagctatagttctttgtcagtatagggaattatgttcatgtgaatttcctgattctcaggtgactaaaaagctagcattctatgtattaaccttacaacagactctgtaagtttgagctttaaaaaccaaactttgacataaccttatttcttgtatttgcccccttttttttataaaaggtgaataaaaagaaataatttaatatcaccattgtatggattcctaatcaagatttcacgttctcagcccctgagactagttttctttgctctctgtaattagagcctttggaagcaaagttgaaaggaagtatttccattctgttactgttttgtagcactttgtccatttattgatttttaaagtagatatttagataccacccctgccctgccccaaaaagaaaaatgtttattgtcctgctaatctatatgcctacacctcagaagctgacagatgagcttcctaaaacatgaggatgaataaatgttagaactgtgatatcttctcatttccacagagatttgggtttaaaacaaatggctaatatttgtaagcctgaaagctgccatcctctttaacatcctacctaccttttaaaatattttctggaggttaagtacagttaggcactagaacatttgttaagcctcccaaagtagtgtgcatggaagattctagagtgtccagctcttgcactacaaatgtaataataacagaataaatacacttaccctgatgatattgagggtacatgattagcctaatgtgatgtcatatgaggaagtttaggagtccatttttcaggtggtttggtgataggaataaaaatgttactcccgtcgctgatttggaagaaaaccgatgaagtacaagtaaggtttccccactcctgtgtgtggtcatgggaagccattagagggaagctgcagaacagaatggaacaggacaggctgggctagactcgagcacgcagtggcccctgtgccaccacactgtgggtcaggaacacgcgtcatggtgttcttgtcggaatgtgaacatacagcaccctctagcattacgaatctcttaggatttttaagattgtatttgataatacttatatttcacagggcacacttttggcacacctcagagcacactgctgctattttgggtcgtatcactgtaaaatacataataagtactacttaactgtgacatgaagaattggaatcccagagggcaacatttgatttgactaagatcaggcataagatagaatttttgtcatttttccttgcagttttattgacttagtttatgagcttggataaaataattttttgatgaatcatgtcaataaaaggaaaaataatgtaactacctcataagtctgataaaaggaagttgctagtgttttatagaatttctgaaggtggttaaatcaagtatgatttcaaaatatcaactagttccacttttgtgattgcaggatgcttcttatactaaagttctcataaataataaatcagcttatgcc

SEQ ID NO: 3798 - protein, 443 aa, Homo sapiens; identical to SEQ ID NO: 420

SEQ ID NO: 3799 - DNA, 5819 bp, Homo sapiens
cgcggcacgccccgcgcatgcctggtgcacagagtctgcaggtcgggcggtagcgacaggtcagagctgcggcctgagcagccagcgtccggcatgaaggtctggggtctggctgctgcctgcttcttgctccagcaccatggaatgcctgcgcagtttaccctgcctcctgccccgcgcgatgagacttccccggcggacgctgtgtgccctggccttggacgtgacctctgtgggtcctcccgttgctgcctgcggccgccgagccaacctgattggaaggagccgagcggcgcagctttgcgggcccgaccggctccgcgtggcaggtgaagtgcaccggtttagaacctctgacgtctctcaagccactttagccagtgtagccccagtatttactgtgacaaaatttgacaaacagggaaacgttacttcttttgaaaggaagaaaactgaattataccaagagttaggtcttcaagccagagatttgagatttcagcatgtaatgagtatcacagtcagaaacaataggattatcatgagaatggagtatttgaaagctgtgataactccagagtgtcttctgatattagattatcgtaatttaaacttagagcaatggctgttccgggaactcccttcacagttgtctggagagggtcaactcgttacataccctttaccttttgagtttagagctatagaagcactcctgcaatattggatcaacacccttcaggggaaacttagcattttgcagccactgatccttgagaccttggatgctttggtggaccccaaacattcttctgtagacagaagcaaactgcacattttactacagaatggcaaaagtctatcagagttagaaacagatattaaaattttcaaagagtcaattttggagatcttggatgaggaagagttgctagaagagctctgtgtatcaaaatggagtgacccacaagtctttgaaaagagcagtgctgggattgaccatgcagaagagatggagttgctgttggaaaactactaccgattggctgacgatctctccaatgcagctcgtgagcttagggtgctgattgatgattcacaaagtattattttcattaatctggacagccaccgaaacgtgatgatgaggttgaatctacagctgaccatgggaaccttctctctttcgctctttggactaatgggagttgcttttggaatgaatttggaatcttcccttgaagaggaccatagaattttttggctgattacaggaattatgttcatgggaagtggcctcatctggaggcgcctgctttcattccttggacgacagctagaagctccattgcctcctatggtatgaaggatatggttcacggcggtattgtggaagggttatgatcatgggccctaaagtcagagcgcctgggattaagttgtcacaggcactatggcccttgcgagttgctttctcaaacttccttcagtttccctatctgtcagttaagtcggtattacctgcttcatagggttatgggaagaattaaacaatatgtgtaaagcacttactagcacactgcctaacacaataagttagaaatataatttgtgtagaactctgacaacatacatttaaacagatgttagtaattctggtataaggtttgtcataaccaaatggaaatgtaggaaacatttataacgttcttaaaagatagaaaattcacctccattttctttgtacttgaagatggcaccactggaataaatacttaagacactgatactgcttatagtcctttcttcactgagtagttacataatacatcattttactagtggcttttcttttaaaaaagatactaaaattaatacttctgctttatttagatggcttctttacctaaaaagactcttctggcagatagaagcatggaattgaaaaatagcctcagactggatggacttggatcaggaaggagcatcctaacaaaccgttaggaacagccccgtggatactgaagttttttttatggtagttacaggaaacttctgatactctttttattattttcttgtatagagtcagacacttgaaaaaaactaatgtttgaagacaaaaatattttggcagtcacaataccagaactggattgcatttccagaattctgagttaaagaaacaaagtatttgctttgtaaaaggccaaaattctatttcctacaaactttaaatgctgtttttatagatgtgatatgaggcaacacaagcacagacagttgcatagattttaatttatacatatcaagaaaagtgcaatttcatgctgaatgaagcgtaggaacttgacaagcccataggtagctatagttctttgtcagtatagggaattatgttcatgtgaatttcctgattctcaggtgactaaaaagctagcattctatgtattaaccttacaacagactctgtaagtttgagctttaaaaaccaaactttgacataaccttatttcttgtatttgcccccttttttttataaaaggtgaataaaaagaaataatttaatatcaccattgtatggattcctaatcaagatttcacgttctcagcccctgagactagttttctttgctctctgtaattagagcctttggaagcaaagttgaaaggaagtatttccattctgttactgttttgtagcactttgtccatttattgatttttaaagtagatatttagataccacccctgccctgccccaaaaagaaaaatgtttattgtcctgctaatctatatgcctacacctcagaagctgacagatgagcttcctaaaacatgaggatgaataaatgttagaactgtgatatcttctcatttccacagagatttgggtttaaaacaaatggctaatatttgtaagcctgaaagctgccatcctctttaacatcctacctaccttttaaaatattttctggaggttaagtacagttaggcactagaacatttgttaagcctcccaaagtagtgtgcatggaagattctagagtgtccagctcttgcactacaaatgtaataataacagaataaatacacttaccctgatgatattgagggtacatgattagcctaatgtgatgtcatatgaggaagtttaggagtccatttttcaggtggtttggtgataggaataaaaatgttactcccgtcgctgatttggaagaaaaccgatgaagtacaagtaaggtttccccactcctgtgtgtggtcatgggaagccattagagggaagctgcagaacagaatggaacaggacaggctgggctagactcgagcacgcagtggcccctgtgccaccacactgtgggtcaggaacacgcgtcatggtgttcttgtcggaatgtgaacatacagcaccctctagcattacgaatctcttaggatttttaagattgtatttgataatacttatatttcacagggcacacttttggcacacctcagagcacactgctgctattttgggtcgtatcactgtaaaatacataataagtactacttaactgtgacatgaagaattggaatcccagagggcaacatttgatttgactaagatcaggcataagatagaatttttgtcatttttccttgcagttttattgacttagtttatgagcttggataaaataattttttgatgaatcatgtcaataaaaggaaaaataatgtaactacctcataagtctgataaaaggaagttgctagtgttttatagaatttctgaaggtggttaaatcaagtatgatttcaaaatatcaactagttccacttttgtgattgcaggatgcttcttatactaaagttctcataaataataaatcagcttatgccaaaaatatatgaagttccttggttttaaattttgaactaaaatggactgagcacattaattactgtttgaaagtaggtaccaaacactgggttatgtgagtgagtaagcaatcatatcgcctgtcaaacacatcaagtgtcgaacacgtcaaggtgtgatactgtctttggaaggctcctaaacaaatgtgagcacaattattaacaccttattcttcatgaacacagactgttaagcagcactaaccaattttatattaaaaagctatttattttggtgagttattccaagagttgtatacagctttattttttggaattgcaatattaaagttgcacgttggatttaactctcatgactttagtaatacctacagaggtgagctaatggatggtacatggagtagggactgcagagaccctagttttgtccccactccatcttcaaataattttggtctcttaggtctgtgatacaaaggcataaaacaattcctatcttgaagccttgagaaaagctgttacatatacgcagatagtagcaagacagaaaatgcaaatatgtaaatgtcttctgatatcttgaaataaagataaatttcagttaaacttgtataagttcagatttctgttaatgagaaattacaaccctacaaggtaaggtctttacattttagttattaagcagaatcaatgcttaaaactatagttaatacttagtggaaagaaaatttaatccatgtatcaggataatatattagactgtcatgcattaattttttcctgtatgccaggttttttacatacgtgccatatcagttgaccttttacagtaggagtataatttacattgtttttgacattggggttagtatggttaaatgtcctataaacttgaagcttgcttccatttttgtgggtcttaacctccacctggtgcttgctattgggtgtattcaggcattgagaaaaatataaatcgtgaggtaaataatggtcatgtttaaacagaggccttatcatttagtgaagcataaaaactgacactatataaatgcatccgtctaatgaaaagacccagtactgagaaaaacatccctttactcaagtgtcagatgtcagagtgctctaactgctcaactcataagtgaatacaactaagtaatttctggtcccctaaaaataaccatccttttaattaaaagtaattcttcagataggttgggctaccaataattgtccctaaacaaaaccaaatggcgcttccttgtgcttttgctgtgccataggttactatgcagctagcacatgtacctcttccagaaaaatgaggtcatcctgggagtgacccagagatgctctctagggatgtacctcttgatgttcttgttaactttccactcttcagctggattcctcttcctgtccccttttcaccagtctctactcttgagagaagctgagaagagaagggctcttctcatttgttattttctcctgcttttagtatcatctcacccgtggcagaagaaagaggttcttcccaatttaacacaaaataaactagttactgtttacagataatgcccgctaatgtttactgaaactgaaaccctatgatacattccattcccttaagtgtgccacgctgcaggactgacaaatgaaatccatcctacgaaaaacagcccaggaacaagcgaggccaaggcctgctttcctctccggcccttacagtagcgtgtggctcaggccacatcttttccctctagttcttttggcacaagttgtaacctaatgcgacaaaggtccctcatgagatggcttaaaactagcagtgtcgctaggctctttaggtgttagaacagccaactctacaaaagtattggagggcacagaagggtgatagtcttggtttttatatttgt

SEQ ID NO: 3800 - protein, 408 aa, Homo sapiens; identical to SEQ ID NO: 3790

SEQ ID NO: 3801 - DNA, 5286 bp, Homo sapiens
cgcggcacgccccgcgcatgcctggtgcacagagtctgcaggtcgggcggtagcgacaggtcagagctgcggcctgagcagccagcgtccggcatgaaggtctggggtctggctgctgcctgcttcttgctccagcaccatggaatgcctgcgcagtttaccctgcctcctgccccgcgcgatgagacttccccggcggacgctgtgtgccctggccttggacgtgacctctgtgggtcctcccgttgctgcctgcggccgccgagccaacctgattggaaggagccgagcggcgcagctttgcgggcccgaccggctccgcgtggcaggtgaagtgcaccggtttagaacctctgacgtctctcaagccactttagccagtgtagccccagtatttactgtgacaaaatttgacaaacagggaaacgttacttcttttgaaaggaagaaaactgaattataccaagagttaggtcttcaagccagagatttgagatttcagcatgtaatgagtatcacagtcagaaacaataggattatcatgagaatggagtatttgaaagctgtgataactccagagtgtcttctgatattagattatcgtaatttaaacttagagcaatggctgttccgggaactcccttcacagttgtctggagagggtcaactcgttacataccctttaccttttgagtttagagctatagaagcactcctgcaatattggatcaacacccttcaggggaaacttagcattttgcagccactgatccttgagaccttggatgctttggtggaccccaaacattcttctgtagacagaagcaaactgcacattttactacagaatggcaaaagtctatcagagttagaaacagatattaaaattttcaaagagtcaattttggagatcttggatgaggaagagttgctagaagagctctgtgtatcaaaatggagtgacccacaagtctttgaaaagagcagtgctgggattgaccatgcagaagagatggagttgctgttggaaaactactaccgattggctgacgatctctccaatgcagctcgtgagcttagggtgctgattgatgattcacaaagtattattttcattaatctggacagccaccgaaacgtgatgatgaggttgaatctacagctgaccatgggaaccttctctctttcgctctttggactaatgggagttgcttttggaatgaatttggaatcttcccttgaagaggaccatagaattttttggctgattacaggaattatgttcatgggaagtggcctcatctggaggcgcctgctttcattccttggacgacagctagaagctccattgcctcctatgatggcttctttacctaaaaagactcttctggcagatagaagcatggaattgaaaaatagcctcagactggatggacttggatcaggaaggagcatcctaacaaaccgttaggaacagccccgtggatactgaagttttttttatggtagttacaggaaacttctgatactctttttattattttcttgtatagagtcagacacttgaaaaaaactaatgtttgaagacaaaaatattttggcagtcacaataccagaactggattgcatttccagaattctgagttaaagaaacaaagtatttgctttgtaaaaggccaaaattctatttcctacaaactttaaatgctgtttttatagatgtgatatgaggcaacacaagcacagacagttgcatagattttaatttatacatatcaagaaaagtgcaatttcatgctgaatgaagcgtaggaacttgacaagcccataggtagctatagttctttgtcagtatagggaattatgttcatgtgaatttcctgattctcaggtgactaaaaagctagcattctatgtattaaccttacaacagactctgtaagtttgagctttaaaaaccaaactttgacataaccttatttcttgtatttgcccccttttttttataaaaggtgaataaaaagaaataatttaatatcaccattgtatggattcctaatcaagatttcacgttctcagcccctgagactagttttctttgctctctgtaattagagcctttggaagcaaagttgaaaggaagtatttccattctgttactgttttgtagcactttgtccatttattgatttttaaagtagatatttagataccacccctgccctgccccaaaaagaaaaatgtttattgtcctgctaatctatatgcctacacctcagaagctgacagatgagcttcctaaaacatgaggatgaataaatgttagaactgtgatatcttctcatttccacagagatttgggtttaaaacaaatggctaatatttgtaagcctgaaagctgccatcctctttaacatcctacctaccttttaaaatattttctggaggttaagtacagttaggcactagaacatttgttaagcctcccaaagtagtgtgcatggaagattctagagtgtccagctcttgcactacaaatgtaataataacagaataaatacacttaccctgatgatattgagggtacatgattagcctaatgtgatgtcatatgaggaagtttaggagtccatttttcaggtggtttggtgataggaataaaaatgttactcccgtcgctgatttggaagaaaaccgatgaagtacaagtaaggtttccccactcctgtgtgtggtcatgggaagccattagagggaagctgcagaacagaatggaacaggacaggctgggctagactcgagcacgcagtggcccctgtgccaccacactgtgggtcaggaacacgcgtcatggtgttcttgtcggaatgtgaacatacagcaccctctagcattacgaatctcttaggatttttaagattgtatttgataatacttatatttcacagggcacacttttggcacacctcagagcacactgctgctattttgggtcgtatcactgtaaaatacataataagtactacttaactgtgacatgaagaattggaatcccagagggcaacatttgatttgactaagatcaggcataagatagaatttttgtcatttttccttgcagttttattgacttagtttatgagcttggataaaataattttttgatgaatcatgtcaataaaaggaaaaataatgtaactacctcataagtctgataaaaggaagttgctagtgttttatagaatttctgaaggtggttaaatcaagtatgatttcaaaatatcaactagttccacttttgtgattgcaggatgcttcttatactaaagttctcataaataataaatcagcttatgccaaaaatatatgaagttccttggttttaaattttgaactaaaatggactgagcacattaattactgtttgaaagtaggtaccaaacactgggttatgtgagtgagtaagcaatcatatcgcctgtcaaacacatcaagtgtcgaacacgtcaaggtgtgatactgtctttggaaggctcctaaacaaatgtgagcacaattattaacaccttattcttcatgaacacagactgttaagcagcactaaccaattttatattaaaaagctatttattttggtgagttattccaagagttgtatacagctttattttttggaattgcaatattaaagttgcacgttggatttaactctcatgactttagtaatacctacagaggtgagctaatggatggtacatggagtagggactgcagagaccctagttttgtccccactccatcttcaaataattttggtctcttaggtctgtgatacaaaggcataaaacaattcctatcttgaagccttgagaaaagctgttacatatacgcagatagtagcaagacagaaaatgcaaatatgtaaatgtcttctgatatcttgaaataaagataaatttcagttaaacttgtataagttcagatttctgttaatgagaaattacaaccctacaaggtaaggtctttacattttagttattaagcagaatcaatgcttaaaactatagttaatacttagtggaaagaaaatttaatccatgtatcaggataatatattagactgtcatgcattaattttttcctgtatgccaggttttttacatacgtgccatatcagttgaccttttacagtaggagtataatttacattgtttttgacattggggttagtatggttaaatgtcctataaacttgaagcttgcttccatttttgtgggtcttaacctccacctggtgcttgctattgggtgtattcaggcattgagaaaaatataaatcgtgaggtaaataatggtcatgtttaaacagaggccttatcatttagtgaagcataaaaactgacactatataaatgcatccgtctaatgaaaagacccagtactgagaaaaacatccctttactcaagtgtcagatgtcagagtgctctaactgctcaactcataagtgaatacaactaagtaatttctggtcccctaaaaataaccatccttttaattaaaagtaattcttcagataggttgggctaccaataattgtccctaaacaaaaccaaatggcgcttccttgtgcttttgctgtgccataggttactatgcagctagcacatgtacctcttccagaaaaatgaggtcatcctgggagtgacccagagatgctctctagggatgtacctcttgatgttcttgttaactttccactcttcagctggattcctcttcctgtccccttttcaccagtctctactcttgagagaagctgagaagagaagggctcttctcatttgttattttctcctgcttttagtatcatctcacccgtggcagaagaaagaggttcttcccaatttaacacaaaataaactagttactgtttacagataatgcccgctaatgtttactgaaactgaaaccctatgatacattccattcccttaagtgtgccacgctgcaggactgacaaatgaaatccatcctacgaaaaacagcccaggaacaagcgaggccaaggcctgctttcctctccggcccttacagtagcgtgtggctcaggccacatcttttccctctagttcttttggcacaagttgtaacctaatgcgacaaaggtccctcatgagatggcttaaaactagcagtgtcgctaggctctttaggtgttagaacagccaactctacaaaagtattggagggcacagaagggtgatagtcttggtttttatatttgt

SEQ ID NO: 3802 - protein, 443 aa, Homo sapiens; identical to SEQ ID NO: 420

SEQ ID NO: 3803 - DNA, 662 bp, Homo sapiens
cagccaccgaaacgtgatgatgaggttgaatctacagctgaccatgggaaccttctctctttcgctctttggactaatgggagttgcttttggaatgaatttggaatcttcccttgaagaggaccatagaattttttggctgattacaggaattatgttcatgggaagtggcctcatctggaggcgcctgctttcattccttggacgacagctagaagctccattgcctcctatggtatgaaggatatggttcacggcggtattgtggaagggttatgatcatgggccctaaagtcagagcgcctgggattaagttgtcacaggcactatggcccttgcgagttgctttctcaaacttccttcagtttccctatctgtcagttaagtcggtattacctgcttcatagggttatgggaagaattaaacaatatgtgtaaagcacttactagcacactgcctaacacaataagttagaaatataatttgtgtagaactctgacaacatacatttaaacagatgttagtaattctggtataaggtttgtcataaccaaatggaaatgtaggaaacatttataacgttcttaaaagatagaaaattcacctccattttctttgtacttgaagatggcaccactggaataaatacttaagacactga

SEQ ID NO: 3804 - protein, 74 aa, Homo sapiens
MMRLNLQLTMGTFSLSLFGLMGVAFGMNLESSLEEDHRIFWLITGIMFMGSGLIWRRLLSFLGRQLEAPLPPMV

SEQ ID NO: 3805 - DNA, 1900 bp, Homo sapiens
atcacaaagaaaatcttagatcacatattgcatataggactgggggttgtggttcacacctgtaatcccagcactttggtaggccaaggtgggcagatcactttaggccaggagttcgagaccagcctgaccaacatggtgaaaccccatctctactaaaaatacaaaaattagctgggcatggtgccgcacacctgtaatcccagctactcaggggggccgaggcacaagaatcgcttgaatcaggtagacggaggttgcagtgagccaagattgagccactggactccatcctgggtgaagagcaagactccatctcaacaacaacaaaaagaggaggcagatttctgttcaataagtgacatgcatttccatcagtgatagctgatcagttgtgtaacaggctatctttgaggaagtgagctctcaatcattggagccaatgataacagcatagctataaatgggattccttccttgtgagagattaaatttaaattctgtgattctgtacattaactaaaaacagtgtgctgcaaaatattaccactctgaaaatgacggtgaggaagaatgtttttctaagtctgaggttcccaaacttccttggatcacgatgcccttagtgtcttagtaattttttcacagtatcggaagacaaaaaatttattatgttacagattcctttatgttatttcccttgcaactttaaaatattctgaggtgctatcgtgcccagcatagcaccagacattcagctcacagtttgagaactgtggatataagcaaagaccttaaattgcgtgtcctctggcatcatgacttaagatttgcacgcatgtaaacaaaggctgcaaagaaacacaaagtaaaagcagtacatttggcatatagatgattttaaaatatttaaaaccttttaaatcatgttcttctcctgctttattctgtgggtgctatcaaggcccttgtttttcttagttcctttctacaggaaagagctgtacaaataacataaggctttcaaactctggggcagtaacaattcaaggaatcttctaaggaacctggcgttttgcgatggaaatgaactgtgttctcttttaggaccatagaattttttggctgattacaggaattatgttcatgggaagtggcctcatctggaggcgcctgctttcattccttggacgacagctagaagctccattgcctcctatgatggcttctttacctaaaaagactcttctggcagatagaagcatggaattgaaaaatagcctcagactggatggacttggatcaggaaggagcatcctaacaaaccgttaggaacagccccgtggatactgaagttttttttatggtagttacaggaaacttctgatactctttttattattttcttgtatagagtcagacacttgaaaaaaactaatgtttgaagacaaaaatattttggcagtcacaataccagaactggattgcatttccagaattctgagttaaagaaacaaagtatttgctttgtaaaaggccaaaattctatttcctacaaactttaaatgctgtttttatagatgtgatatgaggcaacacaagcacagacagttgcatagattttaatttatacatatcaagaaaagtgcaatttcatgctgaatgaagcgtaggaacttgacaagcccataggtagctatagttctttgtcagtatagggaattatgttcatgtgaatttcctgattctcaggtgactaaaaagctagcattctatgtattaaccttacaacagactctgtaagtttgagctttaaaaaccaaactttgacataaccttatttcttgtatttgcccccttttttttataaaaggtgaataaaaagaaataatttaatatc

SEQ ID NO: 3806 - protein, 63 aa, Homo sapiens
MFMGSGLIWRRLLSFLGRQLEAPLPPMMASLPKKTLLADRSMELKNSLRLDGLGSGRSILTNR

SEQ ID NO: 3807 - DNA, 3219 bp, Homo sapiens
atcacaaagaaaatcttagatcacatattgcatataggactgggggttgtggttcacacctgtaatcccagcactttggtaggccaaggtgggcagatcactttaggccaggagttcgagaccagcctgaccaacatggtgaaaccccatctctactaaaaatacaaaaattagctgggcatggtgccgcacacctgtaatcccagctactcaggggggccgaggcacaagaatcgcttgaatcaggtagacggaggttgcagtgagccaagattgagccactggactccatcctgggtgaagagcaagactccatctcaacaacaacaaaaagaggaggcagatttctgttcaataagtgacatgcatttccatcagtgatagctgatcagttgtgtaacaggctatctttgaggaagtgagctctcaatcattggagccaatgataacagcatagctataaatgggattccttccttgtgagagattaaatttaaattctgtgattctgtacattaactaaaaacagtgtgctgcaaaatattaccactctgaaaatgacggtgaggaagaatgtttttctaagtctgaggttcccaaacttccttggatcacgatgcccttagtgtcttagtaattttttcacagtatcggaagacaaaaaatttattatgttacagattcctttatgttatttcccttgcaactttaaaatattctgaggtgctatcgtgcccagcatagcaccagacattcagctcacagtttgagaactgtggatataagcaaagaccttaaattgcgtgtcctctggcatcatgacttaagatttgcacgcatgtaaacaaaggctgcaaagaaacacaaagtaaaagcagtacatttggcatatagatgattttaaaatatttaaaaccttttaaatcatgttcttctcctgctttattctgtgggtgctatcaaggcccttgtttttcttagttcctttctacaggaaagagctgtacaaataacataaggctttcaaactctggggcagtaacaattcaaggaatcttctaaggaacctggcgttttgcgatggaaatgaactgtgttctcttttaggaccatagaattttttggctgattacaggaattatgttcatgggaagtggcctcatctggaggcgcctgctttcattccttggacgacagctagaagctccattgcctcctatgatggcttctttacctaaaaagactcttctggcagatagaagcatggaattgaaaaatagcctcagactggatggacttggatcaggaaggagcatcctaacaaaccgttaggaacagccccgtggatactgaagttttttttatggtagttacaggaaacttctgatactctttttattattttcttgtatagagtcagacacttgaaaaaaactaatgtttgaagacaaaaatattttggcagtcacaataccagaactggattgcatttccagaattctgagttaaagaaacaaagtatttgctttgtaaaaggccaaaattctatttcctacaaactttaaatgctgtttttatagatgtgatatgaggcaacacaagcacagacagttgcatagattttaatttatacatatcaagaaaagtgcaatttcatgctgaatgaagcgtaggaacttgacaagcccataggtagctatagttctttgtcagtatagggaattatgttcatgtgaatttcctgattctcaggtgactaaaaagctagcattctatgtattaaccttacaacagactctgtaagtttgagctttaaaaaccaaactttgacataaccttatttcttgtatttgcccccttttttttataaaaggtgaataaaaagaaataatttaatatcaccattgtatggattcctaatcaagatttcacgttctcagcccctgagactagttttctttgctctctgtaattagagcctttggaagcaaagttgaaaggaagtatttccattctgttactgttttgtagcactttgtccatttattgatttttaaagtagatatttagataccacccctgccctgccccaaaaagaaaaatgtttattgtcctgctaatctatatgcctacacctcagaagctgacagatgagcttcctaaaacatgaggatgaataaatgttagaactgtgatatcttctcatttccacagagatttgggtttaaaacaaatggctaatatttgtaagcctgaaagctgccatcctctttaacatcctacctaccttttaaaatattttctggaggttaagtacagttaggcactagaacatttgttaagcctcccaaagtagtgtgcatggaagattctagagtgtccagctcttgcactacaaatgtaataataacagaataaatacacttaccctgatgatattgagggtacatgattagcctaatgtgatgtcatatgaggaagtttaggagtccatttttcaggtggtttggtgataggaataaaaatgttactcccgtcgctgatttggaagaaaaccgatgaagtacaagtaaggtttccccactcctgtgtgtggtcatgggaagccattagagggaagctgcagaacagaatggaacaggacaggctgggctagactcgagcacgcagtggcccctgtgccaccacactgtgggtcaggaacacgcgtcatggtgttcttgtcggaatgtgaacatacagcaccctctagcattacgaatctcttaggatttttaagattgtatttgataatacttatatttcacagggcacacttttggcacacctcagagcacactgctgctattttgggtcgtatcactgtaaaatacataataagtactacttaactgtgacatgaagaattggaatcccagagggcaacatttgatttgactaagatcaggcataagatagaatttttgtcatttttccttgcagttttattgacttagtttatgagcttggataaaataattttttgatgaatcatgtcaataaaaggaaaaataatgtaactacctcataagtctgataaaaggaagttgctagtgttttatagaatttctgaaggtggttaaatcaagtatgatttcaaaatatcaactagttccacttttgtgattgcaggatgcttcttatactaaagttctcataaataataaatcagcttatgcc

SEQ ID NO: 3808 - protein, 63 aa, Homo sapiens; identical to SEQ ID NO: 3806

SEQ ID NO: 3809 - DNA, 5147 bp, Homo sapiens
atcacaaagaaaatcttagatcacatattgcatataggactgggggttgtggttcacacctgtaatcccagcactttggtaggccaaggtgggcagatcactttaggccaggagttcgagaccagcctgaccaacatggtgaaaccccatctctactaaaaatacaaaaattagctgggcatggtgccgcacacctgtaatcccagctactcaggggggccgaggcacaagaatcgcttgaatcaggtagacggaggttgcagtgagccaagattgagccactggactccatcctgggtgaagagcaagactccatctcaacaacaacaaaaagaggaggcagatttctgttcaataagtgacatgcatttccatcagtgatagctgatcagttgtgtaacaggctatctttgaggaagtgagctctcaatcattggagccaatgataacagcatagctataaatgggattccttccttgtgagagattaaatttaaattctgtgattctgtacattaactaaaaacagtgtgctgcaaaatattaccactctgaaaatgacggtgaggaagaatgtttttctaagtctgaggttcccaaacttccttggatcacgatgcccttagtgtcttagtaattttttcacagtatcggaagacaaaaaatttattatgttacagattcctttatgttatttcccttgcaactttaaaatattctgaggtgctatcgtgcccagcatagcaccagacattcagctcacagtttgagaactgtggatataagcaaagaccttaaattgcgtgtcctctggcatcatgacttaagatttgcacgcatgtaaacaaaggctgcaaagaaacacaaagtaaaagcagtacatttggcatatagatgattttaaaatatttaaaaccttttaaatcatgttcttctcctgctttattctgtgggtgctatcaaggcccttgtttttcttagttcctttctacaggaaagagctgtacaaataacataaggctttcaaactctggggcagtaacaattcaaggaatcttctaaggaacctggcgttttgcgatggaaatgaactgtgttctcttttaggaccatagaattttttggctgattacaggaattatgttcatgggaagtggcctcatctggaggcgcctgctttcattccttggacgacagctagaagctccattgcctcctatgatggcttctttacctaaaaagactcttctggcagatagaagcatggaattgaaaaatagcctcagactggatggacttggatcaggaaggagcatcctaacaaaccgttaggaacagccccgtggatactgaagttttttttatggtagttacaggaaacttctgatactctttttattattttcttgtatagagtcagacacttgaaaaaaactaatgtttgaagacaaaaatattttggcagtcacaataccagaactggattgcatttccagaattctgagttaaagaaacaaagtatttgctttgtaaaaggccaaaattctatttcctacaaactttaaatgctgtttttatagatgtgatatgaggcaacacaagcacagacagttgcatagattttaatttatacatatcaagaaaagtgcaatttcatgctgaatgaagcgtaggaacttgacaagcccataggtagctatagttctttgtcagtatagggaattatgttcatgtgaatttcctgattctcaggtgactaaaaagctagcattctatgtattaaccttacaacagactctgtaagtttgagctttaaaaaccaaactttgacataaccttatttcttgtatttgcccccttttttttataaaaggtgaataaaaagaaataatttaatatcaccattgtatggattcctaatcaagatttcacgttctcagcccctgagactagttttctttgctctctgtaattagagcctttggaagcaaagttgaaaggaagtatttccattctgttactgttttgtagcactttgtccatttattgatttttaaagtagatatttagataccacccctgccctgccccaaaaagaaaaatgtttattgtcctgctaatctatatgcctacacctcagaagctgacagatgagcttcctaaaacatgaggatgaataaatgttagaactgtgatatcttctcatttccacagagatttgggtttaaaacaaatggctaatatttgtaagcctgaaagctgccatcctctttaacatcctacctaccttttaaaatattttctggaggttaagtacagttaggcactagaacatttgttaagcctcccaaagtagtgtgcatggaagattctagagtgtccagctcttgcactacaaatgtaataataacagaataaatacacttaccctgatgatattgagggtacatgattagcctaatgtgatgtcatatgaggaagtttaggagtccatttttcaggtggtttggtgataggaataaaaatgttactcccgtcgctgatttggaagaaaaccgatgaagtacaagtaaggtttccccactcctgtgtgtggtcatgggaagccattagagggaagctgcagaacagaatggaacaggacaggctgggctagactcgagcacgcagtggcccctgtgccaccacactgtgggtcaggaacacgcgtcatggtgttcttgtcggaatgtgaacatacagcaccctctagcattacgaatctcttaggatttttaagattgtatttgataatacttatatttcacagggcacacttttggcacacctcagagcacactgctgctattttgggtcgtatcactgtaaaatacataataagtactacttaactgtgacatgaagaattggaatcccagagggcaacatttgatttgactaagatcaggcataagatagaatttttgtcatttttccttgcagttttattgacttagtttatgagcttggataaaataattttttgatgaatcatgtcaataaaaggaaaaataatgtaactacctcataagtctgataaaaggaagttgctagtgttttatagaatttctgaaggtggttaaatcaagtatgatttcaaaatatcaactagttccacttttgtgattgcaggatgcttcttatactaaagttctcataaataataaatcagcttatgccaaaaatatatgaagttccttggttttaaattttgaactaaaatggactgagcacattaattactgtttgaaagtaggtaccaaacactgggttatgtgagtgagtaagcaatcatatcgcctgtcaaacacatcaagtgtcgaacacgtcaaggtgtgatactgtctttggaaggctcctaaacaaatgtgagcacaattattaacaccttattcttcatgaacacagactgttaagcagcactaaccaattttatattaaaaagctatttattttggtgagttattccaagagttgtatacagctttattttttggaattgcaatattaaagttgcacgttggatttaactctcatgactttagtaatacctacagaggtgagctaatggatggtacatggagtagggactgcagagaccctagttttgtccccactccatcttcaaataattttggtctcttaggtctgtgatacaaaggcataaaacaattcctatcttgaagccttgagaaaagctgttacatatacgcagatagtagcaagacagaaaatgcaaatatgtaaatgtcttctgatatcttgaaataaagataaatttcagttaaacttgtataagttcagatttctgttaatgagaaattacaaccctacaaggtaaggtctttacattttagttattaagcagaatcaatgcttaaaactatagttaatacttagtggaaagaaaatttaatccatgtatcaggataatatattagactgtcatgcattaattttttcctgtatgccaggttttttacatacgtgccatatcagttgaccttttacagtaggagtataatttacattgtttttgacattggggttagtatggttaaatgtcctataaacttgaagcttgcttccatttttgtgggtcttaacctccacctggtgcttgctattgggtgtattcaggcattgagaaaaatataaatcgtgaggtaaataatggtcatgtttaaacagaggccttatcatttagtgaagcataaaaactgacactatataaatgcatccgtctaatgaaaagacccagtactgagaaaaacatccctttactcaagtgtcagatgtcagagtgctctaactgctcaactcataagtgaatacaactaagtaatttctggtcccctaaaaataaccatccttttaattaaaagtaattcttcagataggttgggctaccaataattgtccctaaacaaaaccaaatggcgcttccttgtgcttttgctgtgccataggttactatgcagctagcacatgtacctcttccagaaaaatgaggtcatcctgggagtgacccagagatgctctctagggatgtacctcttgatgttcttgttaactttccactcttcagctggattcctcttcctgtccccttttcaccagtctctactcttgagagaagctgagaagagaagggctcttctcatttgttattttctcctgcttttagtatcatctcacccgtggcagaagaaagaggttcttcccaatttaacacaaaataaactagttactgtttacagataatgcccgctaatgtttactgaaactgaaaccctatgatacattccattcccttaagtgtgccacgctgcaggactgacaaatgaaatccatcctacgaaaaacagcccaggaacaagcgaggccaaggcctgctttcctctccggcccttacagtagcgtgtggctcaggccacatcttttccctctagttcttttggcacaagttgtaacctaatgcgacaaaggtccctcatgagatggcttaaaactagcagtgtcgctaggctctttaggtgttagaacagccaactctacaaaagtattggagggcacagaagggtgatagtcttggtttttatatttgt

SEQ ID NO: 3810 - protein, 63 aa, Homo sapiens; identical to SEQ ID NO: 3806

SEQ ID NO: 3811 - DNA, 865 bp, Homo sapiens
tcctgggcctaaagcatttggccattatttaactttttttttttttttttttttttgagacagcgtctggtgcactccagcctgggcgacagagcaagactccttctcaaaaaaaaaaaaaaaaaaaaaaaaaagtagaaatgagggtataagggtataattaaaattgattttaaaaagccacacaaacagtaataacattgtctctctcctcaatttttttcttcaggcccaatatgtattgatttctcctgaagccagctcaaggtttgggagctccctcatcaccgtgaggtccaaggcaaagaaccaagtcgtcattgctgctggaaggagttctttgggagcccgactctccggggcacttcacgtctatagccttggctcagattgaagatttcactgcatttccccactctgcccacctctctcatgctgaatcacatccatgcttccctctaatggcttcccatgaccacacacaggagtggggaaaccttacttgtacttcatcggttttcttccaaatcagcgacgggagtaacatttttattcctatcaccaaaccacctgaaaaatggactcctaaacttcctcatatgacatcacattaggctaatcatgtaccctcaatatcatcagggtaagtgtatttattctgttattattacatttgtagtgcaagagctggacactctagaatcttccatgcacactactttgggaggcttaacaaatgttctagtgcctaactgtacttaacctccagaaaatattttaaaaggtaggtaggatgttaaagaggatggcagctttcaggcttacaaatattagccatttgttttaaacccaaatctctgtggaa

SEQ ID NO: 3812 - protein, 50 aa, Homo sapiens
MASHDHTQEWGNLTCTSSVFFQISDGSNIFIPITKPPEKWTPKLPHMTSH

SEQ ID NO: 3813 - DNA, 555 bp, Homo sapiens
ctcgctccctttgcatctaaacctatttcctcttcctcttgaatgtctttccaatggctggaaaggtccctctgtggttatctgttagaacagtctctgtacacaattcctcctaaaaacatccttttttaaaaaaagaattgttcagccataaagaaagaacaagatcatgccctttgcagggacatggatggagctggaggccattatccttcataaactattgcaggaacagaaaaccaaacactccatattctcacttgtaagtgggagctaaatgagaacacgtggacacatagagggaaacaacacacactggggcctatgagagggcggaaggtgggaggagggagagatcaggaaaaataactaatggatacttagggtgatgaaataatctgtgtaacaaacccccatgacacacctttatgtatgtaacaaaccagcacttcctgcgcatgtacccctgaacttaaaagttaaaaaaaagttgaacttaaaaataacagattggcccatgccaatcaaagtataatagaaagcatagtatacaga

SEQ ID NO: 3814 - protein, 39 aa, Homo sapiens
MTHLYVCNKPALPAHVPLNLKVKKKLNLKITDWPMPIKV

SEQ ID NO: 3815 - DNA, 3489 bp, Homo sapiens; identical to SEQ ID NO: 421

SEQ ID NO: 3816 - protein, 840 aa, Homo sapiens; identical to SEQ ID NO: 422

SEQ ID NO: 3817 - DNA, 2841 bp, Homo sapiens
gtgacctgcttagagagaagcggtgggtctgcacctggattttggagtcccagtgctgctgcagctctgagcattcccacgtcaccagagaagccggtgggcaatgagatcatgtctgctttcaggttgtggcctggcctgctgatcatgttgggttctctctgccatagaggttcaccgtgtggcctttcaacacacgtagaaataggacacagagctctggagtttcttcagcttcacaatgggcgtgttaactacagagagctgttactagaacaccaggatgcgtatcaggctggaatcgtgtttcctgattgtttttaccctagcatctgcaaaggaggaaaattccatgatgtgtctgagagcactcactggactccgtttcttaatgcaagcgttcattatatccgagagaactatccccttccctgggagaaggacacagagaaactggtagctttcttgtttggaattacttctcacatggcggcagatgtcagctggcatagtctgggccttgaacaaggattccttaggaccatgggagctattgattttcacggctcctattcagaggctcattcggctggtgattttggaggagatgtgttgagccagtttgaatttaattttaattaccttgcacgacgctggtatgtgccagtcaaagatctactgggaatttatgagaaactgtatggtcgaaaagtcatcaccgaaaatgtaatcgttgattgttcacatatccagttcttagaaatgtatggtgagatgctagctgtttccaagttatatcccacttactctacaaagtccccgtttttggtggaacaattccaagagtattttcttggaggactggatgatatggcattttggtccactaatatttaccatctaacaagcttcatgttggagaatgggaccagtgactgcaacctgcctgagaaccctctgttcattgcatgtggcggccagcaaaaccacacccagggctcaaaaatgcagaaaaatgattttcacagaaatttgactacatccctaactgaaagtgttgacaggaatataaactatactgaaagaggagtgttctttagtgtaaattcctggaccccggattccatgtcctttatctacaaggctttggaaaggaacataaggacaatgttcataggtggctctcagttgtcacaaaagcacgtctccagccccttagcatcttacttcttgtcatttccttatgcgaggcttggctgggcaatgacctcagctgacctcaaccaggatgggcacggtgacctcgtggtgggcgcaccaggctacagccgccccggccacatccacatcgggcgcgtgtacctcatctacggcaatgacctgggcctgccacctgttgacctggacctggacaaggaggcccacaggatccttgaaggcttccagccctcaggtcggtttggctcggccttggctgtgttggactttaacgtggacggcgtgcctgacctggccgtgggagctccctcggtgggctccgagcagctcacctacaaaggtgccgtgtatgtctactttggttccaaacaaggaggaatgtcttcttcccctaacatcaccatttcttgccaggacatctactgtaacttgggctggactctcttggctgcagatgtgaatggagacagtgaacccgatctggtcatcggctccccttttgcaccaggtggagggaagcagaagggaattgtggctgcgttttattctggccccagcctgagcgacaaagaaaaactgaacgtggaggcagccaactggacggtgagaggcgaggaagacttctcctggtttggatattcccttcacggtgtcactgtggacaacagaaccttgctgttggttgggagcccgacctggaagaatgccagcaggctgggccatttgttacacatccgagatgagaaaaagagccttgggagggtgtatggctacttcccaccaaacggccaaagctggtttaccatttctggagacaaggcaatggggaaactgggtacttccctttccagtggccacgtactgatgaatgggactctgaaacaagtgctgctggttggagcccctacgtacgatgacgtgtctaaggtggcattcctgaccgtgaccctacaccaaggcggagccactcgcatgtacgcactcacatctgacgcgcagcctctgctgctcagcaccttcagcggagaccgccgcttctcccgatttggtggcgttctgcacttgagtgacctggatgatgatggcttagatgaaatcatcatggcagcccccctgaggatagcagatgtaacctctggactgattgggggagaagacggccgagtatatgtatataatggcaaagagaccacccttggtgacatgactggcaaatgcaaatcatggataactccatgtccagaagaaaaggcccaatatgtattgatttctcctgaagccagctcaaggtttgggagctccctcatcaccgtgaggtccaaggcaaagaaccaagtcgtcattgctgctggaaggagttctttgggagcccgactctccggggcacttcacgtctatagccttggctcagattgaagatttcactgcatttccccactctgcccacctctctcatgctgaatcacatccatggtgagcattttgatggacaaagtggcacatccagtggagcggtggtagatcctgatagacatggggctcctgggagtagagagacacactaacagccacaccctctggaaatctgatacagtaaatatatgactgcaccagaaatatgtg

SEQ ID NO: 3818 - protein, 840 aa, Homo sapiens; identical to SEQ ID NO: 422

SEQ ID NO: 3819 - DNA, 1335 bp, Homo sapiens
tgatgaggcttgagggcaggggtcgtgtccctagtgcccggctcaaagtggaagctccaaacttatttgtcggtcgtctcccttgttgctctgactttccactttgtataccctggggaactgagcacaggagggaggcgacgcggctggtgtcactttggggtaaagccccctctgctccccgccgtgtccccggccagctctggccccctgcatccgggctctctcaccttggcggagacctccctccagcggcagaaagcctcgtaggcagcgcgcacggcggcgcgggcctctcgcaccccgcagtcggctaccatgcccagagcggcgccgctggccgggtcttgcacggggaaggtggcggcggccgggagccagcggccgcccacgaagctgtcggtgcgcagcagcgccgcagagaggcccgccaggcgcccagcgtagcagcggagctgggccgggccgggcgcaggcccggaggcagggaccaggccgccggcgcgggggcggaggcggcagcctggaaacgtcgacccgaggcgccgggccccacagctccgcagccaaatgcaggtcgccatggcccgggcaacgacggcgacaggaaacaggttgtggcctggcctgctgatcatgttgggttctctctgccatagaggttcaccgtgtggcctttcaacacacgtagaaataggacacagagctctggagtttcttcagcttcacaatgggcgtgttaactacagagagctgttactagaacaccaggatgcgtatcaggctggaatcgtgtttcctgattgtttttaccctagcatctgcaaaggaggaaaattccatgatgtgtctgagagcactcactggactccgtttcttaatgcaagcgttcattatatccgagagaactatccccttccctgggagaaggacacagagaaactggtagctttcttgtttggaattacttctcacatggcggcagatgtcagctggcatagtctgggccttgaacaaggattccttaggaccatgggagctattgattttcacggctcctattcagaggctcattcggctggtgattttggaggagatgtgttgagccagtttgaatttaattttaattaccttgcacgacgctggtatgtgccagtcaaagatctactgggaatttatgagaaactgtatggtcgaaaagtcatcaccgaaaatgtaatcgttgattgttcacatatccagttcttagaaatgtaagttatatcccacttactctacaaagtccccgtttttggtggaacaattccaagagtattttcttggaggactggatga

SEQ ID NO: 3820 - protein, 228 aa, Homo sapiens
MQVAMARATTATGNRLWPGLLIMLGSLCHRGSPCGLSTHVEIGHRALEFLQLHNGRVNYRELLLEHQDAYQAGIVFPDCFYPSICKGGKFHDVSESTHWTPFLNASVHYIRENYPLPWEKDTEKLVAFLFGITSHMAADVSWHSLGLEQGFLRTMGAIDFHGSYSEAHSAGDFGGDVLSQFEFNFNYLARRWYVPVKDLLGIYEKLYGRKVITENVIVDCSHIQFLEM

SEQ ID NO: 3821 - DNA, 1069 bp, Homo sapiens
agtgctgctgcagctctgagcattcccacgtcaccagagaagccggtgggcaatgagatcatgtctgctttcaggttgtggcctggcctgctgatcatgttgggttctctctgccatagaggttcaccgtgtggcctttcaacacacgtagaaataggacacagagctctggagtttcttcagcttcacaatgggcgtgttaactacagagagctgttactagaacaccaggatgcgtatcaggctggaatcgtgtttcctgattgtttttaccctagcatctgcaaaggaggaaaattccatgatgtgtctgagagcactcactggactccgtttcttaatgcaagcgttcattatatccgagagaactatccccttccctgggagaaggacacagagaaactggtagctttcttgtttggaattacttctcacatggcggcagatgtcagctggcatagtctgggccttgaacaaggattccttaggaccatgggagctattgattttcacggctcctattcagaggctcattcggctggtgattttggtactgtttatttacatttgctaaattttctcgtggtatagttcacttataatgacatcactactgtgctttaaatatgtgtgtctttaatattttgctggttgcatgtattttctatttaatgttgcagttcatttagagtagagatgtacctcatttaacatagagatgtatttctaaaaacttgtgtctatatgtatttttttgttaaaaaattctacactttgttgttgacatgtcataattttagaaaaactttacttatacattgggttaaaattcattagctagtgtctcctactttcctaatactttagctttaaactagtaaactccaccttttgcctgtagtagtaaattgcttttaaatatttaaactaggtggtgaatggtgtttattaaacccttatggtcgatatttccttaaagtaaaacaaaaaacacctttggttatatggccagttctttcttaatttatatgtttcactaactaagatttttaaaagataattttttctt

SEQ ID NO: 3822 - protein, 176 aa, Homo sapiens; identical to SEQ ID NO: 424

SEQ ID NO: 3823 - DNA, 1006 bp, Homo sapiens
tttggagtcccagtgctgctgcagctctgagcattcccacgtcaccagagaagccggtgggcaatgagatcatgtctgctttcaggttgtggcctggcctgctgatcatgttgggttctctctgccatagaggttcaccgtgtggcctttcaacacacgtagaaatagctgttactagaacaccaggatgcgtatcaggctggaatcgtgtttcctgattgtttttaccctagcatctgcaaaggaggaaaattccatgatgtgtctgagagcactcactggactccgtttcttaatgcaagcgttcattatatccgagagaactatccccttccctgggagaaggacacagagaaactggtagctttcttgtttggaattacttctcacatggcggcagatgtcagctggcatagtctgggccttgaacaaggattccttaggaccatgggagctattgattttcacggctcctattcagaggctcattcggctggtgattttggtactgtttatttacatttgctaaattttctcgtggtatagttcacttataatgacatcactactgtgctttaaatatgtgtgtctttaatattttgctggttgcatgtattttctatttaatgttgcagttcatttagagtagagatgtacctcatttaacatagagatgtatttctaaaaacttgtgtctatatgtatttttttgttaaaaaattctacactttgttgttgacatgtcataattttagaaaaactttacttatacattgggttaaaattcattagctagtgtctcctactttcctaatactttagctttaaactagtaaactccaccttttgcctgtagtagtaaattgcttttaaatatttaaactaggtggtgaatggtgtttattaaacccttatggtcgatatttccttaaagtaaaacaaaaaacacctttggttatatggccagttctttcttaatttatatgtttcactaactaagattttt

SEQ ID NO: 3824 - protein, 58 aa, Homo sapiens
MRIRLESCFLIVFTLASAKEENSMMCLRALTGLRFLMQAFIISERTIPFPGRRTQRNW

SEQ ID NO: 3825 - DNA, 1938 bp, Homo sapiens
ggagagaagccgcgcggcgcttagggcaaggtgcagagggcggcgcggcggtgcagcgagaaagacgcggagagagggcgctgctctgtggctctgcaaccttccgccagctcccacgctttccccgcgcgtccccggcgcctcctcgctcctcttgcttccccgcgacccctgcgttcccgtgcgcgcgcgcccgcttgcctgtttcctgtcgccgtcgttgcccgggccatggcgacctgcatttggctgcggagctgtggggcccggcgcctcgggtcgacgtttccaggctgccgcctccgcccccgcgccggcggcctggtccctgcctccgggcctgcgcccggcccggcccagctccgctgctacgctgggcgcctggcgggcctctctgcggcgctgctgcgcaccgacagcttcgtgggcggccgctggctcccggccgccgccaccttccccgtgcaagacccggccagcggcgccgctctgggcatggtagccgactgcggggtgcgagaggcccgcgccgccgtgcgcgctgcctacgaggctttctgccgctggagggaggtctccgccaaggagaggagttcattacttcggaagtggtacaatttaatgatacaaaataaggatgaccttgccagaataatcacagctgaaagtggaaagccactgaaggaggcacatggagaaattctctattccgcctttttcctagagtggttctctgaggaagcccgccgtgtttacggagacattatccacaccccggcaaaggacaggcgggccctggtcctcaagcagcccataggcgtggctgcagtcatcaccccgtggaatttccccagtgccatgatcacccggaaggtgggggccgccctggcagccggctgtactgtcgtggtgaagcctgccgaagacacgcccttctccgccctggccctggctgagcttgcaagccaggctgggattccttcaggtgtatacaatgttattccctgttctcgaaagaatgccaaggaagtaggggaggcaatttgtactgatcctctggtgtccaaaatttcctttactggttcaacaactacaggaaagatcctgttgcaccacgcagcaaactctgtgaaaagggtctctatggagctgggcggccttgctccatttatagtatttgacagtgccaacgtggaccaggctgtagcaggggccatggcatctaaatttaggaacactggacagacttgtgtttgctcaaaccaattcttggtgcaaaggggcatccatgatgcctttgtaaaagcattcgccgaggccatgaagaagaacctgcgcgtaggtaatggatttgaggaaggaactactcagggcccattaattaatgaaaaagcggtagaaaaggtggagaaacaggtgaatgatgccgtttctaaaggtgccaccgttgtgacaggtggaaaacgacaccaacttggaaaaaatttctttgagcctaccctgctgtgcaatgtcacccaggacatgctgtgcactcatgaagagactttcgggcctctggcaccagttatcaagttcgatacagaggaggaggctatagcaatcgctaacgcagctgatgttgggttagcaggttatttttactctcaagacccagcccagatctggagagtggcagagcagctggaagtgggcatggttggcgtcaacgaaggattaatttcctctgtggagtgcccttttggtggagtgaagcagtccggccttgggcgagaggggtccaagtatggcattgatgagtatctggaactcaagtatgtgtgttacgggggcttgtaggattctttggttctttaaaaaaatttaaaaggagacttatctacatatataggtacatgccatccattattttaaataaactaataggttttcagaatt

SEQ ID NO: 3826 - protein, 535 aa, Homo sapiens; identical to SEQ ID NO: 426

SEQ ID NO: 3827 - DNA, 5334 bp, Homo sapiens
ggagagaagccgcgcggcgcttagggcaaggtgcagagggcggcgcggcggtgcagcgagaaagacgcggagagagggcgctgctctgtggctctgcaaccttccgccagctcccacgctttccccgcgcgtccccggcgcctcctcgctcctcttgcttccccgcgacccctgcgttcccgtgcgcgcgcgcccgcttgcctgtttcctgtcgccgtcgttgcccgggccatggcgacctgcatttggctgcggagctgtggggcccggcgcctcgggtcgacgtttccaggctgccgcctccgcccccgcgccggcggcctggtccctgcctccgggcctgcgcccggcccggcccagctccgctgctacgctgggcgcctggcgggcctctctgcggcgctgctgcgcaccgacagcttcgtgggcggccgctggctcccggccgccgccaccttccccgtgcaagacccggccagcggcgccgctctgggcatggtagccgactgcggggtgcgagaggcccgcgccgccgtgcgcgctgcctacgaggctttctgccgctggagggaggtctccgccaaggagaggagttcattacttcggaagtggtacaatttaatgatacaaaataaggatgaccttgccagaataatcacagctgaaagtggaaagccactgaaggaggcacatggagaaattctctattccgcctttttcctagagtggttctctgaggaagcccgccgtgtttacggagacattatccacaccccggcaaaggacaggcgggccctggtcctcaagcagcccataggcgtggctgcagtcatcaccccgtggaatttccccagtgccatgatcacccggaaggtgggggccgccctggcagccggctgtactgtcgtggtgaagcctgccgaagacacgcccttctccgccctggccctggctgagcttgcaagccaggctgggattccttcaggtgtatacaatgttattccctgttctcgaaagaatgccaaggaagtaggggaggcaatttgtactgatcctctggtgtccaaaatttcctttactggttcaacaactacaggaaagatcctgttgcaccacgcagcaaactctgtgaaaagggtctctatggagctgggcggccttgctccatttatagtatttgacagtgccaacgtggaccaggctgtagcaggggccatggcatctaaatttaggaacactggacagacttgtgtttgctcaaaccaattcttggtgcaaaggggcatccatgatgcctttgtaaaagcattcgccgaggccatgaagaagaacctgcgcgtaggtaatggatttgaggaaggaactactcagggcccattaattaatgaaaaagcggtagaaaaggtggagaaacaggtgaatgatgccgtttctaaaggtgccaccgttgtgacaggtggaaaacgacaccaacttggaaaaaatttctttgagcctaccctgctgtgcaatgtcacccaggacatgctgtgcactcatgaagagactttcgggcctctggcaccagttatcaagttcgatacagaggaggaggctatagcaatcgctaacgcagctgatgttgggttagcaggttatttttactctcaagacccagcccagatctggagagtggcagagcagctggaagtgggcatggttggcgtcaacgaaggattaatttcctctgtggagtgcccttttggtggagtgaagcagtccggccttgggcgagaggggtccaagtatggcattgatgagtatctggaactcaagtatgtgtgttacgggggcttgtaggattctttggttctttaaaaaaatttaaaaggagacttatctacatatataggtacatgccatccattattttaaataaactaataggttttcagaattatgaatttttcagaactcatccagtccttgtaatcttaaacagatgcaaatcctacccctgcccttaatgtaactagggaccaatatgtgccacgtgcctgtggctgcagactcccagagaaccagcactgggtttacagaatgaggccctggctccccaccacagccccagctgcctcagagcaggcacagcacaaggcaggcccagccccatgggccgtcacaaaggcttgatcactgcctgggcagtggcacaaccatcccccatgtcgctacagaacatgggcccagagcaccttgaaggagacccttgactgtgactggcaggcaggtgaggggcacagcacccctccccggcatctgccagctcagcacagaagacaccgaatgtgcatctggaggtgttgcggcagaggtttgagtgaaccctctttcaaagacaataaatagcacagaattgtccgtgcttctgtgaggcacgaaggagcacctctccctattcctgaaccatattttaattgatgcctttattgtcccaaatttaccacttaaagaattctattttcatttctgtcctgtttgccacttcatttcatttccttgagtaaatgagctgaagtgtaaagcaaagaatagcagaagcagcttggtaggatggaaggcacgcagtggcatggcctggctccttccctgagtggccttgttgccttgggcgtgtgttcagcacctcccatcccatggatacagtggagattccatacaggccttacttagctccttgcgatactgtgagccagagagaaagtaaaagcacttcacaaaaaaatgaaaattctaaggacatacaagagccattgttacgagcagcaccgcccagcccttccttgcctactgtcagtggctttgccaagatgggaggaggccagtgcccacttgcccaccgacctgagcctgagtaagtggctgtcacctgagcctgttctttctgtcctggtgtggtgctgctccctcacctccaaaagagcaaaagtactttcaccacagtcaacccaaaagggaaagaatttctgtaattgccaacccactttgtagaagaggcatgagcccttgaatttcaggcaccttttatctaatgagagtttttacagctcatcattcaaataacgcacaaaaaacaaaagccgctatgaccggcgttgcctctcactttgaaagaaagactccgtaatcttaaacagatgcaaatccaattaggcggccaagtaggtggagacgaagcaccttcctttccccatctctgtctgtgtagactccacttacatcttgtggttattctgggttgtggaaggaaaatgtgaatgaaagtagtgctggatgcaattactcctgaaccccacctaggatttaacatccctcattgagccactgggaagctatggttgagtaactaaaggtctggcaagaccctgggcacacagggagctgcctagcatctggcctggagtgtactagccacattcccaaggtcccaaggagaaggaagagctgaaattcatctcctagtgacagtgccccggccctgtcaagaatcacatactcagcattttgacagttaatgtcttctctttatttgtgtagtttttaggtggttttatataacattttaattacttgtgatttagatgtatccatcctttttctattaagaatacaaatgctgggctgggcacagtggctcacgcctgtaatcccaacaccttgggaggccaaggcaggcagatcacgacatcaggagatcgagaccatcctggctaacacggtgaaaccccgtctctactaaaaatacaaaaaaaattagtcggatgtggtggcaggtgcctgtagtcccagctactctggaggctgaggcaggagaatggcgtgaacccaggaggcggagcttgcagtgagcagagatcacgccactgcactccagcctggatgacagagcgagactccgcctcaaaaaaagaatacaaatgctccaacattattttttataactctggattaccgatgctgagatgtgtgcaggaatacttccaaataaatttttaacattgtaagccagtagattctttggctgggtggcaaattttgagtcttcttgcatatttggctcatgggttcataaattgaggccagagactcattgtatatccttgatcaattttctaattaaaggaaatagcttattgtttagtaaaatggcccttggttgtgggaagaaagagaattatttttaactgaacgtttttgttgttttttaaataaagtagccatatgtaacgggattttaaaaatatatacattttacaacatggactagaaaaggaccattagatcaggggttggcaaactatggcccacgaatcaaacctggcctgccacctgtttttatacaacctgtgagctaagaatggtttatatgttttcaaatgattgggcagaaaatcaaaagaagaacaatatttcatgacacctgaaaattctatgaaattcagatttcagtgtccataaacaaaatgttattagagcatagccacacccattcatttatggtattgtctgggactgctttcttggcagagttgaatagttgggacagggacagtatagcctgcaaagcctaaaagatttactacttgtctccttaaagaaaaagtttgccagctcctgatctagaccaagagggagatattgaccttacttgcatttatccggcattatttcaacacctcctgtgaagaaagtacttttctggcatagctaccgtgagttctcagcaggaacttcccagcgatgataatgtacatgaaattagccacgtaacaagagtctatttgccttgaaaaaacaattatccttgaacttcctccagctatgcagggattctcattaaagagctgatctgcatctgtttatccattttagtagcttttaaatatgattttatgtgaagtgccatttctttattctactaaagagagacagcagaaataaagatcagaagcaaatgtgagcaaatctgttttactgttaacttcaattatgaacttgaaattgtgccacatgactttttcctctaaaaactggatcctagtgttttaattacctgtgtgcagctattttaaatagcattttacttgaataatatgtatgttgtcattgtttcatgctatactttgtgggataaaacttgggaatgagtgtggtaagaaatttataaagttttgcttttaaaacgtggacataactcatttttctagtttttgacaattgtgtgttttagtgtctagtctgcagagagctgtgtgattaataaacgtggaattaacagaatttcctctccctgta

SEQ ID NO: 3828 - protein, 535 aa, Homo sapiens; identical to SEQ ID NO: 426

SEQ ID NO: 3829 - DNA, 5373 bp, Homo sapiens
ggagagaagccgcgcggcgcttagggcaaggtgcagagggcggcgcggcggtgcagcgagaaagacgcggagagagggcgctgctctgtggctctgcaaccttccgccagctcccacgctttccccgcgcgtccccggcgcctcctcgctcctcttgcttccccgcgacccctgcgttcccgtgcgcgcgcgcccgcttgcctgtttcctgtcgccgtcgttgcccgggccatggcgacctgcatttggctgcggagctgtggggcccggcgcctcgggtcgacgtttccaggctgccgcctccgcccccgcgccggcggcctggtccctgcctccgggcctgcgcccggcccggcccagctccgctgctacgctgggcgcctggcgggcctctctgcggcgctgctgcgcaccgacagcttcgtgggcggccgctggctcccggccgccgccaccttccccgtgcaagacccggccagcggcgccgctctgggcatggtagccgactgcggggtgcgagaggcccgcgccgccgtgcgcgctgcctacgaggctttctgccgctggagggaggtctccgccaaggagaggagttcattacttcggaagtggtacaatttaatgatacaaaataaggatgaccttgccagaataatcacagctgaaagtggaaagccactgaaggaggcacatggagaaattctctattccgcctttttcctagagtggttctctgaggaagcccgccgtgtttacggagacattatccacaccccggcaaaggacaggcgggccctggtcctcaagcagcccataggcgtggctgcagtcatcaccccgtggaatttccccagtgccatgatcacccggaaggtgggggccgccctggcagccggctgtactgtcgtggtgaagcctgccgaagacacgcccttctccgccctggccctggctgaggtaaatcagggatttcttcttgatttggatccattgttgcttgcaagccaggctgggattccttcaggtgtatacaatgttattccctgttctcgaaagaatgccaaggaagtaggggaggcaatttgtactgatcctctggtgtccaaaatttcctttactggttcaacaactacaggaaagatcctgttgcaccacgcagcaaactctgtgaaaagggtctctatggagctgggcggccttgctccatttatagtatttgacagtgccaacgtggaccaggctgtagcaggggccatggcatctaaatttaggaacactggacagacttgtgtttgctcaaaccaattcttggtgcaaaggggcatccatgatgcctttgtaaaagcattcgccgaggccatgaagaagaacctgcgcgtaggtaatggatttgaggaaggaactactcagggcccattaattaatgaaaaagcggtagaaaaggtggagaaacaggtgaatgatgccgtttctaaaggtgccaccgttgtgacaggtggaaaacgacaccaacttggaaaaaatttctttgagcctaccctgctgtgcaatgtcacccaggacatgctgtgcactcatgaagagactttcgggcctctggcaccagttatcaagttcgatacagaggaggaggctatagcaatcgctaacgcagctgatgttgggttagcaggttatttttactctcaagacccagcccagatctggagagtggcagagcagctggaagtgggcatggttggcgtcaacgaaggattaatttcctctgtggagtgcccttttggtggagtgaagcagtccggccttgggcgagaggggtccaagtatggcattgatgagtatctggaactcaagtatgtgtgttacgggggcttgtaggattctttggttctttaaaaaaatttaaaaggagacttatctacatatataggtacatgccatccattattttaaataaactaataggttttcagaattatgaatttttcagaactcatccagtccttgtaatcttaaacagatgcaaatcctacccctgcccttaatgtaactagggaccaatatgtgccacgtgcctgtggctgcagactcccagagaaccagcactgggtttacagaatgaggccctggctccccaccacagccccagctgcctcagagcaggcacagcacaaggcaggcccagccccatgggccgtcacaaaggcttgatcactgcctgggcagtggcacaaccatcccccatgtcgctacagaacatgggcccagagcaccttgaaggagacccttgactgtgactggcaggcaggtgaggggcacagcacccctccccggcatctgccagctcagcacagaagacaccgaatgtgcatctggaggtgttgcggcagaggtttgagtgaaccctctttcaaagacaataaatagcacagaattgtccgtgcttctgtgaggcacgaaggagcacctctccctattcctgaaccatattttaattgatgcctttattgtcccaaatttaccacttaaagaattctattttcatttctgtcctgtttgccacttcatttcatttccttgagtaaatgagctgaagtgtaaagcaaagaatagcagaagcagcttggtaggatggaaggcacgcagtggcatggcctggctccttccctgagtggccttgttgccttgggcgtgtgttcagcacctcccatcccatggatacagtggagattccatacaggccttacttagctccttgcgatactgtgagccagagagaaagtaaaagcacttcacaaaaaaatgaaaattctaaggacatacaagagccattgttacgagcagcaccgcccagcccttccttgcctactgtcagtggctttgccaagatgggaggaggccagtgcccacttgcccaccgacctgagcctgagtaagtggctgtcacctgagcctgttctttctgtcctggtgtggtgctgctccctcacctccaaaagagcaaaagtactttcaccacagtcaacccaaaagggaaagaatttctgtaattgccaacccactttgtagaagaggcatgagcccttgaatttcaggcaccttttatctaatgagagtttttacagctcatcattcaaataacgcacaaaaaacaaaagccgctatgaccggcgttgcctctcactttgaaagaaagactccgtaatcttaaacagatgcaaatccaattaggcggccaagtaggtggagacgaagcaccttcctttccccatctctgtctgtgtagactccacttacatcttgtggttattctgggttgtggaaggaaaatgtgaatgaaagtagtgctggatgcaattactcctgaaccccacctaggatttaacatccctcattgagccactgggaagctatggttgagtaactaaaggtctggcaagaccctgggcacacagggagctgcctagcatctggcctggagtgtactagccacattcccaaggtcccaaggagaaggaagagctgaaattcatctcctagtgacagtgccccggccctgtcaagaatcacatactcagcattttgacagttaatgtcttctctttatttgtgtagtttttaggtggttttatataacattttaattacttgtgatttagatgtatccatcctttttctattaagaatacaaatgctgggctgggcacagtggctcacgcctgtaatcccaacaccttgggaggccaaggcaggcagatcacgacatcaggagatcgagaccatcctggctaacacggtgaaaccccgtctctactaaaaatacaaaaaaaattagtcggatgtggtggcaggtgcctgtagtcccagctactctggaggctgaggcaggagaatggcgtgaacccaggaggcggagcttgcagtgagcagagatcacgccactgcactccagcctggatgacagagcgagactccgcctcaaaaaaagaatacaaatgctccaacattattttttataactctggattaccgatgctgagatgtgtgcaggaatacttccaaataaatttttaacattgtaagccagtagattctttggctgggtggcaaattttgagtcttcttgcatatttggctcatgggttcataaattgaggccagagactcattgtatatccttgatcaattttctaattaaaggaaatagcttattgtttagtaaaatggcccttggttgtgggaagaaagagaattatttttaactgaacgtttttgttgttttttaaataaagtagccatatgtaacgggattttaaaaatatatacattttacaacatggactagaaaaggaccattagatcaggggttggcaaactatggcccacgaatcaaacctggcctgccacctgtttttatacaacctgtgagctaagaatggtttatatgttttcaaatgattgggcagaaaatcaaaagaagaacaatatttcatgacacctgaaaattctatgaaattcagatttcagtgtccataaacaaaatgttattagagcatagccacacccattcatttatggtattgtctgggactgctttcttggcagagttgaatagttgggacagggacagtatagcctgcaaagcctaaaagatttactacttgtctccttaaagaaaaagtttgccagctcctgatctagaccaagagggagatattgaccttacttgcatttatccggcattatttcaacacctcctgtgaagaaagtacttttctggcatagctaccgtgagttctcagcaggaacttcccagcgatgataatgtacatgaaattagccacgtaacaagagtctatttgccttgaaaaaacaattatccttgaacttcctccagctatgcagggattctcattaaagagctgatctgcatctgtttatccattttagtagcttttaaatatgattttatgtgaagtgccatttctttattctactaaagagagacagcagaaataaagatcagaagcaaatgtgagcaaatctgttttactgttaacttcaattatgaacttgaaattgtgccacatgactttttcctctaaaaactggatcctagtgttttaattacctgtgtgcagctattttaaatagcattttacttgaataatatgtatgttgtcattgtttcatgctatactttgtgggataaaacttgggaatgagtgtggtaagaaatttataaagttttgcttttaaaacgtggacataactcatttttctagtttttgacaattgtgtgttttagtgtctagtctgcagagagctgtgtgattaataaacgtggaattaacagaatttcctctccctgta

SEQ ID NO: 3830 - protein, 548 aa, Homo sapiens; identical to SEQ ID NO: 428

SEQ ID NO: 3831 - DNA, 2455 bp, Homo sapiens
gtttgagcacatgacaaccaccgagggaagtgttttcacagagaggcggtagcagccacacgttcactggtcaggtctgcagcttctgacagactgtgtgggtttgtttttgtctcctgtccagacttgtgtttgctcaaaccaattcttggtgcaaaggggcatccatgatgcctttgtaaaagcattcgccgaggccatgaagaagaacctgcgcgtaggtaatggatttgaggaaggaactactcagggcccattaattaatgaaaaagcggtagaaaaggtggagaaacaggtgaatgatgccgtttctaaaggtgccaccgttgtgacaggtggaaaacgacaccaacttggaaaaaatttctttgagcctaccctgctgtgcaatgtcacccaggacatgctgtgcactcatgaagagactttcgggcctctggcaccagttatcaagttcgatacagaggaggaggctatagcaatcgctaacgcagctgatgttgggttagcaggttatttttactctcaagacccagcccagatctggagagtggcagagcagctggaagtgggcatggttggcgtcaacgaaggattaatttcctctgtggagtgcccttttggtggagtgaagcagtccggccttgggcgagaggggtccaagtatggcattgatgagtatctggaactcaagtatgtgtgttacgggggcttgtaggattctttggttctttaaaaaaatttaaaaggagacttatctacatatataggtacatgccatccattattttaaataaactaataggttttcagaattatgaatttttcagaactcatccagtccttgtaatcttaaacagatgcaaatcctacccctgcccttaatgtaactagggaccaatatgtgccacgtgcctgtggctgcagactcccagagaaccagcactgggtttacagaatgaggccctggctccccaccacagccccagctgcctcagagcaggcacagcacaaggcaggcccagccccatgggccgtcacaaaggcttgatcactgcctgggcagtggcacaaccatcccccatgtcgctacagaacatgggcccagagcaccttgaaggagacccttgactgtgactggcaggcaggtgaggggcacagcacccctccccggcatctgccagctcagcacagaagacaccgaatgtgcatctggaggtgttgcggcagaggtttgagtgaaccctctttcaaagacaataaatagcacagaattgtccgtgcttctgtgaggcacgaaggagcacctctccctattcctgaaccatattttaattgatgcctttattgtcccaaatttaccacttaaagaattctattttcatttctgtcctgtttgccacttcatttcatttccttgagtaaatgagctgaagtgtaaagcaaagaatagcagaagcagcttggtaggatggaaggcacgcagtggcatggcctggctccttccctgagtggccttgttgccttgggcgtgtgttcagcacctcccatcccatggatacagtggagattccatacaggccttacttagctccttgcgatactgtgagccagagagaaagtaaaagcacttcacaaaaaaatgaaaattctaaggacatacaagagccattgttacgagcagcaccgcccagcccttccttgcctactgtcagtggctttgccaagatgggaggaggccagtgcccacttgcccaccgacctgagcctgagtaagtggctgtcacctgagcctgttctttctgtcctggtgtggtgctgctccctcacctccaaaagagcaaaagtactttcaccacagtcaacccaaaagggaaagaatttctgtaattgccaacccactttgtagaagaggcatgagcccttgaatttcaggcaccttttatctaatgagagtttttacagctcatcattcaaataacgcacaaaaaacaaaagccgctatgaccggcgttgcctctcactttgaaagaaagactccgtaatcttaaacagatgcaaatccaattaggcggccaagtaggtggagacgaagcaccttcctttccccatctctgtctgtgtagactccacttacatcttgtggttattctgggttgtggaaggaaaatgtgaatgaaagtagtgctggatgcaattactcctgaaccccacctaggatttaacatccctcattgagccactgggaagctatggttgagtaactaaaggtctggcaagaccctgggcacacagggagctgcctagcatctggcctggagtgtactagccacattcccaaggtcccaaggagaaggaagagctgaaattcatctcctagtgacagtgccccggccctgtcaagaatcacatactcagcattttgacagttaatgtcttctctttatttgtgtag

SEQ ID NO: 3832 - protein, 172 aa, Homo sapiens [sequence omitted]

SEQ ID NO: 3833 - DNA, 758 bp, Homo sapiens
acgttcactggtcaggtctgcagcttctgacagactgtgtgggtttgtttttgtctcctgtccagacttgtgtttgctcaaaccaattcttggtgcaaaggggcatccatgatgcctttgtaaaagcattcgccgaggccatgaagaagaacctgcgcgtaggtaatggatttgaggaaggaactactcagggcccattaattaatgaaaaagcggtagaaaaggtggagaaacaggtgaatgatgccgtttctaaaggtgccaccgttgtgacaggtggaaaacgacaccaacttggaaaaaatttctttgagcctaccctgctgtgcaatgtcacccaggacatgctgtgcactcatgaagagactttcgggcctctggcaccagttatcaagttcgatacagaggaggaggctatagcaatcgctaacgcagctgatgttgggttagcaggttatttttactctcaagacccagcccagatctggagagtggcagagcagctggaagtgggcatggttggcgtcaacgaaggattaatttcctctgtggagtgcccttttggtggagtgaagcagtccggccttgggcgagaggggtccaagtatggcattgatgagtatctggaactcaagtatgtgtgttacgggggcttgtaggattctttggttctttaaaaaaatttaaaaggagacttatctacatatataggtacatgccatccattattttaaataaactaataggttttcagaatt

SEQ ID NO: 3834 - protein, 172 aa, Homo sapiens [sequence omitted]

SEQ ID NO: 3835 - DNA, 2151 bp, Homo sapiens
gctcaaaccaattcttggtgcaaaggggcatccatgatgcctttgtaaaagcattcgccgaggccatgaagaagaacctgcgcgtaggtaatggatttgaggaaggaactactcagggcccattaattaatgaaaaagcggtagaaaaggttcgatacagaggaggaggctatagcaatcgctaacgcagctgatgttgggttagcaggttatttttactctcaagacccagcccagatctggagagtggcagagcagctggaagtgggcatggttggcgtcaacgaaggattaatttcctctgtggagtgcccttttggtggagtgaagcagtccggccttgggcgagaggggtccaagtatggcattgatgagtatctggaactcaagtatgtgtgttacgggggcttgtaggattctttggttctttaaaaaaatttaaaaggagacttatctacatatataggtacatgccatccattattttaaataaactaataggttttcagaattatgaatttttcagaactcatccagtccttgtaatcttaaacagatgcaaatcctacccctgcccttaatgtaactagggaccaatatgtgccacgtgcctgtggctgcagactcccagagaaccagcactgggtttacagaatgaggccctggctccccaccacagccccagctgcctcagagcaggcacagcacaaggcaggcccagccccatgggccgtcacaaaggcttgatcactgcctgggcagtggcacaaccatcccccatgtcgctacagaacatgggcccagagcaccttgaaggagacccttgactgtgactggcaggcaggtgaggggcacagcacccctccccggcatctgccagctcagcacagaagacaccgaatgtgcatctggaggtgttgcggcagaggtttgagtgaaccctctttcaaagacaataaatagcacagaattgtccgtgcttctgtgaggcacgaaggagcacctctccctattcctgaaccatattttaattgatgcctttattgtcccaaatttaccacttaaagaattctattttcatttctgtcctgtttgccacttcatttcatttccttgagtaaatgagctgaagtgtaaagcaaagaatagcagaagcagcttggtaggatggaaggcacgcagtggcatggcctggctccttccctgagtggccttgttgccttgggcgtgtgttcagcacctcccatcccatggatacagtggagattccatacaggccttacttagctccttgcgatactgtgagccagagagaaagtaaaagcacttcacaaaaaaatgaaaattctaaggacatacaagagccattgttacgagcagcaccgcccagcccttccttgcctactgtcagtggctttgccaagatgggaggaggccagtgcccacttgcccaccgacctgagcctgagtaagtggctgtcacctgagcctgttctttctgtcctggtgtggtgctgctccctcacctccaaaagagcaaaagtactttcaccacagtcaacccaaaagggaaagaatttctgtaattgccaacccactttgtagaagaggcatgagcccttgaatttcaggcaccttttatctaatgagagtttttacagctcatcattcaaataacgcacaaaaaacaaaagccgctatgaccggcgttgcctctcactttgaaagaaagactccgtaatcttaaacagatgcaaatccaattaggcggccaagtaggtggagacgaagcaccttcctttccccatctctgtctgtgtagactccacttacatcttgtggttattctgggttgtggaaggaaaatgtgaatgaaagtagtgctggatgcaattactcctgaaccccacctaggatttaacatccctcattgagccactgggaagctatggttgagtaactaaaggtctggcaagaccctgggcacacagggagctgcctagcatctggcctggagtgtactagccacattcccaaggtcccaaggagaaggaagagctgaaattcatctcctagtgacagtgccccggccctgtcaagaatcacatactcagcattttgacagttaatgtcttctctttatttgtgtag

SEQ ID NO: 3836 - protein, 39 aa, Homo sapiens
MKKNLRVGNGFEEGTTQGPLINEKAVEKVRYRGGGYSNR

SEQ ID NO: 3837 - DNA, 2111 bp, Homo sapiens
actctgatttactccttgtgattatttgggaaacaaatcagaagaaaacaaaactggtttcctttcctctcccccttacattttttatgacctatcttaactttggcaggttcgatacagaggaggaggctatagcaatcgctaacgcagctgatgttgggttagcaggttatttttactctcaagacccagcccagatctggagagtggcagagcagctggaagtgggcatggttggcgtcaacgaaggattaatttcctctgtggagtgcccttttggtggagtgaagcagtccggccttgggcgagaggggtccaagtatggcattgatgagtatctggaactcaagtatgtgtgttacgggggcttgtaggattctttggttctttaaaaaaatttaaaaggagacttatctacatatataggtacatgccatccattattttaaataaactaataggttttcagaattatgaatttttcagaactcatccagtccttgtaatcttaaacagatgcaaatcctacccctgcccttaatgtaactagggaccaatatgtgccacgtgcctgtggctgcagactcccagagaaccagcactgggtttacagaatgaggccctggctccccaccacagccccagctgcctcagagcaggcacagcacaaggcaggcccagccccatgggccgtcacaaaggcttgatcactgcctgggcagtggcacaaccatcccccatgtcgctacagaacatgggcccagagcaccttgaaggagacccttgactgtgactggcaggcaggtgaggggcacagcacccctccccggcatctgccagctcagcacagaagacaccgaatgtgcatctggaggtgttgcggcagaggtttgagtgaaccctctttcaaagacaataaatagcacagaattgtccgtgcttctgtgaggcacgaaggagcacctctccctattcctgaaccatattttaattgatgcctttattgtcccaaatttaccacttaaagaattctattttcatttctgtcctgtttgccacttcatttcatttccttgagtaaatgagctgaagtgtaaagcaaagaatagcagaagcagcttggtaggatggaaggcacgcagtggcatggcctggctccttccctgagtggccttgttgccttgggcgtgtgttcagcacctcccatcccatggatacagtggagattccatacaggccttacttagctccttgcgatactgtgagccagagagaaagtaaaagcacttcacaaaaaaatgaaaattctaaggacatacaagagccattgttacgagcagcaccgcccagcccttccttgcctactgtcagtggctttgccaagatgggaggaggccagtgcccacttgcccaccgacctgagcctgagtaagtggctgtcacctgagcctgttctttctgtcctggtgtggtgctgctccctcacctccaaaagagcaaaagtactttcaccacagtcaacccaaaagggaaagaatttctgtaattgccaacccactttgtagaagaggcatgagcccttgaatttcaggcaccttttatctaatgagagtttttacagctcatcattcaaataacgcacaaaaaacaaaagccgctatgaccggcgttgcctctcactttgaaagaaagactccgtaatcttaaacagatgcaaatccaattaggcggccaagtaggtggagacgaagcaccttcctttccccatctctgtctgtgtagactccacttacatcttgtggttattctgggttgtggaaggaaaatgtgaatgaaagtagtgctggatgcaattactcctgaaccccacctaggatttaacatccctcattgagccactgggaagctatggttgagtaactaaaggtctggcaagaccctgggcacacagggagctgcctagcatctggcctggagtgtactagccacattcccaaggtcccaaggagaaggaagagctgaaattcatctcctagtgacagtgccccggccctgtcaagaatcacatactcagcattttgacagttaatgtcttctctttatttgtgtag

SEQ ID NO: 3838 - protein, 95 aa, Homo sapiens
MTYLNFGRFDTEEEAIAIANAADVGLAGYFYSQDPAQIWRVAEQLEVGMVGVNEGLISSVECPFGGVKQSGLGREGSKYGIDEYLELKYVCYGGL

SEQ ID NO: 3839 - DNA, 6805 bp, Homo sapiens
gctgccgcgggcggtgggcggggatcccccgggggtgcaaccttgctccacctgtgctgccctcggcgggcctggctggccccgcgcagagcggcggcggcgctcgctgtcactgccggaggtgagagcgcagcagtagcttcagcctgtcttgggcttggtccagattcgctcctctggggctacgtcccggggaagaggaagcgaggattttgctggggtggggctgtacctcttaacagcaggtgcgcgcgcgagggtgtgaacgtgtgtgtgtgtgtgtgtgtgtgtgtgtgtgtgtgtgtgtgtgtgtgtaagacctgcgatgacgacgaggaggaacaagtgggacggcgagtgatgctcagggccagcagcaacgcatggggcgagcttcagtgtcgccagcagtgaccacagttcttgaggccaaatctggctcctaaaaaacatcaaaggaagcttgcaccaaactctcttcagggccgcctcagaagcctgccatcacccactgtgtggtgcacaatggcgccccccacaggtgtgctctcttcattgctgctgctggtgacaattgcaggttgtgcccgtaagcagtgcagcgaggggaggacatattccaatgcagtcatttcacctaacttggaaaccaccagaatcatgcgggtgtctcacaccttccctgtcgtagactgcacggccgcttgctgtgacctgtccagctgtgacctggcctggtggttcgagggccgctgctacctggtgagctgcccccacaaagagaactgtgagcccaagaagatgggccccatcaggtcttatctcacttttgtgctccggcctgttcagaggcctgcacagctgctggactatggggacatgatgctgaacaggggctccccctcggggatctggggggactcacctgaggatatcagaaaggacttgacctttctaggcaaagattggggcctagaggagatgtctgagtactcagatgactaccgggagctggagaaggacctcttgcaacccagtggcaagcaggagcccagagggagtgccgagtacacggactggggcctactgccgggcagcgagggggccttcaactcctctgttggagacagtcctgcggtgccagcggagacgcagcaggaccctgagctccattacctgaatgagtcggcttcaacccctgccccaaaactccctgagagaagtgtgttgcttcccttgccgactactccatcttcaggagaggtgttggagaaagaaaaggcttctcagctccaggaacaatccagcaacagctctggaaaagaggttctaatgccttcccatagtcttcctccggcaagcctggagctcagctcagtcaccgtggagaaaagcccagtgctcacagtcaccccggggagtacagagcacagcatcccaacacctcccactagcgcagccccctctgagtccaccccatctgagctacccatatctcctaccactgctcccaggacagtgaaagaacttacggtatcggctggagataacctaattataactttacccgacaatgaagttgaactgaaggcctttgttgcgccagcgccacctgtagaaacaacctacaactatgaatggaatttaataagccaccccacagactaccaaggtgaaataaaacaaggacacaagcaaactcttaacctctctcaattgtccgtcggactttatgtcttcaaagtcactgtttctagtgaaaacgcctttggagaaggatttgtcaatgtcactgttaagcctgccagaagagtcaacctgccacctgtagcagttgtttctccccaactgcaagagctcactttgcctttgacgtcagccctcattgatggcagccaaagtacagatgatactgaaatagtgagttatcattgggaagaaataaacgggcccttcatagaagagaagacttcagttgactctcccgtcttacgcttgtctaaccttgatcctggtaactatagtttcaggttgactgttacagactcggacggagccactaactctacaactgcagccctaatagtgaacaatgctgtggactacccaccagttgctaatgcaggaccaaatcacaccataactttgccccaaaactccatcactttgaatggaaaccagagcagtgacgatcaccagattgtcctctatgagtggtccctgggtcctgggagtgagggcaaacatgtggtcatgcaggcaatacagacgccataccttcatttatctgcaatgcaggaaggagattatacatttcagctgaaggtgacagattcttcaaggcaacagtctactgctgtggtgactgtgattgtccagcctgaaaacaatagacctccagtggctgtggccggccctgataaagagctgatcttcccagtggaaagtgctaccctggatgggagcagcagcagcgatgaccacggcattgtcttctaccactgggagcacgtcagaggccccagtgcagtggagatggaaaatattgacaaagcaatagccactgtgactggtctccaggtggggacctaccacttccgtttgacagtgaaagaccagcagggactgagcagcacgtccaccctcactgtggctgtgaagaaggaaaataatagtcctcccagagcccgggctggtggcagacatgttcttgtgcttcccaataattccattactttggatggttcaaggtctactgatgaccaaagaattgtgtcctatctgtggatccgggatggccagagtccagcagctggagatgtcatcgatggctctgaccacagtgtggctctgcagcttacgaatctggtggagggggtgtacactttccacttgcgagtcaccgacagtcagggggcctcggacacagacactgccactgtggaagtgcagccagaccctaggaagagtggcctggtggagctgaccctgcaggttggtgttgggcagctgacagagcagcggaaggacacccttgtgaggcagctggctgtgctgctgaacgtgctggactcggacattaaggtccagaagattcgggcccactcggatctcagcaccgtgattgtgttttatgtacagagcaggccgcctttcaaggttctcaaagctgctgaagtggcccgaaatctgcacatgcggctctcaaaggagaaggctgacttcttgcttttcaaggtcttgagggttgatacagcaggttgccttctgaagtgttctggccatggtcactgcgaccccctcacaaagcgctgcatttgctctcacttatggatggagaaccttatacagcgttatatctgggatggagagagcaactgtgagtggagtatattctatgtgacagtgttggcttttactcttattgtgctaacaggaggtttcacttggctttgcatctgctgctgcaaaagacaaaaaaggactaaaatcaggaaaaaaacaaagtacaccatcctggataacatggatgaacaggaaagaatggaactgaggcccaaatatggtatcaagcaccgaagcacagagcacaactccagcctgatggtatccgagtctgagtttgacagtgaccaggacacaatcttcagccgagaaaagatggagagagggaatccaaaggtttccatgaatggttccatcagaaatggagcttccttcagttattgctcaaaggacagataatggcgcagttcattgtaaagtggaaggaccccttgaatccaagaccagtcagtgggagttacagcacaaaacccactcttttagaatagttcattgaccttcttccccagtgggttagatgtgtatccccacgtactaaaagaccggtttttgaaggcacaaaacaaaaactttgctcttttaactgagatgcttgttaatagaaataaaggctgggtaaaactctaaggtatatacttaaaagagttttgagtttttgtagctggcacaatctcatattaaagatgaacaacgatttctatctgtagaaccttagagaaggtgaatgaaacaaggttttaaaaagggatgatttctgtcttagctgctgtgattgcctctaaggaacagcattctaaacacggtttctcttgtaggacctgcagtcagatggctgtgtatgttaaaatagcttgtctaagaggcacgggccatctgtggaggtacggagtcttgcatgtagcaagctttctgtgctgacggcaacactcgcacagtgccaagccctcctggtttttaattctgtgctatgtcaatggcagttttcatctctctcaagaaagcagctgttggccattcaagagctaaggaagaatcgtattctaaggactgaggcaatagaaaggggaggaggagcttaatgccgtgcaggttgaaggtagcattgtaacattatcttttctttctctaagaaaaactacactgactcctctcggtgttgtttagcagtatagttctctaatgtaaacggatccccagtttacattaaatgcaatagaagtgattaattcattaagcatttattatgttctgtaggctgtgcgtttggactgccatagatagggataacgactcagcaattgtgtatatattccaaaactctgaaatacagtcagtcttaacttggatggcgtggttatgatactctggtccccgacaggtactttccaaaataacttgacatagatgtattcacttcatatgtttaaaaatacatttaagtttttctaccgaataaatcttatttcaaacatgaaagacaattaaaacattcccacccacaaagcagtactcccgagcaattaactggagttaattgtagcctgctacgttgactggttcagggtagttccccatccacccttggtcctgaggctggtggccttggtggtgcccttggcattttttgtgggaagattagaatgagagatagaaccagtgttgtggtaccaagtgtgagcacacctaaacaatatcctgttgcacaatgcttttttaacacatgggaaaactaggaatgcattgctgatgaagaagcaaggtatttaaacaccagggcaggagtgccagagaaaatgtttccccatgggttcttaaaaaaaattcagcttttaggtgcttttgtcatctcccgcagtattcatcctcatgggaccatcttatttttacttattgtaatttactggggaaaggcagaactaaaaagtgtgtcattttatttttaaaataattgctttgcttatgcctacactttctgtataactagccaattcaatactgtctatagtgttagaaggaaaatgtgatttttttttttaaccagtattgagcttcataagcctagaatctgccttatcaggtgaccagggttatggttgtttgcatgcaaatgtgaatttctggcataggggacagcagcccaaatgtaaagtcatcgggcgtaatgaggaagaagggagtgaacatttaccgctttatgtacataacatatgcagtttacatactcatttgatccttataatcaaccttgaagaggagatactatcattcttatgttgcagatagccctctgaaggcccagagaggttaaataacttcccagaggtcatggccaagaagtagtggctccaagaactgaatgcaaattttttaaactgtagagttctgctttccactaaacaaagaactcctgccttgatggatggagggcaaattctggtggaacttttgggccacctgaaagttctattcccaggactaagaggaatttcttttaatggatccagagagccaaggtcagagggagagatggcctgcatagtctcctgtggatcacacccgggccacccctccctctaggtttacagtggacttcttctgcccctcctccttttctgtccttggccatctcagcctggcctctctgatccttccatcacagaaggatcttgaatctctgggaaatcaaacatcacagtagtgatcagaaagtgagtcctgtcttgtcaccccatttctcatcagaacaaagcacgagatggaatgaccaaccagcattcttcatggtggactgcttatcattgaggatctttgggagataaagcacgctaagagctctggacagagaaaaacaggccctagaatatgggagtgggtgtttgtagggctcacaggctaacaagcactttagttgctggtttacattcaatgaaggaggattcatacccatggcattacaaggctaagcatgtgtatgactaaggaactatctgaaaaacatgcagcaaggtaagaaaatgtaccactcaacaagccagtgatgccaccttttgtgcgcggggaggagagtgactaccattgttttttgtgtgacaaagctatcatggactattttaatcttggttttattgcttaaaatatattatttttccctatgtgttgacaaggtatttctaatatcacactattaaatatatgcactaatctaaataaaggtgtctgtattttctgtaatgcttatttttagggggaaatttgttttctttatgcttcagggtagagggatttcccttgagtataggtcagcaaactgtggcctacagcctgtgtgtgcacgccccatgagccgaaaagtgggtcttatgttttcaaatggttaaaaataaataaaaaaatttgaaacatgtgaactatatgacattcagatttgtgttcataaataaagttttattggaacatatcc

SEQ ID NO: 3840 - protein, 1072 aa, Homo sapiens
MAPPTGVLSSLLLLVTIAGCARKQCSEGRTYSNAVISPNLETTRIMRVSHTFPVVDCTAACCDLSSCDLAWWFEGRCYLVSCPHKENCEPKKMGPIRSYLTFVLRPVQRPAQLLDYGDMMLNRGSPSGIWGDSPEDIRKDLTFLGKDWGLEEMSEYSDDYRELEKDLLQPSGKQEPRGSAEYTDWGLLPGSEGAFNSSVGDSPAVPAETQQDPELHYLNESASTPAPKLPERSVLLPLPTTPSSGEVLEKEKASQLQEQSSNSSGKEVLMPSHSLPPASLELSSVTVEKSPVLTVTPGSTEHSIPTPPTSAAPSESTPSELPISPTTAPRTVKELTVSAGDNLIITLPDNEVELKAFVAPAPPVETTYNYEWNLISHPTDYQGEIKQGHKQTLNLSQLSVGLYVFKVTVSSENAFGEGFVNVTVKPARRVNLPPVAVVSPQLQELTLPLTSALIDGSQSTDDTEIVSYHWEEINGPFIEEKTSVDSPVLRLSNLDPGNYSFRLTVTDSDGATNSTTAALIVNNAVDYPPVANAGPNHTITLPQNSITLNGNQSSDDHQIVLYEWSLGPGSEGKHVVMQAIQTPYLHLSAMQEGDYTFQLKVTDSSRQQSTAVVTVIVQPENNRPPVAVAGPDKELIFPVESATLDGSSSSDDHGIVFYHWEHVRGPSAVEMENIDKAIATVTGLQVGTYHFRLTVKDQQGLSSTSTLTVAVKKENNSPPRARAGGRHVLVLPNNSITLDGSRSTDDQRIVSYLWIRDGQSPAAGDVIDGSDHSVALQLTNLVEGVYTFHLRVTDSQGASDTDTATVEVQPDPRKSGLVELTLQVGVGQLTEQRKDTLVRQLAVLLNVLDSDIKVQKIRAHSDLSTVIVFYVQSRPPFKVLKAAEVARNLHMRLSKEKADFLLFKVLRVDTAGCLLKCSGHGHCDPLTKRCICSHLWMENLIQRYIWDGESNCEWSIFYVTVLAFTLIVLTGGFTWLCICCCKRQKRTKIRKKTKYTILDNMDEQERMELRPKYGIKHRSTEHNSSLMVSESEFDSDQDTIFSREKMERGNPKVSMNGSIRNGASFSYCSKDR

SEQ ID NO: 3841 - DNA, 1036 bp, Homo sapiens
acaacgatttctatctgtagaaccttagagaaggtgaatgaaacaaggttttaaaaagggatgatttctgtcttagctgctgtgattgcctctaaggaacagcattctaaacacggtttctcttgtaggacctgcagtcagatggctgtgtatgttaaaatagcttgtctaagaggcacgggccatctgtggaggtacggagtcttgcatgtagcaagctttctgtgctgacggcaacactcgcacagtgccaagccctcctggtttttaattctgtgctatgtcaatggcagttttcatctctctcaagaaagcagctgttggccattcaagagctaaggaagaatcgtattctaaggactgaggcaatagaaaggggaggaggagcttaatgccgtgcaggttgaaggtagcattgtaacattatcttttctttctctaagaaaaactacactgactcctctcggtgttgtttagcagtatagttctctaatgtaaacggatccccagtttacattaaatgcaatagaagtgattaattcattaagcatttattatgttctgtaggctgtgcgtttggactgccatagatagggataacgactcagcaattgtgtatatattccaaaactctgaaatacagtcagtcttaacattgttttttgtgtgacaaagctatcatggactattttaatcttggttttattgcttaaaatatattatttttccctatgtgttgacaaggtatttctaatatcacactattaaatatatgcactaatctaaataaaggtgtctgtattttctgtaatgcttatttttagggggaaatttgttttctttatgcttcagggtagagggatttcccttgagtataggtcagcaaactgtggcctacagcctgtgtgtgcacgccccatgagccgaaaagtgggtcttatgttttcaaatggttaaaaataaataaaaaaatttgaaacatgtgaactatatgacattcagatttgtgttcataaataaagttttattggaacat

SEQ ID NO: 3842 - protein, 37 aa, Homo sapiens [sequence omitted]

SEQ ID NO: 3843 - DNA, 578 bp, Homo sapiens
gcacatgcggctctcaaaggagaaggctgacttcttgcttttcaaggtcttgagggttgatacagcagacaaaaaaggactaaaatcaggaaaaaaacaaagtacaccatcctggataacatggatgaacaggaaagaatggaactgaggcccaaatatggtatcaagcaccgaagcacagagcacaactccagcctgatggtatccgagtctgagtttgacagtgaccaggacacaatcttcagccgagaaaagatggagagagggaatccaaaggtttccatgaatggttccatcagaaatggagcttccttcagttattgctcaaaggacagataatggcgcagttcattgtaaagtggaaggaccccttgaatccaagaccagtcagtgggagttacagcacaaaacccactcttttagaatagttcattgaccttcttccccagtgggttagatgtgtatccccacgtactaaaagaccggtttttgaaggcacaaaacaaaaactttgctcttttaactgagatgcttgttaatagaaataaaggctgggtaaaactctaaggtatatactt

SEQ ID NO: 3844 - protein, 72 aa, Homo sapiens [sequence omitted]

SEQ ID NO: 3845 - DNA, 1562 bp, Homo sapiens
aaaggttcacagtggaggtgacatctgggggtaggtcgtgcttgctaaaccgtcgtctttggggacagggttactgctttaatacttcttttgatccggagggataggcatagtgctgattttacagtttcagtttagtaaatatataccatttgacagaacaatctgctgattttattattaaagttcagtattaatagtcagtggacagttttaatgactgtttgtcctgctgcaggtgaacgtgtcaggaaatgagctttgccttatgacatcccatttggagagcaccagagggcatgctgcggaacgaatgaatcagttaaaaatggttttaaagaaaatgcaagaggctccagagtcagctacagttatatttgcaggagatacaaatctaagggatcgagaggttaccagatgtggtggtttacccaacaacattgtggatgtctgggagtttttgggcaaacctaaacattgccagtatacatgggatacacaaatgaactctaatcttggaataactgctgcttgtaaacttcgttttgatcgaatatttttcagagcagcagcagaagagggacacattattccccgaagtttggaccttcttggattagaaaaactggactgtggtagatttcctagtgatcactggggtcttctgtgcaacttagatataatattgtaaaatgcttttcaagtgtgggttttgccctgattgttgcaaatacaatttccaccttctggaaaggtaggtttgctgtggaggaaataatgtactagatcattgtcacagaaaaaccaactatgatttatggttgtgttttcagaattcaacattaaagattaatgtttatttaaacgaacacattcctgcattcaggatgtgaggccatttaataaaaagggcacaaagcctgtcagagttttcaacggtgcttatagctgccagctggattccaaacaggtaccacattgtctctgagctaatgtttatatttttccattcaggcaccgaaatagttaatatttgaaataagtcttcaaaagaaaacataagagattattgagttcttgggactggatcctttatttcataagttcagatcatcttaaatgaaaatgccatgattatctgcagttaagtagatgacagctattctacatcagacttgatttttgtcagctaattacataattggtaagctataattgaaaccttatggcttaaaattccttaactcctttttgattcatgtttgtagtcatgttgtcaacagaggcaaagttaagcttgatgatggttaaaatcggtttgatagcaccatgggacatttttctaacaaaaataaatgcatgaagagacatagccttttagttttgctaattgtgaaatggaaatgctttacaggaagtaaatgcaaattacttttaagtgtgctttaaagaaaaatattttccccacaagagaaatttaaataaagaattttatttgtttatggtttgttttagtatgtttttgtgtccatgatgagattaaattttttatctgcttcctg

SEQ ID NO: 3846 - protein, 140 aa, Homo sapiens [sequence omitted]

SEQ ID NO: 3847 - DNA, 2196 bp, Homo sapiens
ctgaactcctacttcgagcctccggtggaggagagcgccttggaacgccgacctgaaaccatctctgagcccaagacctagtaagtgatgaggggagcgggagccagtccgcacggaggcagtttgataccaggtagccctgcgcgtcctgggacctgccgtggagctgggcggacgatgctgaggcagatctccaagctgcgtagccagaggagcagggcttgcgttgctgctgctgcgcggagttgcgccccagcagcggatctaacactgcaccagactgtcgcttcgaacgtgatttggggtccagggaggaaaagatggaaatgtaatgtttaactcaaatgaaaggaaataagtaagcgagaggtttgaaacaaatgaacgaaggctaaaccttctatcgaaaaatggcaacttggaagtctccttgcttcctgtattgtttatttattctaggccctaggctgaccggccagaataacagtgttgacctaaccaatgaagaaacaactgattccaccacttctaaaatcagcccatctgaagatactcagcaagaaaatggcagcatgttctctctcattacctggaatattgatggattagatctaaacaatctgtcagagagggctcgaggggtgtgttcctacttagctttgtacagcccagatgtgatatttctacaggaagttattcccccatattatagctacctaaagaagagatcaagtaattatgagattattacaggtcatgaagaaggatatttcacagctataatgttgaagaaatcaagagtgaaattaaaaagccaagagattattccttttccaagtaccaaaatgatgagaaaccttttatgtgtgcatgtgaacgtgtcaggaaatgagctttgccttatgacatcccatttggagagcaccagagggcatgctgcggaacgaatgaatcagttaaaaatggttttaaagaaaatgcaagaggctccagagtcagctacagttatatttgcaggagatacaaatctaagggatcgagaggttaccagatgtggtggtttacccaacaacattgtggatgtctgggagtttttgggcaaacctaaacattgccagtatacatgggatacacaaatgaactctaatcttggaataactgctgcttgtaaacttcgttttgatcgaatatttttcagagcagcagcagaagagggacacattattccccgaagtttggaccttcttggattagaaaaactggactgtggtagatttcctagtgatcactggggtcttctgtgcaacttagatataatattgtaaaatgcttttcaagtgtgggttttgccctgattgttgcaaatacaatttccaccttctggaaaggtaggtttgctgtggaggaaataatgtactagatcattgtcacagaaaaaccaactatgatttatggttgtgttttcagaattcaacattaaagattaatgtttatttaaacgaacacattcctgcattcaggatgtgaggccatttaataaaaagggcacaaagcctgtcagagttttcaacggtgcttatagctgccagctggattccaaacaggtaccacattgtctctgagctaatgtttatatttttccattcaggcaccgaaatagttaatatttgaaataagtcttcaaaagaaaacataagagattattgagttcttgggactggatcctttatttcataagttcagatcatcttaaatgaaaatgccatgattatctgcagttaagtagatgacagctattctacatcagacttgatttttgtcagctaattacataattggtaagctataattgaaaccttatggcttaaaattccttaactcctttttgattcatgtttgtagtcatgttgtcaacagaggcaaagttaagcttgatgatggttaaaatcggtttgatagcaccatgggacatttttctaacaaaaataaatgcatgaagagacatagccttttagttttgctaattgtgaaatggaaatgctttacaggaagtaaatgcaaattacttttaagtgtgctttaaagaaaaatattttccccacaagagaaatttaaataaagaattttatttgtttatggtttgttttagtatgtttttgtgtccatgatgagattaaattttttatctgcttcctg

SEQ ID NO: 3848 - protein, 304 aa, Homo sapiens
MATWKSPCFLYCLFILGPRLTGQNNSVDLTNEETTDSTTSKISPSEDTQQENGSMFSLITWNIDGLDLNNLSERARGVCSYLALYSPDVIFLQEVIPPYYSYLKKRSSNYEIITGHEEGYFTAIMLKKSRVKLKSQEIIPFPSTKMMRNLLCVHVNVSGNELCLMTSHLESTRGHAAERMNQLKMVLKKMQEAPESATVIFAGDTNLRDREVTRCGGLPNNIVDVWEFLGKPKHCQYTWDTQMNSNLGITAACKLRFDRIFFRAAAEEGHIIPRSLDLLGLEKLDCGRFPSDHWGLLCNLDIIL

SEQ ID NO: 3849 - DNA, 2131 bp, Homo sapiens
gcacccaccgccccggcggctcccttgcggcgcagctgcaccagttttccgagagcagcgcatttccccgccgggcggttgatgcgggagcgccatgacacaggcgcctgcgcagagccgcgcgttggcctcctgttccgcttaaaggggcggtgcagaggcggcaggaagatggagttggggagttgcctggagggcgggagggaggcggcggaggaagagggcgagcctgaggtgaaaaagcggcgacttctgtgtgtggagtttgcctcggtcgcaagctgcgatgccgcagtggctcagtgcttcctggccgagaacgactgggagatggaaagggctctgaactcctacttcgagcctccggtggaggagagcgccttggaacgccgacctgaaaccatctctgagcccaagacctatgttgacctaaccaatgaagaaacaactgattccaccacttctaaaatcagcccatctgaagatactcagcaagaaaatggcagcatgttctctctcattacctggaatattgatggattagatctaaacaatctgtcagagagggctcgaggggtgtgttcctacttagctttgtacagcccagatgtgatatttctacaggaagttattcccccatattatagctacctaaagaagagatcaagtaattatgagattattacaggtcatgaagaaggatatttcacagctataatgttgaagaaatcaagagtgaaattaaaaagccaagagattattccttttccaagtaccaaaatgatgagaaaccttttatgtgtgcatgtgaacgtgtcaggaaatgagctttgccttatgacatcccatttggagagcaccagagggcatgctgcggaacgaatgaatcagttaaaaatggttttaaagaaaatgcaagaggctccagagtcagctacagttatatttgcaggagatacaaatctaagggatcgagaggttaccagatgtggtggtttacccaacaacattgtggatgtctgggagtttttgggcaaacctaaacattgccagtatacatgggatacacaaatgaactctaatcttggaataactgctgcttgtaaacttcgttttgatcgaatatttttcagagcagcagcagaagagggacacattattccccgaagtttggaccttcttggattagaaaaactggactgtggtagatttcctagtgatcactggggtcttctgtgcaacttagatataatattgtaaaatgcttttcaagtgtgggttttgccctgattgttgcaaatacaatttccaccttctggaaaggtaggtttgctgtggaggaaataatgtactagatcattgtcacagaaaaaccaactatgatttatggttgtgttttcagaattcaacattaaagattaatgtttatttaaacgaacacattcctgcattcaggatgtgaggccatttaataaaaagggcacaaagcctgtcagagttttcaacggtgcttatagctgccagctggattccaaacaggtaccacattgtctctgagctaatgtttatatttttccattcaggcaccgaaatagttaatatttgaaataagtcttcaaaagaaaacataagagattattgagttcttgggactggatcctttatttcataagttcagatcatcttaaatgaaaatgccatgattatctgcagttaagtagatgacagctattctacatcagacttgatttttgtcagctaattacataattggtaagctataattgaaaccttatggcttaaaattccttaactcctttttgattcatgtttgtagtcatgttgtcaacagaggcaaagttaagcttgatgatggttaaaatcggtttgatagcaccatgggacatttttctaacaaaaataaatgcatgaagagacatagccttttagttttgctaattgtgaaatggaaatgctttacaggaagtaaatgcaaattacttttaagtgtgctttaaagaaaaatattttccccacaagagaaatttaaataaagaattttatttgtttatggtttgttttagtatgtttttgtgtccatgatgagattaaattttttatctgcttcctg

SEQ ID NO: 3850 - protein, 392 aa, Homo sapiens
MRERHDTGACAEPRVGLLFRLKGRCRGGRKMELGSCLEGGREAAEEEGEPEVKKRRLLCVEFASVASCDAAVAQCFLAENDWEMERALNSYFEPPVEESALERRPETISEPKTYVDLTNEETTDSTTSKISPSEDTQQENGSMFSLITWNIDGLDLNNLSERARGVCSYLALYSPDVIFLQEVIPPYYSYLKKRSSNYEIITGHEEGYFTAIMLKKSRVKLKSQEIIPFPSTKMMRNLLCVHVNVSGNELCLMTSHLESTRGHAAERMNQLKMVLKKMQEAPESATVIFAGDTNLRDREVTRCGGLPNNIVDVWEFLGKPKHCQYTWDTQMNSNLGITAACKLRFDRIFFRAAAEEGHIIPRSLDLLGLEKLDCGRFPSDHWGLLCNLDIIL

SEQ ID NO: 3851 - DNA, 1507 bp, Homo sapiens
aaaggttcacagtggaggtgacatctgggggtaggtcgtgcttgctaaaccgtcgtctttggggacagggttactgctttaatacttcttttgatccggagggataggcatagtgctgattttacagtttcagtttagtaaatatataccatttgacagaacaatctgctgattttattattaaagttcagtattaatagtcagtggacagttttaatgactgtttgtcctgctgcaggtgaacgtgtcaggaaatgagctttgccttatgacatcccatttggagagcaccagagggcatgctgcggaacgaatgaatcagttaaaaatggttttaaagaaaatgcaagaggctccagagtcagctacagttatatttgcaggagatacaaatctaagggatcgagaggttaccagatgtggtggtttacccaacaacattgtggatgtctgggagtttttgggcaaacctaaacattgccagtatacatgggatacacaaatgaactctaatcttggaataactgctgcttgtaaacttcgttttgatcgaatatttttcagagcagcagcagaagagggacacattattccccgaagtttggaccttcttggattagaaaaactggactgtggtagatttcctagtgatcactggggtcttctgtgcaacttagatataatattgtaaaatgcttttcaagtgtgggttttgccctgattgttgcaaatacaatttccaccttctggaaaggtaggtttgctgtggaggaaataatgtactagatcattgtcacagaaaaaccaactatgatttatggttgtgttttcagaattcaacattaaagattaatgtttatttaaacgaacacattcctgcattcaggatgtgaggccatttaataaaaagggcacaaagcctgtcagagttttcaacggtgcttatagctgccagctggattccaaacaggtaccacattgtctctgagctaatgtttatatttttccattcaggcaccgaaatagttaatatttgaaataagtcttcaaaagaaaacataagagattattgagttcttgggactggatcctttatttcataagttcagatcatcttaaatgaaaatgccatgattatctgcagttaagtagatgacagctattctacatcagacttgatttttgtcagctaattacataattggtaagctataattgaaaccttatggcttaaaattccttaactcctttttgattcatgtttgtagtcatgttgtcaacagaggcaaagttaagcttgatgatggttaaaatcggtttgatagcaccatgggacatttttctaacaaaaataaatgcatgaagagacatagccttttagttttgctaattgtgaaatggaaatgctttacaggaagtaaatgcaaattacttttaagtgtgctttaaagaaaaatattttccccacaagagaaatttaaataaagaattttatttgtttatggtt

SEQ ID NO: 3852 - protein, 140 aa, Homo sapiens [sequence omitted]

SEQ ID NO: 3853 - DNA, 2141 bp, Homo sapiens
ctgaactcctacttcgagcctccggtggaggagagcgccttggaacgccgacctgaaaccatctctgagcccaagacctagtaagtgatgaggggagcgggagccagtccgcacggaggcagtttgataccaggtagccctgcgcgtcctgggacctgccgtggagctgggcggacgatgctgaggcagatctccaagctgcgtagccagaggagcagggcttgcgttgctgctgctgcgcggagttgcgccccagcagcggatctaacactgcaccagactgtcgcttcgaacgtgatttggggtccagggaggaaaagatggaaatgtaatgtttaactcaaatgaaaggaaataagtaagcgagaggtttgaaacaaatgaacgaaggctaaaccttctatcgaaaaatggcaacttggaagtctccttgcttcctgtattgtttatttattctaggccctaggctgaccggccagaataacagtgttgacctaaccaatgaagaaacaactgattccaccacttctaaaatcagcccatctgaagatactcagcaagaaaatggcagcatgttctctctcattacctggaatattgatggattagatctaaacaatctgtcagagagggctcgaggggtgtgttcctacttagctttgtacagcccagatgtgatatttctacaggaagttattcccccatattatagctacctaaagaagagatcaagtaattatgagattattacaggtcatgaagaaggatatttcacagctataatgttgaagaaatcaagagtgaaattaaaaagccaagagattattccttttccaagtaccaaaatgatgagaaaccttttatgtgtgcatgtgaacgtgtcaggaaatgagctttgccttatgacatcccatttggagagcaccagagggcatgctgcggaacgaatgaatcagttaaaaatggttttaaagaaaatgcaagaggctccagagtcagctacagttatatttgcaggagatacaaatctaagggatcgagaggttaccagatgtggtggtttacccaacaacattgtggatgtctgggagtttttgggcaaacctaaacattgccagtatacatgggatacacaaatgaactctaatcttggaataactgctgcttgtaaacttcgttttgatcgaatatttttcagagcagcagcagaagagggacacattattccccgaagtttggaccttcttggattagaaaaactggactgtggtagatttcctagtgatcactggggtcttctgtgcaacttagatataatattgtaaaatgcttttcaagtgtgggttttgccctgattgttgcaaatacaatttccaccttctggaaaggtaggtttgctgtggaggaaataatgtactagatcattgtcacagaaaaaccaactatgatttatggttgtgttttcagaattcaacattaaagattaatgtttatttaaacgaacacattcctgcattcaggatgtgaggccatttaataaaaagggcacaaagcctgtcagagttttcaacggtgcttatagctgccagctggattccaaacaggtaccacattgtctctgagctaatgtttatatttttccattcaggcaccgaaatagttaatatttgaaataagtcttcaaaagaaaacataagagattattgagttcttgggactggatcctttatttcataagttcagatcatcttaaatgaaaatgccatgattatctgcagttaagtagatgacagctattctacatcagacttgatttttgtcagctaattacataattggtaagctataattgaaaccttatggcttaaaattccttaactcctttttgattcatgtttgtagtcatgttgtcaacagaggcaaagttaagcttgatgatggttaaaatcggtttgatagcaccatgggacatttttctaacaaaaataaatgcatgaagagacatagccttttagttttgctaattgtgaaatggaaatgctttacaggaagtaaatgcaaattacttttaagtgtgctttaaagaaaaatattttccccacaagagaaatttaaataaagaattttatttgtttatggtt

SEQ ID NO: 3854 - protein, 304 aa, Homo sapiens; identical to SEQ ID NO: 3848

SEQ ID NO: 3855 - DNA, 2076 bp, Homo sapiens
gcacccaccgccccggcggctcccttgcggcgcagctgcaccagttttccgagagcagcgcatttccccgccgggcggttgatgcgggagcgccatgacacaggcgcctgcgcagagccgcgcgttggcctcctgttccgcttaaaggggcggtgcagaggcggcaggaagatggagttggggagttgcctggagggcgggagggaggcggcggaggaagagggcgagcctgaggtgaaaaagcggcgacttctgtgtgtggagtttgcctcggtcgcaagctgcgatgccgcagtggctcagtgcttcctggccgagaacgactgggagatggaaagggctctgaactcctacttcgagcctccggtggaggagagcgccttggaacgccgacctgaaaccatctctgagcccaagacctatgttgacctaaccaatgaagaaacaactgattccaccacttctaaaatcagcccatctgaagatactcagcaagaaaatggcagcatgttctctctcattacctggaatattgatggattagatctaaacaatctgtcagagagggctcgaggggtgtgttcctacttagctttgtacagcccagatgtgatatttctacaggaagttattcccccatattatagctacctaaagaagagatcaagtaattatgagattattacaggtcatgaagaaggatatttcacagctataatgttgaagaaatcaagagtgaaattaaaaagccaagagattattccttttccaagtaccaaaatgatgagaaaccttttatgtgtgcatgtgaacgtgtcaggaaatgagctttgccttatgacatcccatttggagagcaccagagggcatgctgcggaacgaatgaatcagttaaaaatggttttaaagaaaatgcaagaggctccagagtcagctacagttatatttgcaggagatacaaatctaagggatcgagaggttaccagatgtggtggtttacccaacaacattgtggatgtctgggagtttttgggcaaacctaaacattgccagtatacatgggatacacaaatgaactctaatcttggaataactgctgcttgtaaacttcgttttgatcgaatatttttcagagcagcagcagaagagggacacattattccccgaagtttggaccttcttggattagaaaaactggactgtggtagatttcctagtgatcactggggtcttctgtgcaacttagatataatattgtaaaatgcttttcaagtgtgggttttgccctgattgttgcaaatacaatttccaccttctggaaaggtaggtttgctgtggaggaaataatgtactagatcattgtcacagaaaaaccaactatgatttatggttgtgttttcagaattcaacattaaagattaatgtttatttaaacgaacacattcctgcattcaggatgtgaggccatttaataaaaagggcacaaagcctgtcagagttttcaacggtgcttatagctgccagctggattccaaacaggtaccacattgtctctgagctaatgtttatatttttccattcaggcaccgaaatagttaatatttgaaataagtcttcaaaagaaaacataagagattattgagttcttgggactggatcctttatttcataagttcagatcatcttaaatgaaaatgccatgattatctgcagttaagtagatgacagctattctacatcagacttgatttttgtcagctaattacataattggtaagctataattgaaaccttatggcttaaaattccttaactcctttttgattcatgtttgtagtcatgttgtcaacagaggcaaagttaagcttgatgatggttaaaatcggtttgatagcaccatgggacatttttctaacaaaaataaatgcatgaagagacatagccttttagttttgctaattgtgaaatggaaatgctttacaggaagtaaatgcaaattacttttaagtgtgctttaaagaaaaatattttccccacaagagaaatttaaataaagaattttatttgtttatggtt

SEQ ID NO: 3856 - protein, 392 aa, Homo sapiens; identical to SEQ ID NO: 3850

SEQ ID NO: 3857 - DNA, 5138 bp, Homo sapiens
gcttccggaagtgcctttggggcaagatgcgtgctggccggtgttgtgcctccgcagatttagaagttagtggccggaggggcctggtccgagtacagctttcatcgcctttactccccgaccttccttcgagtctgtttatccgttgcagcctcccttccccacgacggggcgcctctgcaactcacaaagtacccttagaaagaggccctcagaagagtcttctcttaagaagataaagaaggtagtggaaacgaacttcctgagcttttcaggctctaatggctgaagaatcaagaaagccttcagccccatccccaccagaccagactcctgaagaggatcttgtaatcgtcaaggtagaggaggatcatggttgggaccaggaatctagtctgcatgaaagtaaccctcttggccaagaagtgttccgcctgcgcttcaggcagttacgctaccaggagacactaggaccccgagaagctctgatccaactacgggccctttgccatcagtggctgaggccagatttgaacaccaaggaacagatcctggagctgctggtgctggagcagttcttgaccatcctacctgaggagctccagacactggttaaggaacatcagctagagaacggagaggaggtggtgaccctattagaggatttggaaaggcagattgatatactaggacgaccagtctcagctcgcgtacatggacatagggtactctgggaggaggtagtacattcagcatctgcaccagagcctccaaatactcagctccaatctgaggcaacccaacataaatctccagtgccccaagagtcacaagagagagccatgtctacttcccagagtcctactcgttcccagaaaggaagttctggagaccaggaaatgacagctacacttctcacagcagggttccagactttggagaagattgaagacatggctgtgtcccttattcgagaggagtggcttcttgatccatcacagaaggatctgtgtagagataacaggccagaaaatttcagaaacatgttctccctgggtggtgagaccaggagtgagaacagggaattagcttcaaaacaggtaatatctactggaatccagccacatggagagacagctgccaaatgcaacggggatgttatcaggggtcttgagcatgaagaagcccgagaccttctgggcagattagagaggcagcggggaaatcccacacaagagagacgacataaatgtgatgaatgtgggaaaagctttgctcagagctcaggccttgttcgccactggagaatccacactggggagaaaccctatcagtgtaatgtgtgtggtaaagccttcagttacaggtcagcccttctttcacatcaggatatccacaacaaagtaaaacgctatcactgtaaggagtgtggcaaagccttcagtcagaacacaggcctgattctgcaccagagaatccacactggggagaagccatatcagtgcaatcagtgtgggaaggctttcagtcagagtgcgggccttattctgcaccagagaatccacagtggagagagaccctatgaatgtaatgagtgtgggaaagctttcagtcatagctcacacctcattggacatcagagaatccacactggggagaagccctatgagtgtgatgagtgtgggaaaaccttcaggcggagctcacatcttattggtcatcagaggagccacactggggagaaaccctacaaatgcaatgagtgtgggagggccttcagtcagaagtcaggccttattgaacatcagagaatccacactggagaaagaccctataaatgtaaagaatgtgggaaagctttcaatgggaacactggtctcattcaacacctgagaattcacacaggggagaagccctaccaatgtaatgagtgtgggaaagcctttattcagaggtcaagtctcattcgacatcagagaatccacagtggtgaaaaatctgaatccataagcgtttaggaacaacatcagttagagtttgagcattattcagcattagggaaaccacacactggtgagaggtctttcagtgtactaaaaggcagaaaggtcatcacaactttagtgtcagaatctatagtggtggcaaagttaggatagctctttagtaatttgggcccagtgccttggtgaaggttgattagcttgactgtctttgaaagtatctgatggagctcctgatgacctaatgtatcctttagaaatttaaaatagcattagagcaagttgcttgtcatggcttgaagagcttaactttgtcttttgggtgagtagctataggtttgagagaggctggctactcctagttcctgtgcttcttcccatctcctgtgatccccctctcccatttattcccttgaaggtgcccttgtattcctaatctgatctaagaagctgctgtagagtcagaagtagcttctgtgtgaaacttatatttgtatgtagctttctaggaaaattttacagacacttaaagtatttatgcttaagtgtgcatttttttattctaatattccttctagtcagtggaaatttgtattcccatacaaactcagaatgctatatttttaacagcactccagcatttttcttcatgtatcaccttcactgactccattgagtcattgagcatctgtacatatccttcaccacccccagtcccagcacctgtgtcagtaaagaaagtggacacattagtaatggttatgggagtaatacagagaaagaggtgagtggagactcagcccagctgctcttgagcttggatagttatacattttggtgacttctgactctccttccacctccccactgtacactgtggtacagatagttggcactatcctagttatggcatcaggtaggagaaggagacgaagatgctttaggaagataaaaaccttacaaagaatgtatactcatcttttttggcccattacaatactgctttctcaggttcttaacagcctgtgcaaactccctgactagatggtctgtcactcctatcattaccttgcacccatctctttagatggcctcagcacctcactcgttattctccatctgtttcttgccattagtttatatgactttaatatccacagtggtaatctaataccttacctcacaggttttcattcttttgaactctggtgcactccatctgtaatccatgtctataatctaccaacaaagatgtactcttaaactcagtatcaccaggcactatatttcatctttgaggcttttgttataccaaggaatactatataaagtaatgagactggtttaaagtaacatgccagaacttacgcatccaatgtgggttgtcacttgttattcccaagtactattattccatactactatattcttccaaatatttggaacactcttagaattcccatttaataaaccatatgagaaaaccctctattactcttacactttagttttaccatttgagtagccacttattcaccagagttggaattgagaaattttgggctttccaaaattaacctttaaacttaaaattgattacattgagcctattcagaaaaaaaattatataggttctgatgaaagcttcataatttcaccctgtgactatcctgaaaagaaataataatcattttatgattgatgggccaaaaaaagcaatcaaagtcttacgtcatagaggaccaccttttggatcataaattctttccctataacattccttctctgcctctctatggcccactttgaccactaacaacatcagaattatctacatcaatttcattgagccattggtgaatgaagacacccatcacttgtcatgttggtttccaacagtcctttcgattatcctttattttcttatcctcccttctcttgtttcttttatttataagttaccattcctagtttctttgtacttgaaattttaagaaaccagaaacaagtaaatctggttgtatctagatctttgctctgtgtttcagttgtgccttaccctctgtaagatactgattcttcctggggccagtattaccttgtatgcaaatattacatatgatgggtgcattgtcagagggaaaatatatgtgtatgtacacatgtgtatgtacacacacacacacacctgccatacactttagaagaacgcttctcttctattccaataaaaagtccttttagcaatgcaacatattaacaaaattgggtgcattcagggtggtatggccatagaccagagcaacacattgaaatgtatacagatgtactagctaaagtctctttatgtgtcagtattaagagtaatatgtagccagattacttaaatctcagaattactaagcatgtggcataaatttggagaaaataatatgactagaaaaattagtgttatattgggtgtgagaaaagactgtgtcttgaaagaattatcaaagctgatacagcacatatacagaattagccaaatggtataagacaatagaaaaaggctgtggattctttgaggacatcactagaaatcattctttgtctcaagttcacactcttagcatagaatattattgactaggctgtatgacattttgagctcttaactgtgaatggcattcattaagctcctttatcctatagattctatctttatgttcatctgaaatgaactattcatcagtactttctcctcccatcctaagcttctcattttaggaactgacatgataaggtggttctttcataactctaatgccatccaacatagccctgggagaggcatgttaggtttcagagattttctccatggagcaaggtgcagtgctagaatatggtggttgattcccaaacagagcagttaactttactcttggttctgagtctccaaataataatagccgacgtttattgagcacttactatgtgcccaaccctgttatgcctttctcaggctcatgataaatgtattagtctgttctcatgctgctattaaagacatacctgacactgggtaatttataaaggaaagaggtttaatggactcagttccacatggctggggacgcctcacaatcatggtgg

SEQ ID NO: 3858 - protein, 578 aa, Homo sapiens; identical to SEQ ID NO: 434

SEQ ID NO: 3859 - DNA, 1608 bp, Homo sapiens
aaattcaaatatatttttctccaaactgccaaagggaaagtagaattgtggagggaaatgaaatatccatgtaccaggccaggcagatggtcagttaggatgacaatagtaagttcatctacagcataaaatgtgaaatgctttcatcctcattgcccatttccaactaccattctgtttctcctctattgttcatggtttttcaaacatatctttgatttttcaacccccctttttcattaatctgttcttaaaacttctttttactggctttcatacttagcattccagtgaaatgttcttagactcaccagtggacaaataataaggcctttttttattattatttcttgtcttttttgatctaatttatattttatattgttgaattctccctcctttggcttgtgggatcctttttctctaatatctgtctttctttttttagttgatctttccacccactcccctttctcctcttctccactgagaataatctccctgtcttttattcacttcattttctatactcctatttatccattttgattgtttatacctactatttgtattcgaatgacttcatttttcccaccctgtgggtcagtttgtgacttttggaattttccacaggtacctgtacaacttgatatttgaaaacaggattcatcaccatatatccccagcccccgttttctttttaaacaggcctcattgcgtaattcctttgccctgaaaagtgtcaccacctttatatttttaccccagccttggagttatctttttctgctctccattctccatgtccaaaaacttgctgtcagtccagtttttaatcagttttctccttgaggcttgatctcccatttctctcatcccattatagcttttcatgtagatctgaggcccaggttactgtaattcttttttttccaatttccttgctcccaggatccccatctttagataatttttcaaagacgatcctcctcaaacacccatttttacaatatctctattgtaaaatttcattttcactaagtaacacccagtagataattcctatggagcagtggtgttccaaattctccattacctctatgcctaatattcatcagccttcattactctctagcatattcaccttgattcaacagattcaaacttcctacagccttctactgatgtcttacaagctcttgcctctgtgcctttctcatgctattctttttgcttagattgctctttggtcccagctcatgttcatcactcccttcaaagcctttcttcctttatatcttctgactgagctctccctgattgacatcacctcatgcgatgacctccctcattctgtgctgcctcagcacttatcttttgagtttgtactgtggtccatgtacttactaatatgttgctttgtaattattttctagcactctgtgttacagtttcatatttgtatttatttccaaaattaaattgtaagctccttgagggcaggaataataacttttacatttgtatctctgcacccccgagtgcctagtatagtgctgagcacatagtaggcgtttaataaatgcttgttgaagtattgtgtggatt

SEQ ID NO: 3860 - protein, 58 aa, Homo sapiens
MFITPFKAFLPLYLLTELSLIDITSCDDLPHSVLPQHLSFEFVLWSMYLLICCFVIIF

SEQ ID NO: 3861 - DNA, 375 bp, Homo sapiens
gaagtgttcctgaaaactcgtcaattacaggaaaagctgcatgactgcatctttagaggagatggtttcgctggttccaaggattctgttaatgagaaaactccacaggccagcattctgtaagctggctccagcagcccagttgacagtggctgaggccagttcctgatcatcctgaggaacaccagaatggagatttacagacagtcatctgggtggaggacacccttttgggatcagcactgaaagtgacgccatatcccactccaaaccagcacaactataaatactaagcagtgagtggtattctgaagactttgaaggaggagctatttctgaaaataaatttattttgttgaagaatttaaccattaa

SEQ ID NO: 3862 - protein, 42 aa, Homo sapiens
MTASLEEMVSLVPRILLMRKLHRPAFCKLAPAAQLTVAEASS

SEQ ID NO: 3863 - DNA, 1702 bp, Homo sapiens
ctgcatctttagaggagatggtttcgctggttccaaggattctgttaatgagaaaactccacaggccagcattctgtaagctggctccagcagcccagttgacagtggctgaggccagttcctgatcatcctgaggaacaccagcacgtaagtcagaagccacactacctgtgattttggccaagtcattttatctttctgtgcctatatgtcatctgtcaatggggataataaaagcacctgtctagagttgttatgaggattacatgaacagtacctgctacataggaagtgctatccagtcaactcacaaatccctgagagggaagcctccaggatcctagagtagatgaccagatgcccaggcgcaggatccacggaagtcaaagtcaagctttctaggccgacagctgtcctcagtcgcttggtcagatagtctaatctcagtttttcaggaatcaaggccagaggtgtgaacaaggtgtcagctctgaagggaaggtttttctaaggatggacccacaccagaaggtccctagcatatataatggggatactttacaaactcctgagtatgaaaaagtctctcagtatgaggaccagttagaaaggcatgagggtaggcacatggaagaaagacggtataaatgcaatgaatgtggaaagaagtttgcccagagctcaggccttgttcgacatcagagaatccacactggagagaaaccctatgagtgtgatcactatggaaaagcctttagcgtgcgctcaaccctcactgtgcatgaaagaatccacactggtgagaagccttatacttgtaatgagtgtaagaaagccttcagtgtaagggcacacctgattatacatcagagaatccacaatggagagaaaccctatgaatgtaatgagtgtggcaaagcatttagtgtgagctcagaccttatcaaacatcagagaatccatactggtgagaaaccttatgagtgtgatgagtgtggaaaagctttcagtgtgagctcagccctcatcaagcatcagagaatccatacaggagaaaagccgtatgagtataaggaatgtgggaaggccttctatgtgaactcagcacttattaatcaccagaggattcactctggagaaaagccctatgagtgtggagagtgtggaaaagcattcagccagatctcaacgcttattcatcaccagagaatccatactggagagaaaccgtatgagtgtgaagagtgtgggaaagctttccatgggagttctaaccttactaaacaccagaaaacacatgccaaaggaaagtgtcatcagtgatttatgtggcaaatatattccaaagggcttttgttacatcggaagataccattgaaagaagagtatggttaaagttaatgccttaattgacacttcacccttgaaatactgaagtgagaagtcactcaaaagtaactccatcagcattgtttctaaggctctaaaatcacatctacttctgagaagaatggagatttacagacagtcatctgggtggaggacacccttttgggatcagcactgaaagtgacgccatatcccactccaaaccagcacaactataaatactaagcagtgagtggtattctgaagactttgaaggaggagctatttctgaaaataaatttattttgttgaagaatttaaccattaagcgatc

SEQ ID NO: 3864 - protein, 269 aa, Homo sapiens
MDPHQKVPSIYNGDTLQTPEYEKVSQYEDQLERHEGRHMEERRYKCNECGKKFAQSSGLVRHQRIHTGEKPYECDHYGKAFSVRSTLTVHERIHTGEKPYTCNECKKAFSVRAHLIIHQRIHNGEKPYECNECGKAFSVSSDLIKHQRIHTGEKPYECDECGKAFSVSSALIKHQRIHTGEKPYEYKECGKAFYVNSALINHQRIHSGEKPYECGECGKAFSQISTLIHHQRIHTGEKPYECEECGKAFHGSSNLTKHQKTHAKGKCHQ

SEQ ID NO: 3865 - DNA, 896 bp, Homo sapiens
gcctctgctccgtccgccttcgaggagaggtcggcatctttgttccctgcccggccattgttcgtgccgcgcttctagcaacgccgggccggtaaccccctctccctccttgcgcgttccgggtctcgcaagcgcctccaaggtttgtcttgaagcatagctccagctggagggtaccttttaagctgttcaaggtcaagatgaatacaaactcaaaggaggttttatccctgggtgttcaagttcccgaggcatgggaagaacttctgacaatgaaagtggaagcaaaaagtcaccttcaatggcaggaatccagactgaaacgcagtaatccactggcaagggaaatcttccgaaggcactttcgacagctgtgctaccaagagacccctggaccaagggaggctcttactcgactccaggaactttgctaccagtggttgaggccacatgtgagcacaaaggagcagattttggatctgctggtgctggagcagtttctatccattctgcccaaggagctccagggctgggtgagggaacactgtccagagagtggagaagaggctgtgattttgctggaggatctggagagagagctcgatgaaccacaacatgagatggtggcccacagacacagacaagaagtcctctgtaaagagatggtgcctctagcagagcagacaccactgacccttcagtcccagcctaaggagccacagctcacatgtgactctgctcagaagtgccattctattggagagacagacttctccctgagtaccaccctggaagctttctggacttctgatgcatggtacatgaggaaggctttcagggatcgctgtggagcacagcttcagagaatggacttcaaggtttgacagacaggttca

SEQ ID NO: 3866 - protein, 227 aa, Homo sapiens
MNTNSKEVLSLGVQVPEAWEELLTMKVEAKSHLQWQESRLKRSNPLAREIFRRHFRQLCYQETPGPREALTRLQELCYQWLRPHVSTKEQILDLLVLEQFLSILPKELQGWVREHCPESGEEAVILLEDLERELDEPQHEMVAHRHRQEVLCKEMVPLAEQTPLTLQSQPKEPQLTCDSAQKCHSIGETDFSLSTTLEAFWTSDAWYMRKAFRDRCGAQLQRMDFKV

SEQ ID NO: 3867 - DNA, 1691 bp, Homo sapiens
gcctctgctccgtccgccttcgaggagaggtcggcatctttgttccctgcccggccattgttcgtgccgcgcttctagcaacgccgggccggtaaccccctctccctccttgcgcgttccgggtctcgcaagcgcctccaaggtttgtcttgaagcatagctccagctggagggtaccttttaagctgttcaaggtcaagatgaatacaaactcaaaggaggttttatccctgggtgttcaagttcccgaggcatgggaagaacttctgacaatgaaagtggaagcaaaaagtcaccttcaatggcaggaatccagactgaaacgcagtaatccactggcaagggaaatcttccgaaggcactttcgacagctgtgctaccaagagacccctggaccaagggaggctcttactcgactccaggaactttgctaccagtggttgaggccacatgtgagcacaaaggagcagattttggatctgctggtgctggagcagtttctatccattctgcccaaggagctccagggctgggtgagggaacactgtccagagagtggagaagaggctgtgattttgctggaggatctggagagagagctcgatgaaccacaacatgagatggtggcccacagacacagacaagaagtcctctgtaaagagatggtgcctctagcagagcagacaccactgacccttcagtcccagcctaaggagccacagctcacatgtgactctgctcagaagtgccattctattggagagacagatgaagtaaccaagactgaggacagagagttggtgctaaggaaagactgtcctaagatagtggaaccacatgggaaaatgtttaatgagcagacctgggaggtatcacagcaggatccctcacatggagaagttggtgaacataaggataggatagagaggcagtggggaaacctcttaggagaggggcaacacaaatgtgatgaatgtgggaagagctttactcagagctcaggtctcattcgacatcaaagaattcatactggagaaagaccttatgaatgtaatgaatgtgggaaagccttcagtcgaagttctggtctttttaatcaccgaggaatccacaatatacagaaacggtaccactgcaaggagtgtgggaaggtcttcagtcagagtgcgggtcttatccagcatcagagaatccacaaaggagaaaagccgtatcagtgcagccagtgcagtaagagctacagtcggcgttcatttctcattgaacatcagagaagccacacaggggagcgacctcaccagtgcattgaatgtgggaaaagctttaatcgacactgcaacctcattcgccatcagaagatccacacagtggctgagctggtctagggcttggctatgagcaagttttccagatcaccacccaagttgtgtggggcaggttgagactagaaaatgcctctttcttcctttctccatgaaatgtgtttgaaacaaatcctgacttaaggcccagggacttccttaaaggaaagttgggtgtttgaagctactgttttctcttttgttcattttacctctttcttactcttactagctgtgtccctcttatttataatttatttatttttttgagatggctgctaaacccttctaataatataataaatggcactgccacagccaacatgcctg

SEQ ID NO: 3868 - protein, 394 aa, Homo sapiens; identical to SEQ ID NO: 436

SEQ ID NO: 3869 - DNA, 1632 bp, Homo sapiens
ggagaggtcggcatctttgttccctgcccggccattgttcgtgccgcgcttctagcaacgccgggccggcaagcgcctccaaggtttgtcttgaagcatagctccagctggagggtaccttttaagctgttcaaggtcaagatgaatacaaactcaaaggaggttttatccctgggtgttcaagttcccgaggcatgggaagaacttctgacaatgaaagtggaagcaaaaagtcaccttcaatggcaggaatccagactgaaacgcagtaatccactggcaagggaaatcttccgaaggcactttcgacagctgtgctaccaagagacccctggaccaagggaggctcttactcgactccaggaactttgctaccagtggttgaggccacatgtgagcacaaaggagcagattttggatctgctggtgctggagcagtttctatccattctgcccaaggagctccagggctgggtgagggaacactgtccagagagtggagaagaggctgtgattttgctggaggatctggagagagagctcgatgaaccacaacatgagatggtggcccacagacacagacaagaagtcctctgtaaagagatggtgcctctagcagagcagacaccactgacccttcagtcccagcctaaggagccacagctcacatgtgactctgctcagaagtgccattctattggagagacagatgaagtaaccaagactgaggacagagagttggtgctaaggaaagactgtcctaagatagtggaaccacatgggaaaatgtttaatgagcagacctgggaggtatcacagcaggatccctcacatggagaagttggtgaacataaggataggatagagaggcagtggggaaacctcttaggagaggggcaacacaaatgtgatgaatgtgggaagagctttactcagagctcaggtctcattcgacatcaaagaattcatactggagaaagaccttatgaatgtaatgaatgtgggaaagccttcagtcgaagttctggtctttttaatcaccgaggaatccacaatatacagaaacggtaccactgcaaggagtgtgggaaggtcttcagtcagagtgcgggtcttatccagcatcagagaatccacaaaggagaaaagccgtatcagtgcagccagtgcagtaagagctacagtcggcgttcatttctcattgaacatcagagaagccacacaggggagcgacctcaccagtgcattgaatgtgggaaaagctttaatcgacactgcaacctcattcgccatcagaagatccacacagtggctgagctggtctagggcttggctatgagcaagttttccagatcaccacccaagttgtgtggggcaggttgagactagaaaatgcctctttcttcctttctccatgaaatgtgtttgaaacaaatcctgacttaaggcccagggacttccttaaaggaaagttgggtgtttgaagctactgttttctcttttgttcattttacctctttcttactcttactagctgtgtccctcttatttataatttatttatttttttgagatggctgctaaacccttctaataatataataaatggcactgccacagccaacatgcctg

SEQ ID NO: 3870 - protein, 394 aa, Homo sapiens; identical to SEQ ID NO: 436

SEQ ID NO: 3871 - DNA, 2624 bp, Homo sapiens
gagaggtcggcatctttgttccctgcccggccattgttcgtgccgcgcttctagcaacgccgggccggcaagcgcctccaaggtttgtcttgaagcatagctccagctggagggtaccttttaagctgttcaaggtcaagatgaatacaaactcaaaggaggttttatccctgggtgttcaagttcccgaggcatgggaagaacttctgacaatgaaagtggaagcaaaaagtcaccttcaatggcaggaatccagactgaaacgcagtaatccactggcaagggaaatcttccgaaggcactttcgacagctgtgctaccaagagacccctggaccaagggaggctcttactcgactccaggaactttgctaccagtggttgaggccacatgtgagcacaaaggagcagattttggatctgctggtgctggagcagtttctatccattctgcccaaggagctccagggctgggtgagggaacactgtccagagagtggagaagaggctgtgattttgctggaggatctggagagagagctcgatgaaccacaacatgagatggtggcccacagacacagacaagaagtcctctgtaaagagatggtgcctctagcagagcagacaccactgacccttcagtcccagcctaaggagccacagctcacatgtgactctgctcagaagtgccattctattggagagacaggtgagggacagcatttatttgatgttgaacgaatcccacctggtcaagcaaaaacaaacaataaacccagagctgggaaaacaggagacccaaagactccttaccagatagcagtaatggtcagttcttctgagagcctagtgtgctcatctttgacccttctccctgcgtgcagacttctccctgagtaccaccctggaagctttctggacttctgatgcatggtacatgaggaaggctttcagggatcgctgtggagcacagcttcagagaatggacttcaaggtttgacagacaggttcagatcctggcatcgcctcatggaagctgcttgtattgggcagattacttaaccacttgacctcagatccctcatctacaaaatggggttgataatagctttggtttagtctacttgcgctgccttaagagaataccacagactggttgtctttaacagaaatttattttctcacattttcaaaggctagtagtccaagatcaagataccatcaggtttggtttctggtgaggcctcttcctggcttatagatggccatcttcttgctgtatcctcacatggcctttcttctgtatgcatacagagagagagcaagctctctcatcttataaggacagataccattcctacccgatagggcccttccttataacctcatttaacttttaataccttcctcaaggccctatctccaaatataatcatattgaggggttaggacctcagcatatgtgagggaatacaatttagtccgtaaccagtatgtacctcagaaagtcattgtgagtatcaaatacaatttatgaaaagcacttggcatgcattatgcttaatacatggtcactattgtcacaaatcaccagtgccacccttgctgatttgggttcatacttggagtagaaagatatcagatatgcttagtaagtggcagaactgtatgggagaatccagtgaaatcagactttgccatttccttctctgtaatcttctgagtggtggcagtgaccacccttgtggatatagtactgagcacttgggactgagtcagctgctttcccattctagccctccctgcaggaattggctctagcttgtctgatttcccacacataaaatcatgccctcttactgactttttgttaatgttctgacaatcaatctgtagcaaggttctactgttttcagtttcatattacccctatatgcatcaaagctgcaacttcccttgcctctttgtccctaggttctgtttatttcatttaccctagcaattatggatttctattacatggaactcatctcttgatttaaattaaagtgtatgtgttgagtaaattctgtgcagaccttcttatagcttctgtgactttatcagattaaaattgcttctgatatcattttccctctttatgagcatctttccagtcaatttgtttctttcttcttcctctctctatgaacttggaccttttattttctagccacttcctttcttctaccttccaaactgcatctagaaccctgctgagtatccccttttccaagaagcacatctatattttccacctatccacttatctatccatctatcattcaacaagtgtttattaagcatctactatggctgtaggagaatatccagagggcatctggagactggagtgttctccttgtaggatatcagcgcaggtatgtgttacaaatttagataaagccaatattataaaacaacatagtgtttgaaattacaaggaccaaattcaagttccagcttttcaaattcttagccaagcaatatttaataggtaagcttgagtttctttttaagttatgctgattatttaaaaatccaaataatacaaaagtttatatagtaaaaaatggaagttttcca

SEQ ID NO: 3872 - protein, 261 aa, Homo sapiens
MNTNSKEVLSLGVQVPEAWEELLTMKVEAKSHLQWQESRLKRSNPLAREIFRRHFRQLCYQETPGPREALTRLQELCYQWLRPHVSTKEQILDLLVLEQFLSILPKELQGWVREHCPESGEEAVILLEDLERELDEPQHEMVAHRHRQEVLCKEMVPLAEQTPLTLQSQPKEPQLTCDSAQKCHSIGETGEGQHLFDVERIPPGQAKTNNKPRAGKTGDPKTPYQIAVMVSSSESLVCSSLTLLPACRLLPEYHPGSFLDF

SEQ ID NO: 3873 - DNA, 2649 bp, Homo sapiens
atctttgttccctgcccggccattgttcgtgccgcgcttctagcaacgccgggccggtaaccccctctccctccttgcgcgttccgggtctcgcaagcgcctccaaggtttgtcttgaagcatagctccagctggagggtaccttttaagctgttcaaggtcaagatgaatacaaactcaaaggaggttttatccctgggtgttcaagttcccgaggcatgggaagaacttctgacaatgaaagtggaagcaaaaagtcaccttcaatggcaggaatccagactgaaacgcagtaatccactggcaagggaaatcttccgaaggcactttcgacagctgtgctaccaagagacccctggaccaagggaggctcttactcgactccaggaactttgctaccagtggttgaggccacatgtgagcacaaaggagcagattttggatctgctggtgctggagcagtttctatccattctgcccaaggagctccagggctgggtgagggaacactgtccagagagtggagaagaggctgtgattttgctggaggatctggagagagagctcgatgaaccacaacatgagatggtggcccacagacacagacaagaagtcctctgtaaagagatggtgcctctagcagagcagacaccactgacccttcagtcccagcctaaggagccacagctcacatgtgactctgctcagaagtgccattctattggagagacaggtgagggacagcatttatttgatgttgaacgaatcccacctggtcaagcaaaaacaaacaataaacccagagctgggaaaacaggagacccaaagactccttaccagatagcagtaatggtcagttcttctgagagcctagtgtgctcatctttgacccttctccctgcgtgcagacttctccctgagtaccaccctggaagctttctggacttctgatgcatggtacatgaggaaggctttcagggatcgctgtggagcacagcttcagagaatggacttcaaggtttgacagacaggttcagatcctggcatcgcctcatggaagctgcttgtattgggcagattacttaaccacttgacctcagatccctcatctacaaaatggggttgataatagctttggtttagtctacttgcgctgccttaagagaataccacagactggttgtctttaacagaaatttattttctcacattttcaaaggctagtagtccaagatcaagataccatcaggtttggtttctggtgaggcctcttcctggcttatagatggccatcttcttgctgtatcctcacatggcctttcttctgtatgcatacagagagagagcaagctctctcatcttataaggacagataccattcctacccgatagggcccttccttataacctcatttaacttttaataccttcctcaaggccctatctccaaatataatcatattgaggggttaggacctcagcatatgtgagggaatacaatttagtccgtaaccagtatgtacctcagaaagtcattgtgagtatcaaatacaatttatgaaaagcacttggcatgcattatgcttaatacatggtcactattgtcacaaatcaccagtgccacccttgctgatttgggttcatacttggagtagaaagatatcagatatgcttagtaagtggcagaactgtatgggagaatccagtgaaatcagactttgccatttccttctctgtaatcttctgagtggtggcagtgaccacccttgtggatatagtactgagcacttgggactgagtcagctgctttcccattctagccctccctgcaggaattggctctagcttgtctgatttcccacacataaaatcatgccctcttactgactttttgttaatgttctgacaatcaatctgtagcaaggttctactgttttcagtttcatattacccctatatgcatcaaagctgcaacttcccttgcctctttgtccctaggttctgtttatttcatttaccctagcaattatggatttctattacatggaactcatctcttgatttaaattaaagtgtatgtgttgagtaaattctgtgcagaccttcttatagcttctgtgactttatcagattaaaattgcttctgatatcattttccctctttatgagcatctttccagtcaatttgtttctttcttcttcctctctctatgaacttggaccttttattttctagccacttcctttcttctaccttccaaactgcatctagaaccctgctgagtatccccttttccaagaagcacatctatattttccacctatccacttatctatccatctatcattcaacaagtgtttattaagcatctactatggctgtaggagaatatccagagggcatctggagactggagtgttctccttgtaggatatcagcgcaggtatgtgttacaaatttagataaagccaatattataaaacaacatagtgtttgaaattacaaggaccaaattcaagttccagcttttcaaattcttagccaagcaatatttaataggtaagcttgagtttctttttaagttatgctgattatttaaaaatccaaataatacaaaagtttatatagtaaaaaatggaagttttcca

SEQ ID NO: 3874 - protein, 261 aa, Homo sapiens; identical to SEQ ID NO: 3872

SEQ ID NO: 3875 - DNA, 2305 bp, Homo sapiens
agagtgatcactttcactcccaaagacatcctttggtgatacttactgtgggattcagagtggggtgcagaggacgaccctgcaaaggcacggactataagagagatctgtgcagctgcgcctcagggggtgtcctgggcccctgggcatgacaggagggggaccacttgcagttctactggaaaatttaccacccttccagaatcctctgaagatatacaggtcgcaactagagtgagacccgagtactgccttgggtcagaatggctagagaaccgagaaaaaacgcagccctggacgcccagtctgcagaagaccagacggggctcctgaccgtgaaggtggagaaggaggaagcctccgccttgacggcggaggtgagagcaccctgcagccctgctcggggccccgaacgctcccgccagcgcttccgaggcttccgctacccggaggctgcgggcccccgcgaggcgttgagccggctccgagaactctgcggacaatggctgcagcctgagatgcacagcaaggagcagatcctggagctgctggtgctggagcagttcctgaccatcctgccggggaatctgcagagctgggtgcgggagcagcatccagagagcggggaggaggtggtggtgctattggagtatttggagaggcagctggatgagccggcgccgcaggttcccgttggtgaccaggggcaagaactgctctgttgcaagatggcactattgacacaaactcaagggtctcaaagtagccagtgccagccaatgaaggctctgttcaagcatgaatctctgggatcccagcccttacacgatagagttctccaggttcctgggcttgcccagggagggtgctgcagagaagatgcaatggtagcttccaggctcactccagggtcccagggtttgctgaaaatggaagatgtggccctgaccctcactcctgggtggacacagctggattcatctcaggtgaacctctacagagatgaaaagcaggagaaccatagcagcctggtctcccttggtggtgaaatacagactaagagcagggacttgcctccagtcaagaagcttccagaaaaggagcatgggaagatatgccacctgagggaagacattgcccagattcctacacatgcagaagctggtgaacaggagggcaggttacaaagaaagcagaaaaatgccatagggagtaggcgacattattgccatgaatgtggaaagagttttgctcaaagttcaggcctgactaaacacaggagaatccacactggtgagaaaccctatgaatgtgaagactgtggaaagaccttcattgggagctctgcccttgtcattcatcagagagtccacactggtgagaagccatatgagtgtgaagaatgtggtaaggtcttcagtcacagctcaaaccttatcaaacaccagagaacccacactggggagaagccctatgagtgtgatgactgtgggaagaccttcagccagagctgcagcctccttgaacatcacaaaattcatactggggagaagccataccagtgcaatatgtgtggcaaagcctttaggcggaattcacatctcctgagacatcagaggattcatggtgataaaaatgttcagaatcctgagcacggggagtcctgggaaagtcagggtaggacggaaagccagtgggaaaatactgaggctcccgtgtcttataaatgtaatgagtgtgagagaagtttcacacggaatagaagtcttattgaacatcagaaaatccacactggtgagaaaccctatcagtgtgacacatgtggaaaaggtttcactcgaacttcataccttgttcaacatcagagaagccatgtagggaaaaaaactctttcacagtgacccatggtattcatgccaacattggtgctcatttgtcactgaactgaagccaccctggagcccttaatggttacagaaattgtggaccagggctttatttaccactatacatcatcgggtattagaaaatgtagtctggctgagacgatgagttatcttctacattctagaaagtgattggaagaagtcatttgataagaggccatgggagagtggtctggaagttgtaggacctaaaatagtttgttctcacccagtgtatttaaatggccttctggacttgttaattgccctcagccagcactttaggacatctggttggatggctctgatgtggggggctgctgctctgaccattcattttgcctctaatgaatctttcacaaattggtcagatccatgag

SEQ ID NO: 3876 - protein, 545 aa, Homo sapiens; identical to SEQ ID NO: 438

SEQ ID NO: 3877 - DNA, 1639 bp, Homo sapiens; identical to SEQ ID NO: 439

SEQ ID NO: 3878 - protein, 402 aa, Homo sapiens; identical to SEQ ID NO: 440

SEQ ID NO: 3879 - DNA, 2362 bp, Homo sapiens
ccttctgcgatgcctaagcggcagcaccatcgagccaaggtcctccagcgttcctagagcggagaagaaagcgctccgaagagctagagctgacactcggcgatgagctaagacgctgtttcagagcgtttgggtcctctgaggccccttgaccaggagtgtctctgaagatacagtccaaagaaagttctccaaaacaaggagaacagtctgaagctggggatggcaacagcattggacccagaccagccaaagaaacaaaaaatacttgtggaggagatggcccctctgaaaggagtacaggaacagcaggttcggcatgagtgtgaagttacaaagcctgagaaagagaagggtgaggagacaaggattgagaatgggaagcttattgtagtaacagactcttgtggaagagtagagtcatctgggaaaatatctgaacccatggaggctcataatgagggctctaacttggaaaggcatcaggccaagcccaaagagaagattgagtataaatgctcagaacgtgagcagagattcatccagcacttggacctgattgaacatgcgagtacacacacgggaaagaaactctgcgagtctgatgtgtgtcagagttccagtcttacaggacataagaaagtcctctctagagagaaaggtcatcagtgtcatgagtgtgggaaagcctttcagaggagttcacacctcgtcagacatcagaaaatccatcttggtgagaagccttatcagtgcaatgagtgtggcaaagtctttagccagaatgcaggccttttggaacatctcagaattcatactggagagaaaccttatctatgtatccattgtggaaaaaattttaggcgcagctctcaccttaatcgacatcagagaattcacagtcaggaggagccctgtgagtgcaaggagtgtggaaaaacctttagtcaggccttactcctcacccaccatcagagaatccatagtcactccaaaagccatcaatgtaacgagtgtggaaaagctttcagtttgacctcagaccttattcgacaccacagaattcatactggagaaaaacctttcaagtgtaacatatgccagaaagccttccgactaaactcacaccttgctcagcatgtaagaatccacaatgaagaaaaaccctatcagtgtagtgaatgtggagaagccttcaggcaaaggtcaggtctttttcaacatcagagatatcaccacaaagacaaactggcttgatgaggtgttctctccttgtagaacatcagagaaggcacattgactagcaaacagcactttaggaaaagtcaccgtagcccactgtggcatcagaaaattcttgggggctgagttggaggctccctgcctctattctctctcctttgctttccttgaagtcagctttggaccacaataatttcactgtagatgatatgctaggatcaaagttaaacagcattcttcactgcaggacatctcagagcatgtaacataactgcatgattatatactctaagcaatagagagcttcatgactgagtaagagttttgaagtcagcagtgaatcaagtgcccacagatttgcaggcttaagcagaacaagggaagattgatatttttggatatgctatagcagctttctcctatgaaataaaactgatgatgtttggaagtatactactctcaaaggtgtctttaaagtacaggttaatggtgaacattttcccccagtggcttcacctcattcctcccactggccttaccccttccttccccagtggaagcattttcaaaagcaaagataattttcgctggtgaacttcagaacttgccttcagggttagcttcatgtaattttaccatttcccatccccattccccaccacattatgtcaagattcaagttataaattaacgttttacttagactttgaaagagatttcatgagtaatttgaatgaaccttgctgaattaatctgaatagcaactgtctgacttgataactccagtgccagtatagtggctgctgcatagacactattcagtaaatgtctgatgaaagaaattggactttttccctttaatactgatgatgcaattttgaaatgttgcttgttctggaatacttcggaagttaaacaataaagtcagcttggagaggagatcatgatctttatactgtgaatagcagaatgtcacagatgaagaatattaaaattaggggcgtccactccaaaacatatcaccagagtgacaacttcagccctcagcctctgcaatccatatatatcctggtcttgggagtccatagaatactgtttccttctaataaaggtttcaaac

SEQ ID NO: 3880 - protein, 344 aa, Homo sapiens
MATALDPDQPKKQKILVEEMAPLKGVQEQQVRHECEVTKPEKEKGEETRIENGKLIVVTDSCGRVESSGKISEPMEAHNEGSNLERHQAKPKEKIEYKCSEREQRFIQHLDLIEHASTHTGKKLCESDVCQSSSLTGHKKVLSREKGHQCHECGKAFQRSSHLVRHQKIHLGEKPYQCNECGKVFSQNAGLLEHLRIHTGEKPYLCIHCGKNFRRSSHLNRHQRIHSQEEPCECKECGKTFSQALLLTHHQRIHSHSKSHQCNECGKAFSLTSDLIRHHRIHTGEKPFKCNICQKAFRLNSHLAQHVRIHNEEKPYQCSECGEAFRQRSGLFQHQRYHHKDKLA

SEQ ID NO: 3881 - DNA, 2499 bp, Homo sapiens
ccttctgcgatgcctaagcggcagcaccatcgagccaaggtcctccagcgttcctagagcggagaagaaagcgctccgaagagctagagctgacactcggcgatgagctaagacgctgtttcagagcgtttgggtcctctgaggccccttgaccaggagtgtctctgaagatacagtccaaagaaagttctccaaaacaaggagaacagtctgaagctggggatggcaacagcattggacccagaccagccaaagaaacaaaaaatacttgtggaggagatggcccctctgaaaggagtacaggaacagcaggttcggcatgagtgtgaagttacaaagcctgagaaagagaagggtgaggagacaaggattgagaatgggaagcttattgtagtaacagactcttgtggaagagtagagtcatctgggaaaatatctgaacccatggaggctcataatgagggctctaacttggaaaggcatcaggccaagcccaaagagaagattgagtataaatgctcagaacgtgagcagagattcatccagcacttggacctgattgaacatgcgagtacacacacgggaaagaaactctgcgagtctgatgtgtgtcagagttccagtcttacaggacataagaaagtcctctctagagagaaaggtcatcagtgtcatgagtgtgggaaagcctttcagaggagttcacacctcgtcagacatcagaaaatccatcttggtgagaagccttatcagtgcaatgagtgtggcaaagtctttagccagaatgcaggccttttggaacatctcagaattcatactggagagaaaccttatctatgtatccattgtggaaaaaattttaggcgcagctctcaccttaatcgacatcagagaattcacagtcaggaggagccctgtgagtgcaaggagtgtggaaaaacctttagtcaggccttactcctcacccaccatcagagaatccatagtcactccaaaagccatcaatgtaacgagtgtggaaaagctttcagtttgacctcagaccttattcgacaccacagaattcatactggagaaaaacctttcaagtgtaacatatgccagaaagccttccgactaaactcacaccttgctcagcatgtaagaatccacaatgaagaaaaaccctatcagtgtagtgaatgtggagaagccttcaggcaaaggtcaggtctttttcaacatcagagatatcaccacaaagacaaactggcttgatgaggtgttctctccttgtagaacatcagagaaggcacattgactagcaaacagcactttaggaaaagtcaccgtagcccactgtggcatcagaaaattcttgggggctgagttggaggctccctgcctctattctctctcctttgctttccttgaagtcagctttggaccacaataatttcactgtagatgatatgctaggatcaaagttaaacagcattcttcactgcaggacatctcagagcatgtaacataactgcatgattatatactctaagcaatagagagcttcatgactgagtaagagttttgaagtcagcagtgaatcaagtgcccacagatttgcaggcttaagcagaacaagggaagattgatatttttggatatgctatagcagctttctcctatgaaataaaactgatgatgtttggaagtatactactctcaaaggtgtctttaaagtacaggttaatggtgaacattttcccccagtggcttcacctcattcctcccactggccttaccccttccttccccagtggaagcattttcaaaagcaaagataattttcgctggtgaacttcagaacttgccttcagggttagcttcatgtaattttaccatttcccatccccattccccaccacattatgtcaagattcaagttataaattaacgttttacttagactttgaaagagatttcatgagtaatttgaatgaaccttgctgaattaatctgaatagcaactgtctgacttgataactccagtgccagtatagtggctgctgcatagacactattcagtaaatgtctgatgaaagaaattggactttttccctttaatactgatgatgcaattttgaaatgttgcttgttctggaatacttcggaagttaaacaataaagtcagcttggagaggagatcatgatctttatactgtgaatagcagaatgtcacagatgaagaatattaaaattaggggcgtccactccaaaacatatcaccagagtgacaacttcagccctcagcctctgcaatccatatatatcctggtcttgggagtccatagaatactgtttccttctaataaaggtttcaaacaaatccctgcagatttatttaaagtgtttgtggaagataattttccatataagctgtgcagtattctatggtatatgtccccattgttcatcatttacgtcatttacagtttgatcaccataaacaatttttcagtg

SEQ ID NO: 3882 - protein, 344 aa, Homo sapiens; identical to SEQ ID NO: 3880

SEQ ID NO: 3883 - DNA, 2046 bp, Homo sapiens
agagcggagaagaaagcgctccgaagagctagagctgacactcggcgatgagctaagacgctgtttcagagcgtttgggtcctctgaggccccttgaccaggagtgtctctgaagatacagtccaaagaaagttctccaaaacaaggagaacagtctgaagctggggatggcaacagcattggtgagtgcccattccctggctcccctgaatctgaagaaggaggggcttcgggtagtgagggaggatcactactctacttgggaacagggattcaagctgcaaggaaacagtaaaggccttggacaggagccattgtgcaaacaattcaggcagttgcgttatgaagagaccacaggacctcgagaagcactaagtcggctccgggagctctgtcaacagtgctacagcccgagacccataccaaggagcagatcctggagctgctggtgctggagcagtttctgatcatcctgcctaaggagctccaggcccgggtgcaggagcatcacccagagagcagggaggacgtggttgttgttctggaggatttgcagctggatcttggagaaacaggacaacaggtggacccagaccagccaaagaaacaaaaaatacttgtggaggagatggcccctctgaaaggagtacaggaacagcaggttcggcatgagtgtgaagttacaaagcctgagaaagagaagggtgaggagacaaggattgagaatgggaagcttattgtagtaacagactcttgtggaagagtagagtcatctgggaaaatatctgaacccatggaggctcataatgagggctctaacttggaaaggcatcaggccaagcccaaagagaagattgagtataaatgctcagaacgtgagcagagattcatccagcacttggacctgattgaacatgcgagtacacacacgggaaagaaactctgcgagtctgatgtgtgtcagagttccagtcttacaggacataagaaagtcctctctagagagaaaggtcatcagtgtcatgagtgtgggaaagcctttcagaggagttcacacctcgtcagacatcagaaaatccatcttggtgagaagccttatcagtgcaatgagtgtggcaaagtctttagccagaatgcaggccttttggaacatctcagaattcatactggagagaaaccttatctatgtatccattgtggaaaaaattttaggcgcagctctcaccttaatcgacatcagagaattcacagtcaggaggagccctgtgagtgcaaggagtgtggaaaaacctttagtcaggccttactcctcacccaccatcagagaatccatagtcactccaaaagccatcaatgtaacgagtgtggaaaagctttcagtttgacctcagaccttattcgacaccacagaattcatactggagaaaaacctttcaagtgtaacatatgccagaaagccttccgactaaactcacaccttgctcagcatgtaagaatccacaatgaagaaaaaccctatcagtgtagtgaatgtggagaagccttcaggcaaaggtcaggtctttttcaacatcagagatatcaccacaaagacaaactggcttgatgaggtgttctctccttgtagaacatcagagaaggcacattgactagcaaacagcactttaggaaaagtcaccgtagcccactgtggcatcagaaaattcttgggggctgagttggaggctccctgcctctattctctctcctttgctttccttgaagtcagctttggaccacaataatttcactgtagatgatatgctaggatcaaagttaaacagcattcttcactgcaggacatctcagagcatgtaacataactgcatgattatatactctaagcaatagagagcttcatgactgagtaagagttttgaagtcagcagtgaatcaagtgcccacagatttgcaggcttaagcagaacaagggaagattgatatttttggatatgctatagcagctttctcctatgaaataaaactgatgatgtttggaagtatact

SEQ ID NO: 3884 - protein, 325 aa, Homo sapiens [sequence omitted]

SEQ ID NO: 3885 - DNA, 2711 bp, Homo sapiens
agagcggagaagaaagcgctccgaagagctagagctgacactcggcgatgagctaagacgctgtttcagagcgtttgggtcctctgaggccccttgaccaggagtgtctctgaagatacagtccaaagaaagttctccaaaacaaggagaacagtctgaagctggggatggcaacagcattggtgagtgcccattccctggctcccctgaatctgaagaaggaggggcttcgggtagtgagggaggatcactactctacttgggaacagggattcaagctgcaaggaaacagtaaaggccttggacaggagccattgtgcaaacaattcaggcagttgcgttatgaagagaccacaggacctcgagaagcactaagtcggctccgggagctctgtcaacagtgctacagcccgagacccataccaaggagcagatcctggagctgctggtgctggagcagtttctgatcatcctgcctaaggagctccaggcccgggtgcaggagcatcacccagagagcagggaggacgtggttgttgttctggaggatttgcagctggatcttggagaaacaggacaacaggtggacccagaccagccaaagaaacaaaaaatacttgtggaggagatggcccctctgaaaggagtacaggaacagcaggttcggcatgagtgtgaagttacaaagcctgagaaagagaagggtgaggagacaaggattgagaatgggaagcttattgtagtaacagactcttgtggaagagtagagtcatctgggaaaatatctgaacccatggaggctcataatgagggctctaacttggaaaggcatcaggccaagcccaaagagaagattgagtataaatgctcagaacgtgagcagagattcatccagcacttggacctgattgaacatgcgagtacacacacgggaaagaaactctgcgagtctgatgtgtgtcagagttccagtcttacaggacataagaaagtcctctctagagagaaaggtcatcagtgtcatgagtgtgggaaagcctttcagaggagttcacacctcgtcagacatcagaaaatccatcttggtgagaagccttatcagtgcaatgagtgtggcaaagtctttagccagaatgcaggccttttggaacatctcagaattcatactggagagaaaccttatctatgtatccattgtggaaaaaattttaggcgcagctctcaccttaatcgacatcagagaattcacagtcaggaggagccctgtgagtgcaaggagtgtggaaaaacctttagtcaggccttactcctcacccaccatcagagaatccatagtcactccaaaagccatcaatgtaacgagtgtggaaaagctttcagtttgacctcagaccttattcgacaccacagaattcatactggagaaaaacctttcaagtgtaacatatgccagaaagccttccgactaaactcacaccttgctcagcatgtaagaatccacaatgaagaaaaaccctatcagtgtagtgaatgtggagaagccttcaggcaaaggtcaggtctttttcaacatcagagatatcaccacaaagacaaactggcttgatgaggtgttctctccttgtagaacatcagagaaggcacattgactagcaaacagcactttaggaaaagtcaccgtagcccactgtggcatcagaaaattcttgggggctgagttggaggctccctgcctctattctctctcctttgctttccttgaagtcagctttggaccacaataatttcactgtagatgatatgctaggatcaaagttaaacagcattcttcactgcaggacatctcagagcatgtaacataactgcatgattatatactctaagcaatagagagcttcatgactgagtaagagttttgaagtcagcagtgaatcaagtgcccacagatttgcaggcttaagcagaacaagggaagattgatatttttggatatgctatagcagctttctcctatgaaataaaactgatgatgtttggaagtatactactctcaaaggtgtctttaaagtacaggttaatggtgaacattttcccccagtggcttcacctcattcctcccactggccttaccccttccttccccagtggaagcattttcaaaagcaaagataattttcgctggtgaacttcagaacttgccttcagggttagcttcatgtaattttaccatttcccatccccattccccaccacattatgtcaagattcaagttataaattaacgttttacttagactttgaaagagatttcatgagtaatttgaatgaaccttgctgaattaatctgaatagcaactgtctgacttgataactccagtgccagtatagtggctgctgcatagacactattcagtaaatgtctgatgaaagaaattggactttttccctttaatactgatgatgcaattttgaaatgttgcttgttctggaatacttcggaagttaaacaataaagtcagcttggagaggagatcatgatctttatactgtgaatagcagaatgtcacagatgaagaatattaaaattaggggcgtccactccaaaacatatcaccagagtgacaacttcagccctcagcctctgcaatccatatatatcctggtcttgggagtccatagaatactgtttccttctaataaaggtttcaaac

SEQ ID NO: 3886 - protein, 325 aa, Homo sapiens [sequence omitted]

SEQ ID NO: 3887 - DNA, 2848 bp, Homo sapiens
agagcggagaagaaagcgctccgaagagctagagctgacactcggcgatgagctaagacgctgtttcagagcgtttgggtcctctgaggccccttgaccaggagtgtctctgaagatacagtccaaagaaagttctccaaaacaaggagaacagtctgaagctggggatggcaacagcattggtgagtgcccattccctggctcccctgaatctgaagaaggaggggcttcgggtagtgagggaggatcactactctacttgggaacagggattcaagctgcaaggaaacagtaaaggccttggacaggagccattgtgcaaacaattcaggcagttgcgttatgaagagaccacaggacctcgagaagcactaagtcggctccgggagctctgtcaacagtgctacagcccgagacccataccaaggagcagatcctggagctgctggtgctggagcagtttctgatcatcctgcctaaggagctccaggcccgggtgcaggagcatcacccagagagcagggaggacgtggttgttgttctggaggatttgcagctggatcttggagaaacaggacaacaggtggacccagaccagccaaagaaacaaaaaatacttgtggaggagatggcccctctgaaaggagtacaggaacagcaggttcggcatgagtgtgaagttacaaagcctgagaaagagaagggtgaggagacaaggattgagaatgggaagcttattgtagtaacagactcttgtggaagagtagagtcatctgggaaaatatctgaacccatggaggctcataatgagggctctaacttggaaaggcatcaggccaagcccaaagagaagattgagtataaatgctcagaacgtgagcagagattcatccagcacttggacctgattgaacatgcgagtacacacacgggaaagaaactctgcgagtctgatgtgtgtcagagttccagtcttacaggacataagaaagtcctctctagagagaaaggtcatcagtgtcatgagtgtgggaaagcctttcagaggagttcacacctcgtcagacatcagaaaatccatcttggtgagaagccttatcagtgcaatgagtgtggcaaagtctttagccagaatgcaggccttttggaacatctcagaattcatactggagagaaaccttatctatgtatccattgtggaaaaaattttaggcgcagctctcaccttaatcgacatcagagaattcacagtcaggaggagccctgtgagtgcaaggagtgtggaaaaacctttagtcaggccttactcctcacccaccatcagagaatccatagtcactccaaaagccatcaatgtaacgagtgtggaaaagctttcagtttgacctcagaccttattcgacaccacagaattcatactggagaaaaacctttcaagtgtaacatatgccagaaagccttccgactaaactcacaccttgctcagcatgtaagaatccacaatgaagaaaaaccctatcagtgtagtgaatgtggagaagccttcaggcaaaggtcaggtctttttcaacatcagagatatcaccacaaagacaaactggcttgatgaggtgttctctccttgtagaacatcagagaaggcacattgactagcaaacagcactttaggaaaagtcaccgtagcccactgtggcatcagaaaattcttgggggctgagttggaggctccctgcctctattctctctcctttgctttccttgaagtcagctttggaccacaataatttcactgtagatgatatgctaggatcaaagttaaacagcattcttcactgcaggacatctcagagcatgtaacataactgcatgattatatactctaagcaatagagagcttcatgactgagtaagagttttgaagtcagcagtgaatcaagtgcccacagatttgcaggcttaagcagaacaagggaagattgatatttttggatatgctatagcagctttctcctatgaaataaaactgatgatgtttggaagtatactactctcaaaggtgtctttaaagtacaggttaatggtgaacattttcccccagtggcttcacctcattcctcccactggccttaccccttccttccccagtggaagcattttcaaaagcaaagataattttcgctggtgaacttcagaacttgccttcagggttagcttcatgtaattttaccatttcccatccccattccccaccacattatgtcaagattcaagttataaattaacgttttacttagactttgaaagagatttcatgagtaatttgaatgaaccttgctgaattaatctgaatagcaactgtctgacttgataactccagtgccagtatagtggctgctgcatagacactattcagtaaatgtctgatgaaagaaattggactttttccctttaatactgatgatgcaattttgaaatgttgcttgttctggaatacttcggaagttaaacaataaagtcagcttggagaggagatcatgatctttatactgtgaatagcagaatgtcacagatgaagaatattaaaattaggggcgtccactccaaaacatatcaccagagtgacaacttcagccctcagcctctgcaatccatatatatcctggtcttgggagtccatagaatactgtttccttctaataaaggtttcaaacaaatccctgcagatttatttaaagtgtttgtggaagataattttccatataagctgtgcagtattctatggtatatgtccccattgttcatcatttacgtcatttacagtttgatcaccataaacaatttttcagtg

SEQ ID NO: 3888 - protein, 325 aa, Homo sapiens [sequence omitted]

SEQ ID NO: 3889 - DNA, 1634 bp, Homo sapiens
gaagaaagcgctccgaagagctagagctgacactcggcgatgagctaagacgctgtttcagagcgtttgggtcctctgaggccccttgaccaggagtgtctctgaagatacagtccaaagaaagttctccaaaacaaggagaacagtctgaagctggggatggcaacagcattggacccagaccagccaaagaaacaaaaaatacttgtggaggagatggcccctctgaaaggagtacaggaacagcaggttcggcatgagtgtgaagttacaaagcctgagaaagagaagggtgaggagacaaggattgagaatgggaagcttattgtagtaacagactcttgtggaagagtagagtcatctgggaaaatatctgaacccatggaggctcataatgagggctctaacttggaaaggcatcaggccaagcccaaagagaagattgagtataaatgctcagaacgtgagcagagattcatccagcacttggacctgattgaacatgcgagtacacacacgggaaagaaactctgcgagtctgatgtgtgtcagagttccagtcttacaggacataagaaagtcctctctagagagaaaggtcatcagtgtcatgagtgtgggaaagcctttcagaggagttcacacctcgtcagacatcagaaaatccatcttggtgagaagccttatcagtgcaatgagtgtggcaaagtctttagccagaatgcaggccttttggaacatctcagaattcatactggagagaaaccttatctatgtatccattgtggaaaaaattttaggcgcagctctcaccttaatcgacatcagagaattcacagtcaggaggagccctgtgagtgcaaggagtgtggaaaaacctttagtcaggccttactcctcacccaccatcagagaatccatagtcactccaaaagccatcaatgtaacgagtgtggaaaagctttcagtttgacctcagaccttattcgacaccacagaattcatactggagaaaaacctttcaagtgtaacatatgccagaaagccttccgactaaactcacaccttgctcagcatgtaagaatccacaatgaagaaaaaccctatcagtgtagtgaatgtggagaagccttcaggcaaaggtcaggtctttttcaacatcagagatatcaccacaaagacaaactggcttgatgaggtgttctctccttgtagaacatcagagaaggcacattgactagcaaacagcactttaggaaaagtcaccgtagcccactgtggcatcagaaaattcttgggggctgagttggaggctccctgcctctattctctctcctttgctttccttgaagtcagctttggaccacaataatttcactgtagatgatatgctaggatcaaagttaaacagcattcttcactgcaggacatctcagagcatgtaacataactgcatgattatatactctaagcaatagagagcttcatgactgagtaagagttttgaagtcagcagtgaatcaagtgcccacagatttgcaggcttaagcagaacaagggaagattgatatttttggatatgctatagcagctttctcctatgaaataaaactgatgatgtttggaagtatact

SEQ ID NO: 3890 - protein, 344 aa, Homo sapiens; identical to SEQ ID NO: 3880

SEQ ID NO: 3891 - DNA, 1420 bp, Homo sapiens
aagagctagagctgacactcggcgatgagctaagacgctgtttcagagcgtttgggtcctctgaggccccttgaccaggtgaggagacaaggattgagaatgggaagcttattgtagtaacagactcttgtggaagagtagagtcatctgggaaaatatctgaacccatggaggctcataatgagggctctaacttggaaaggcatcaggccaagcccaaagagaagattgagtataaatgctcagaacgtgagcagagattcatccagcacttggacctgattgaacatgcgagtacacacacgggaaagaaactctgcgagtctgatgtgtgtcagagttccagtcttacaggacataagaaagtcctctctagagagaaaggtcatcagtgtcatgagtgtgggaaagcctttcagaggagttcacacctcgtcagacatcagaaaatccatcttggtgagaagccttatcagtgcaatgagtgtggcaaagtctttagccagaatgcaggccttttggaacatctcagaattcatactggagagaaaccttatctatgtatccattgtggaaaaaattttaggcgcagctctcaccttaatcgacatcagagaattcacagtcaggaggagccctgtgagtgcaaggagtgtggaaaaacctttagtcaggccttactcctcacccaccatcagagaatccatagtcactccaaaagccatcaatgtaacgagtgtggaaaagctttcagtttgacctcagaccttattcgacaccacagaattcatactggagaaaaacctttcaagtgtaacatatgccagaaagccttccgactaaactcacaccttgctcagcatgtaagaatccacaatgaagaaaaaccctatcagtgtagtgaatgtggagaagccttcaggcaaaggtcaggtctttttcaacatcagagatatcaccacaaagacaaactggcttgatgaggtgttctctccttgtagaacatcagagaaggcacattgactagcaaacagcactttaggaaaagtcaccgtagcccactgtggcatcagaaaattcttgggggctgagttggaggctccctgcctctattctctctcctttgctttccttgaagtcagctttggaccacaataatttcactgtagatgatatgctaggatcaaagttaaacagcattcttcactgcaggacatctcagagcatgtaacataactgcatgattatatactctaagcaatagagagcttcatgactgagtaagagttttgaagtcagcagtgaatcaagtgcccacagatttgcaggcttaagcagaacaagggaagattgatatttttggatatgctatagcagctttctcctatgaaataaaactgatgatgtttggaagtatact

SEQ ID NO: 3892 - protein, 270 aa, Homo sapiens
MEAHNEGSNLERHQAKPKEKIEYKCSEREQRFIQHLDLIEHASTHTGKKLCESDVCQSSSLTGHKKVLSREKGHQCHECGKAFQRSSHLVRHQKIHLGEKPYQCNECGKVFSQNAGLLEHLRIHTGEKPYLCIHCGKNFRRSSHLNRHQRIHSQEEPCECKECGKTFSQALLLTHHQRIHSHSKSHQCNECGKAFSLTSDLIRHHRIHTGEKPFKCNICQKAFRLNSHLAQHVRIHNEEKPYQCSECGEAFRQRSGLFQHQRYHHKDKLA

SEQ ID NO: 3893 - DNA, 2085 bp, Homo sapiens
aagagctagagctgacactcggcgatgagctaagacgctgtttcagagcgtttgggtcctctgaggccccttgaccaggtgaggagacaaggattgagaatgggaagcttattgtagtaacagactcttgtggaagagtagagtcatctgggaaaatatctgaacccatggaggctcataatgagggctctaacttggaaaggcatcaggccaagcccaaagagaagattgagtataaatgctcagaacgtgagcagagattcatccagcacttggacctgattgaacatgcgagtacacacacgggaaagaaactctgcgagtctgatgtgtgtcagagttccagtcttacaggacataagaaagtcctctctagagagaaaggtcatcagtgtcatgagtgtgggaaagcctttcagaggagttcacacctcgtcagacatcagaaaatccatcttggtgagaagccttatcagtgcaatgagtgtggcaaagtctttagccagaatgcaggccttttggaacatctcagaattcatactggagagaaaccttatctatgtatccattgtggaaaaaattttaggcgcagctctcaccttaatcgacatcagagaattcacagtcaggaggagccctgtgagtgcaaggagtgtggaaaaacctttagtcaggccttactcctcacccaccatcagagaatccatagtcactccaaaagccatcaatgtaacgagtgtggaaaagctttcagtttgacctcagaccttattcgacaccacagaattcatactggagaaaaacctttcaagtgtaacatatgccagaaagccttccgactaaactcacaccttgctcagcatgtaagaatccacaatgaagaaaaaccctatcagtgtagtgaatgtggagaagccttcaggcaaaggtcaggtctttttcaacatcagagatatcaccacaaagacaaactggcttgatgaggtgttctctccttgtagaacatcagagaaggcacattgactagcaaacagcactttaggaaaagtcaccgtagcccactgtggcatcagaaaattcttgggggctgagttggaggctccctgcctctattctctctcctttgctttccttgaagtcagctttggaccacaataatttcactgtagatgatatgctaggatcaaagttaaacagcattcttcactgcaggacatctcagagcatgtaacataactgcatgattatatactctaagcaatagagagcttcatgactgagtaagagttttgaagtcagcagtgaatcaagtgcccacagatttgcaggcttaagcagaacaagggaagattgatatttttggatatgctatagcagctttctcctatgaaataaaactgatgatgtttggaagtatactactctcaaaggtgtctttaaagtacaggttaatggtgaacattttcccccagtggcttcacctcattcctcccactggccttaccccttccttccccagtggaagcattttcaaaagcaaagataattttcgctggtgaacttcagaacttgccttcagggttagcttcatgtaattttaccatttcccatccccattccccaccacattatgtcaagattcaagttataaattaacgttttacttagactttgaaagagatttcatgagtaatttgaatgaaccttgctgaattaatctgaatagcaactgtctgacttgataactccagtgccagtatagtggctgctgcatagacactattcagtaaatgtctgatgaaagaaattggactttttccctttaatactgatgatgcaattttgaaatgttgcttgttctggaatacttcggaagttaaacaataaagtcagcttggagaggagatcatgatctttatactgtgaatagcagaatgtcacagatgaagaatattaaaattaggggcgtccactccaaaacatatcaccagagtgacaacttcagccctcagcctctgcaatccatatatatcctggtcttgggagtccatagaatactgtttccttctaataaaggtttcaaac

SEQ ID NO: 3894 - protein, 270 aa, Homo sapiens; identical to SEQ ID NO: 3892

SEQ ID NO: 3895 - DNA, 2222 bp, Homo sapiens
aagagctagagctgacactcggcgatgagctaagacgctgtttcagagcgtttgggtcctctgaggccccttgaccaggtgaggagacaaggattgagaatgggaagcttattgtagtaacagactcttgtggaagagtagagtcatctgggaaaatatctgaacccatggaggctcataatgagggctctaacttggaaaggcatcaggccaagcccaaagagaagattgagtataaatgctcagaacgtgagcagagattcatccagcacttggacctgattgaacatgcgagtacacacacgggaaagaaactctgcgagtctgatgtgtgtcagagttccagtcttacaggacataagaaagtcctctctagagagaaaggtcatcagtgtcatgagtgtgggaaagcctttcagaggagttcacacctcgtcagacatcagaaaatccatcttggtgagaagccttatcagtgcaatgagtgtggcaaagtctttagccagaatgcaggccttttggaacatctcagaattcatactggagagaaaccttatctatgtatccattgtggaaaaaattttaggcgcagctctcaccttaatcgacatcagagaattcacagtcaggaggagccctgtgagtgcaaggagtgtggaaaaacctttagtcaggccttactcctcacccaccatcagagaatccatagtcactccaaaagccatcaatgtaacgagtgtggaaaagctttcagtttgacctcagaccttattcgacaccacagaattcatactggagaaaaacctttcaagtgtaacatatgccagaaagccttccgactaaactcacaccttgctcagcatgtaagaatccacaatgaagaaaaaccctatcagtgtagtgaatgtggagaagccttcaggcaaaggtcaggtctttttcaacatcagagatatcaccacaaagacaaactggcttgatgaggtgttctctccttgtagaacatcagagaaggcacattgactagcaaacagcactttaggaaaagtcaccgtagcccactgtggcatcagaaaattcttgggggctgagttggaggctccctgcctctattctctctcctttgctttccttgaagtcagctttggaccacaataatttcactgtagatgatatgctaggatcaaagttaaacagcattcttcactgcaggacatctcagagcatgtaacataactgcatgattatatactctaagcaatagagagcttcatgactgagtaagagttttgaagtcagcagtgaatcaagtgcccacagatttgcaggcttaagcagaacaagggaagattgatatttttggatatgctatagcagctttctcctatgaaataaaactgatgatgtttggaagtatactactctcaaaggtgtctttaaagtacaggttaatggtgaacattttcccccagtggcttcacctcattcctcccactggccttaccccttccttccccagtggaagcattttcaaaagcaaagataattttcgctggtgaacttcagaacttgccttcagggttagcttcatgtaattttaccatttcccatccccattccccaccacattatgtcaagattcaagttataaattaacgttttacttagactttgaaagagatttcatgagtaatttgaatgaaccttgctgaattaatctgaatagcaactgtctgacttgataactccagtgccagtatagtggctgctgcatagacactattcagtaaatgtctgatgaaagaaattggactttttccctttaatactgatgatgcaattttgaaatgttgcttgttctggaatacttcggaagttaaacaataaagtcagcttggagaggagatcatgatctttatactgtgaatagcagaatgtcacagatgaagaatattaaaattaggggcgtccactccaaaacatatcaccagagtgacaacttcagccctcagcctctgcaatccatatatatcctggtcttgggagtccatagaatactgtttccttctaataaaggtttcaaacaaatccctgcagatttatttaaagtgtttgtggaagataattttccatataagctgtgcagtattctatggtatatgtccccattgttcatcatttacgtcatttacagtttgatcaccataaacaatttttcagtg

SEQ ID NO: 3896 - protein, 270 aa, Homo sapiens; identical to SEQ ID NO: 3892

SEQ ID NO: 3897 - DNA, 853 bp, Homo sapiens
gagctagagctgacactcggcgatgagctaagacgctgtttcagagcgtttgggtcctctgaggccccttgaccaggagtgtctctgaagatacagtccaaagaaagttctccaaaacaaggagaacagtctgaagctggggatggcaacagcattgggattcaagctgcaaggaaacagtaaaggccttggacaggagccattgtgcaaacaattcaggcagttgcgttatgaagagaccacaggacctcgagaagcactaagtcggctccgggagctctgtcaacagtgctacagcccgagacccataccaaggagcagatcctggagctgctggtgctggagcagtttctgatcatcctgcctaaggagctccaggcccgggtgcaggagcatcacccagagagcagggaggacgtggttgttgttctggaggatttgcagctggatcttggagaaacaggacaacaggtggtaagggtcagatgtgctctttttcaggaatgcaggaattgagatctctggccagacaggtggacatgggctcatcagcggaaggagaattactaagctttgattcagtttttttccagtctagctgttaatttccttaggtcttacctcaaccttacctggcccttgcttggagaaaactgaatgtgcaccagattccccatcttcttttctttgcccctctggggtttctctttcttctcttttttaacacctaggtgttttactgaacagcagtttcctaaacccacatatatctaattatgcctccatatacctaattgtccctaggacccagaccagccaaagaaacaaaaaatacttgtggaggagatggccc

SEQ ID NO: 3898 - protein, 70 aa, Homo sapiens
MATALGFKLQGNSKGLGQEPLCKQFRQLRYEETTGPREALSRLRELCQQCYSPRPIPRSRSWSCWCWSSF

SEQ ID NO: 3899 - DNA, 3002 bp, Homo sapiens
actcggcgatgagctaagacgctgtttcagagcgtttgggtcctctgaggccccttgaccaggagtgtctctgaagatacagtccaaagaaagttctccaaaacaaggagaacagtctgaagctggggatggcaacagcattggtgagtgcccattccctggctcccctgaatctgaagaaggaggggcttcgggtagtgagggaggatcactactctacttgggaacagggattcaagctgcaaggaaacagtaaaggccttggacaggagccattgtgcaaacaattcaggcagttgcgttatgaagagaccacaggacctcgagaagcactaagtcggctccgggagctctgtcaacagtgctacagcccgagacccataccaaggagcagatcctggagctgctggtgctggagcagtttctgatcatcctgcctaaggagctccaggcccgggtgcaggagcatcacccagagagcagggaggacgtggttgttgttctggaggatttgcagctggatcttggagaaacaggacaacaggtggtaagggtcagatgtgctctttttcaggaatgcaggaattgagatctctggccagacaggtggacatgggctcatcagcggaaggagaattactaagctttgattcagtttttttccagtctagctgttaatttccttaggtcttacctcaaccttacctggcccttgcttggagaaaactgaatgtgcaccagattccccatcttcttttctttgcccctctggggtttctctttcttctcttttttaacacctaggtgttttactgaacagcagtttcctaaacccacatatatctaattatgcctccatatacctaattgtccctaggacccagaccagccaaagaaacaaaaaatacttgtggaggagatggcccctctgaaaggagtacaggaacagcaggttcggcatgagtgtgaagttacaaagcctgagaaagagaagggtgaggagacaaggattgagaatgggaagcttattgtagtaacagactcttgtggaagagtagagtcatctgggaaaatatctgaacccatggaggctcataatgagggctctaacttggaaaggcatcaggccaagcccaaagagaagattgagtataaatgctcagaacgtgagcagagattcatccagcacttggacctgattgaacatgcgagtacacacacgggaaagaaactctgcgagtctgatgtgtgtcagagttccagtcttacaggacataagaaagtcctctctagagagaaaggtcatcagtgtcatgagtgtgggaaagcctttcagaggagttcacacctcgtcagacatcagaaaatccatcttggtgagaagccttatcagtgcaatgagtgtggcaaagtctttagccagaatgcaggccttttggaacatctcagaattcatactggagagaaaccttatctatgtatccattgtggaaaaaattttaggcgcagctctcaccttaatcgacatcagagaattcacagtcaggaggagccctgtgagtgcaaggagtgtggaaaaacctttagtcaggccttactcctcacccaccatcagagaatccatagtcactccaaaagccatcaatgtaacgagtgtggaaaagctttcagtttgacctcagaccttattcgacaccacagaattcatactggagaaaaacctttcaagtgtaacatatgccagaaagccttccgactaaactcacaccttgctcagcatgtaagaatccacaatgaagaaaaaccctatcagtgtagtgaatgtggagaagccttcaggcaaaggtcaggtctttttcaacatcagagatatcaccacaaagacaaactggcttgatgaggtgttctctccttgtagaacatcagagaaggcacattgactagcaaacagcactttaggaaaagtcaccgtagcccactgtggcatcagaaaattcttgggggctgagttggaggctccctgcctctattctctctcctttgctttccttgaagtcagctttggaccacaataatttcactgtagatgatatgctaggatcaaagttaaacagcattcttcactgcaggacatctcagagcatgtaacataactgcatgattatatactctaagcaatagagagcttcatgactgagtaagagttttgaagtcagcagtgaatcaagtgcccacagatttgcaggcttaagcagaacaagggaagattgatatttttggatatgctatagcagctttctcctatgaaataaaactgatgatgtttggaagtatactactctcaaaggtgtctttaaagtacaggttaatggtgaacattttcccccagtggcttcacctcattcctcccactggccttaccccttccttccccagtggaagcattttcaaaagcaaagataattttcgctggtgaacttcagaacttgccttcagggttagcttcatgtaattttaccatttcccatccccattccccaccacattatgtcaagattcaagttataaattaacgttttacttagactttgaaagagatttcatgagtaatttgaatgaaccttgctgaattaatctgaatagcaactgtctgacttgataactccagtgccagtatagtggctgctgcatagacactattcagtaaatgtctgatgaaagaaattggactttttccctttaatactgatgatgcaattttgaaatgttgcttgttctggaatacttcggaagttaaacaataaagtcagcttggagaggagatcatgatctttatactgtgaatagcagaatgtcacagatgaagaatattaaaattaggggcgtccactccaaaacatatcaccagagtgacaacttcagccctcagcctctgcaatccatatatatcctggtcttgggagtccatagaatactgtttccttctaataaaggtttcaaac

SEQ ID NO: 3900 - protein, 325 aa, Homo sapiens [sequence omitted]

SEQ ID NO: 3901 - DNA, 1611 bp, Homo sapiens
ggtaaacagagtacaaccttctgctgcatatttttcatccattcagcgcaattttaagtagatattaaaggagtgtctctgaagatacagtccaaagaaagttctccaaaacaaggagaacagtctgaagctggggatggcaacagcattggacccagaccagccaaagaaacaaaaaatacttgtggaggagatggcccctctgaaaggagtacaggaacagcaggttcggcatgagtgtgaagttacaaagcctgagaaagagaagggtgaggagacaaggattgagaatgggaagcttattgtagtaacagactcttgtggaagagtagagtcatctgggaaaatatctgaacccatggaggctcataatgagggctctaacttggaaaggcatcaggccaagcccaaagagaagattgagtataaatgctcagaacgtgagcagagattcatccagcacttggacctgattgaacatgcgagtacacacacgggaaagaaactctgcgagtctgatgtgtgtcagagttccagtcttacaggacataagaaagtcctctctagagagaaaggtcatcagtgtcatgagtgtgggaaagcctttcagaggagttcacacctcgtcagacatcagaaaatccatcttggtgagaagccttatcagtgcaatgagtgtggcaaagtctttagccagaatgcaggccttttggaacatctcagaattcatactggagagaaaccttatctatgtatccattgtggaaaaaattttaggcgcagctctcaccttaatcgacatcagagaattcacagtcaggaggagccctgtgagtgcaaggagtgtggaaaaacctttagtcaggccttactcctcacccaccatcagagaatccatagtcactccaaaagccatcaatgtaacgagtgtggaaaagctttcagtttgacctcagaccttattcgacaccacagaattcatactggagaaaaacctttcaagtgtaacatatgccagaaagccttccgactaaactcacaccttgctcagcatgtaagaatccacaatgaagaaaaaccctatcagtgtagtgaatgtggagaagccttcaggcaaaggtcaggtctttttcaacatcagagatatcaccacaaagacaaactggcttgatgaggtgttctctccttgtagaacatcagagaaggcacattgactagcaaacagcactttaggaaaagtcaccgtagcccactgtggcatcagaaaattcttgggggctgagttggaggctccctgcctctattctctctcctttgctttccttgaagtcagctttggaccacaataatttcactgtagatgatatgctaggatcaaagttaaacagcattcttcactgcaggacatctcagagcatgtaacataactgcatgattatatactctaagcaatagagagcttcatgactgagtaagagttttgaagtcagcagtgaatcaagtgcccacagatttgcaggcttaagcagaacaagggaagattgatatttttggatatgctatagcagctttctcctatgaaataaaactgatgatgtttggaagtatact

SEQ ID NO: 3902 - protein, 344 aa, Homo sapiens; identical to SEQ ID NO: 3880

SEQ ID NO: 3903 - DNA, 2276 bp, Homo sapiens
ggtaaacagagtacaaccttctgctgcatatttttcatccattcagcgcaattttaagtagatattaaaggagtgtctctgaagatacagtccaaagaaagttctccaaaacaaggagaacagtctgaagctggggatggcaacagcattggacccagaccagccaaagaaacaaaaaatacttgtggaggagatggcccctctgaaaggagtacaggaacagcaggttcggcatgagtgtgaagttacaaagcctgagaaagagaagggtgaggagacaaggattgagaatgggaagcttattgtagtaacagactcttgtggaagagtagagtcatctgggaaaatatctgaacccatggaggctcataatgagggctctaacttggaaaggcatcaggccaagcccaaagagaagattgagtataaatgctcagaacgtgagcagagattcatccagcacttggacctgattgaacatgcgagtacacacacgggaaagaaactctgcgagtctgatgtgtgtcagagttccagtcttacaggacataagaaagtcctctctagagagaaaggtcatcagtgtcatgagtgtgggaaagcctttcagaggagttcacacctcgtcagacatcagaaaatccatcttggtgagaagccttatcagtgcaatgagtgtggcaaagtctttagccagaatgcaggccttttggaacatctcagaattcatactggagagaaaccttatctatgtatccattgtggaaaaaattttaggcgcagctctcaccttaatcgacatcagagaattcacagtcaggaggagccctgtgagtgcaaggagtgtggaaaaacctttagtcaggccttactcctcacccaccatcagagaatccatagtcactccaaaagccatcaatgtaacgagtgtggaaaagctttcagtttgacctcagaccttattcgacaccacagaattcatactggagaaaaacctttcaagtgtaacatatgccagaaagccttccgactaaactcacaccttgctcagcatgtaagaatccacaatgaagaaaaaccctatcagtgtagtgaatgtggagaagccttcaggcaaaggtcaggtctttttcaacatcagagatatcaccacaaagacaaactggcttgatgaggtgttctctccttgtagaacatcagagaaggcacattgactagcaaacagcactttaggaaaagtcaccgtagcccactgtggcatcagaaaattcttgggggctgagttggaggctccctgcctctattctctctcctttgctttccttgaagtcagctttggaccacaataatttcactgtagatgatatgctaggatcaaagttaaacagcattcttcactgcaggacatctcagagcatgtaacataactgcatgattatatactctaagcaatagagagcttcatgactgagtaagagttttgaagtcagcagtgaatcaagtgcccacagatttgcaggcttaagcagaacaagggaagattgatatttttggatatgctatagcagctttctcctatgaaataaaactgatgatgtttggaagtatactactctcaaaggtgtctttaaagtacaggttaatggtgaacattttcccccagtggcttcacctcattcctcccactggccttaccccttccttccccagtggaagcattttcaaaagcaaagataattttcgctggtgaacttcagaacttgccttcagggttagcttcatgtaattttaccatttcccatccccattccccaccacattatgtcaagattcaagttataaattaacgttttacttagactttgaaagagatttcatgagtaatttgaatgaaccttgctgaattaatctgaatagcaactgtctgacttgataactccagtgccagtatagtggctgctgcatagacactattcagtaaatgtctgatgaaagaaattggactttttccctttaatactgatgatgcaattttgaaatgttgcttgttctggaatacttcggaagttaaacaataaagtcagcttggagaggagatcatgatctttatactgtgaatagcagaatgtcacagatgaagaatattaaaattaggggcgtccactccaaaacatatcaccagagtgacaacttcagccctcagcctctgcaatccatatatatcctggtcttgggagtccatagaatactgtttccttctaataaaggtttcaaac

SEQ ID NO: 3904 - protein, 344 aa, Homo sapiens; identical to SEQ ID NO: 3880

SEQ ID NO: 3905 - DNA, 2413 bp, Homo sapiens
ggtaaacagagtacaaccttctgctgcatatttttcatccattcagcgcaattttaagtagatattaaaggagtgtctctgaagatacagtccaaagaaagttctccaaaacaaggagaacagtctgaagctggggatggcaacagcattggacccagaccagccaaagaaacaaaaaatacttgtggaggagatggcccctctgaaaggagtacaggaacagcaggttcggcatgagtgtgaagttacaaagcctgagaaagagaagggtgaggagacaaggattgagaatgggaagcttattgtagtaacagactcttgtggaagagtagagtcatctgggaaaatatctgaacccatggaggctcataatgagggctctaacttggaaaggcatcaggccaagcccaaagagaagattgagtataaatgctcagaacgtgagcagagattcatccagcacttggacctgattgaacatgcgagtacacacacgggaaagaaactctgcgagtctgatgtgtgtcagagttccagtcttacaggacataagaaagtcctctctagagagaaaggtcatcagtgtcatgagtgtgggaaagcctttcagaggagttcacacctcgtcagacatcagaaaatccatcttggtgagaagccttatcagtgcaatgagtgtggcaaagtctttagccagaatgcaggccttttggaacatctcagaattcatactggagagaaaccttatctatgtatccattgtggaaaaaattttaggcgcagctctcaccttaatcgacatcagagaattcacagtcaggaggagccctgtgagtgcaaggagtgtggaaaaacctttagtcaggccttactcctcacccaccatcagagaatccatagtcactccaaaagccatcaatgtaacgagtgtggaaaagctttcagtttgacctcagaccttattcgacaccacagaattcatactggagaaaaacctttcaagtgtaacatatgccagaaagccttccgactaaactcacaccttgctcagcatgtaagaatccacaatgaagaaaaaccctatcagtgtagtgaatgtggagaagccttcaggcaaaggtcaggtctttttcaacatcagagatatcaccacaaagacaaactggcttgatgaggtgttctctccttgtagaacatcagagaaggcacattgactagcaaacagcactttaggaaaagtcaccgtagcccactgtggcatcagaaaattcttgggggctgagttggaggctccctgcctctattctctctcctttgctttccttgaagtcagctttggaccacaataatttcactgtagatgatatgctaggatcaaagttaaacagcattcttcactgcaggacatctcagagcatgtaacataactgcatgattatatactctaagcaatagagagcttcatgactgagtaagagttttgaagtcagcagtgaatcaagtgcccacagatttgcaggcttaagcagaacaagggaagattgatatttttggatatgctatagcagctttctcctatgaaataaaactgatgatgtttggaagtatactactctcaaaggtgtctttaaagtacaggttaatggtgaacattttcccccagtggcttcacctcattcctcccactggccttaccccttccttccccagtggaagcattttcaaaagcaaagataattttcgctggtgaacttcagaacttgccttcagggttagcttcatgtaattttaccatttcccatccccattccccaccacattatgtcaagattcaagttataaattaacgttttacttagactttgaaagagatttcatgagtaatttgaatgaaccttgctgaattaatctgaatagcaactgtctgacttgataactccagtgccagtatagtggctgctgcatagacactattcagtaaatgtctgatgaaagaaattggactttttccctttaatactgatgatgcaattttgaaatgttgcttgttctggaatacttcggaagttaaacaataaagtcagcttggagaggagatcatgatctttatactgtgaatagcagaatgtcacagatgaagaatattaaaattaggggcgtccactccaaaacatatcaccagagtgacaacttcagccctcagcctctgcaatccatatatatcctggtcttgggagtccatagaatactgtttccttctaataaaggtttcaaacaaatccctgcagatttatttaaagtgtttgtggaagataattttccatataagctgtgcagtattctatggtatatgtccccattgttcatcatttacgtcatttacagtttgatcaccataaacaatttttcagtg

SEQ ID NO: 3906 - protein, 344 aa, Homo sapiens; identical to SEQ ID NO: 3880

SEQ ID NO: 3907 - DNA, 2275 bp, Homo sapiens
gagtgtctctgaagatacagtccaaagaaagttctccaaaacaaggagaacagtctgaagctggggatggcaacagcattggtgagtgcccattccctggctcccctgaatctgaagaaggaggggcttcgggtagtgagggaggatcactactctacttgggaacagggattcaagctgcaaggaaacagtaaaggccttggacaggagccattgtgcaaacaattcaggcagttgcgttatgaagagaccacaggacctcgagaagcactaagtcggctccgggagctctgtcaacagtgctacagcccgagacccataccaaggagcagatcctggagctgctggtgctggagcagtttctgatcatcctgcctaaggagctccaggcccgggtgcaggagcatcacccagagagcagggaggacgtggttgttgttctggaggatttgcagctggatcttggagaaacaggacaacaggtggtaagggtcagatgtgctctttttcaggaatgcaggaattgagatctctggccagacaggtggacatgggctcatcagcggaaggagaattactaagctttgattcagtttttttccagtctagctgttaatttccttaggtcttacctcaaccttacctggcccttgcttggagaaaactgaatgtgcaccagattccccatcttcttttctttgcccctctggggtttctctttcttctcttttttaacacctaggtgttttactgaacagcagtttcctaaacccacatatatctaattatgcctccatatacctaattgtccctaggacccagaccagccaaagaaacaaaaaatacttgtggaggagatggcccctctgaaaggagtacaggaacagcaggttcggcatgagtgtgaagttacaaagcctgagaaagagaagggtgaggagacaaggattgagaatgggaagcttattgtagtaacagactcttgtggaagagtagagtcatctgggaaaatatctgaacccatggaggctcataatgagggctctaacttggaaaggcatcaggccaagcccaaagagaagattgagtataaatgctcagaacgtgagcagagattcatccagcacttggacctgattgaacatgcgagtacacacacgggaaagaaactctgcgagtctgatgtgtgtcagagttccagtcttacaggacataagaaagtcctctctagagagaaaggtcatcagtgtcatgagtgtgggaaagcctttcagaggagttcacacctcgtcagacatcagaaaatccatcttggtgagaagccttatcagtgcaatgagtgtggcaaagtctttagccagaatgcaggccttttggaacatctcagaattcatactggagagaaaccttatctatgtatccattgtggaaaaaattttaggcgcagctctcaccttaatcgacatcagagaattcacagtcaggaggagccctgtgagtgcaaggagtgtggaaaaacctttagtcaggccttactcctcacccaccatcagagaatccatagtcactccaaaagccatcaatgtaacgagtgtggaaaagctttcagtttgacctcagaccttattcgacaccacagaattcatactggagaaaaacctttcaagtgtaacatatgccagaaagccttccgactaaactcacaccttgctcagcatgtaagaatccacaatgaagaaaaaccctatcagtgtagtgaatgtggagaagccttcaggcaaaggtcaggtctttttcaacatcagagatatcaccacaaagacaaactggcttgatgaggtgttctctccttgtagaacatcagagaaggcacattgactagcaaacagcactttaggaaaagtcaccgtagcccactgtggcatcagaaaattcttgggggctgagttggaggctccctgcctctattctctctcctttgctttccttgaagtcagctttggaccacaataatttcactgtagatgatatgctaggatcaaagttaaacagcattcttcactgcaggacatctcagagcatgtaacataactgcatgattatatactctaagcaatagagagcttcatgactgagtaagagttttgaagtcagcagtgaatcaagtgcccacagatttgcaggcttaagcagaacaagggaagattgatatttttggatatgctatagcagctttctcctatgaaataaaactgatgatgtttggaagtatact

SEQ ID NO: 3908 - protein, 325 aa, Homo sapiens [sequence omitted]

SEQ ID NO: 3909 - DNA, 3077 bp, Homo sapiens
gagtgtctctgaagatacagtccaaagaaagttctccaaaacaaggagaacagtctgaagctggggatggcaacagcattggtgagtgcccattccctggctcccctgaatctgaagaaggaggggcttcgggtagtgagggaggatcactactctacttgggaacagggattcaagctgcaaggaaacagtaaaggccttggacaggagccattgtgcaaacaattcaggcagttgcgttatgaagagaccacaggacctcgagaagcactaagtcggctccgggagctctgtcaacagtgctacagcccgagacccataccaaggagcagatcctggagctgctggtgctggagcagtttctgatcatcctgcctaaggagctccaggcccgggtgcaggagcatcacccagagagcagggaggacgtggttgttgttctggaggatttgcagctggatcttggagaaacaggacaacaggtggtaagggtcagatgtgctctttttcaggaatgcaggaattgagatctctggccagacaggtggacatgggctcatcagcggaaggagaattactaagctttgattcagtttttttccagtctagctgttaatttccttaggtcttacctcaaccttacctggcccttgcttggagaaaactgaatgtgcaccagattccccatcttcttttctttgcccctctggggtttctctttcttctcttttttaacacctaggtgttttactgaacagcagtttcctaaacccacatatatctaattatgcctccatatacctaattgtccctaggacccagaccagccaaagaaacaaaaaatacttgtggaggagatggcccctctgaaaggagtacaggaacagcaggttcggcatgagtgtgaagttacaaagcctgagaaagagaagggtgaggagacaaggattgagaatgggaagcttattgtagtaacagactcttgtggaagagtagagtcatctgggaaaatatctgaacccatggaggctcataatgagggctctaacttggaaaggcatcaggccaagcccaaagagaagattgagtataaatgctcagaacgtgagcagagattcatccagcacttggacctgattgaacatgcgagtacacacacgggaaagaaactctgcgagtctgatgtgtgtcagagttccagtcttacaggacataagaaagtcctctctagagagaaaggtcatcagtgtcatgagtgtgggaaagcctttcagaggagttcacacctcgtcagacatcagaaaatccatcttggtgagaagccttatcagtgcaatgagtgtggcaaagtctttagccagaatgcaggccttttggaacatctcagaattcatactggagagaaaccttatctatgtatccattgtggaaaaaattttaggcgcagctctcaccttaatcgacatcagagaattcacagtcaggaggagccctgtgagtgcaaggagtgtggaaaaacctttagtcaggccttactcctcacccaccatcagagaatccatagtcactccaaaagccatcaatgtaacgagtgtggaaaagctttcagtttgacctcagaccttattcgacaccacagaattcatactggagaaaaacctttcaagtgtaacatatgccagaaagccttccgactaaactcacaccttgctcagcatgtaagaatccacaatgaagaaaaaccctatcagtgtagtgaatgtggagaagccttcaggcaaaggtcaggtctttttcaacatcagagatatcaccacaaagacaaactggcttgatgaggtgttctctccttgtagaacatcagagaaggcacattgactagcaaacagcactttaggaaaagtcaccgtagcccactgtggcatcagaaaattcttgggggctgagttggaggctccctgcctctattctctctcctttgctttccttgaagtcagctttggaccacaataatttcactgtagatgatatgctaggatcaaagttaaacagcattcttcactgcaggacatctcagagcatgtaacataactgcatgattatatactctaagcaatagagagcttcatgactgagtaagagttttgaagtcagcagtgaatcaagtgcccacagatttgcaggcttaagcagaacaagggaagattgatatttttggatatgctatagcagctttctcctatgaaataaaactgatgatgtttggaagtatactactctcaaaggtgtctttaaagtacaggttaatggtgaacattttcccccagtggcttcacctcattcctcccactggccttaccccttccttccccagtggaagcattttcaaaagcaaagataattttcgctggtgaacttcagaacttgccttcagggttagcttcatgtaattttaccatttcccatccccattccccaccacattatgtcaagattcaagttataaattaacgttttacttagactttgaaagagatttcatgagtaatttgaatgaaccttgctgaattaatctgaatagcaactgtctgacttgataactccagtgccagtatagtggctgctgcatagacactattcagtaaatgtctgatgaaagaaattggactttttccctttaatactgatgatgcaattttgaaatgttgcttgttctggaatacttcggaagttaaacaataaagtcagcttggagaggagatcatgatctttatactgtgaatagcagaatgtcacagatgaagaatattaaaattaggggcgtccactccaaaacatatcaccagagtgacaacttcagccctcagcctctgcaatccatatatatcctggtcttgggagtccatagaatactgtttccttctaataaaggtttcaaacaaatccctgcagatttatttaaagtgtttgtggaagataattttccatataagctgtgcagtattctatggtatatgtccccattgttcatcatttacgtcatttacagtttgatcaccataaacaatttttcagtg

SEQ ID NO: 3910 - protein, 325 aa, Homo sapiens [sequence omitted]

SEQ ID NO: 3911 - DNA, 1988 bp, Homo sapiens
ctggaggcgccggcagcgcccgccagacccgccagcccagcggcccgggctctggggaaaccggcgctcccgacaggggagcaccgggcctctgagctccctcgggagcctttcacgaggtcagctacgtctttgttgtgcgcgttcctgaacttttggtccattaaccaacaattagacacgccggtattcagtgcctggcgcggtgctagatgctgggtgtaatctcagaaaaatacattcaggggcgcgcctgagggtgctggctgctggcatctcaggtgctttacgtgcattcgtgaagaagcccatcagtatttcttgaataccagaccccaagctaagtgaagctttagcctctaagctcaacatgtatgaagctttgccaggccctgctcctgaaaatgaagatggccttgtgaaagtgaaggaggaagatcccacctgggagcaggtgtgcaactcacaggagggcagctcccacactcaggagatttgccgcctgcgctttcggcacttctgctaccaggaggctcacggaccccaggaagctctggcccaactccgagaactttgtcatcaatggctgagaccggagatgcacaccaaggaacagataatggaactgctggtgctggagcagttcctgaccatcctgcccaaggagctccagccctgtgtgaagacatatcctctggagagtggagaggaggcagtgacagtgctggagaatctagagacaggaagtggagacacaggacaacaggcctctgtctatattcagggacaggacatgcacccaatggtggcagaatatcaaggagtctctttggagtgtcagagcctccagctcctgcctgggataaccaccctgaagtgtgaacctccacagcgtcctcaagggaacccccaagaagtgagtgggcctgttccccacggatcagctcatctccaggaaaaaaaccccagagacaaggctgtagtgcctgtgtttaacccagtcaggtcccagacattggtgaagactgaggaagaaacagcccaggccgttgctgcagagaagtggtcacatctgagtctgactcggaggaacctctgtgggaactcagctcaggagacagttatgagcctcagtccgatgactgaagaaattgtaactaaagatagattgtttaaagcaaagcaagaaacttctgaagaaatggaacaaagtggagaagcctcaggaaagcccaacagagagtgtgcaccccagattccttgtagtactcctattgctactgaaaggacagttgcacatttgaacactctgaaggaccgtcacccaggtgatttgtgggcccgcatgcacatctcatccctggaatatgctgcaggagacattacccgaaaagggagaaaaaaagacaaagctcgagtgagtgaactgctccaaggcctctcattctctggtgactcagatgtggaaaaagataatgagcctgagatccagcctgctcaaaagaagttaaaggtatcatgtttcccagaaaagagttggaccaaaagagacattaaacccaattttccaagctggtcagcactggattctggacttttgaatctcaagagcgaaaagttgaacccagtagagctttttgaattattttttgatgatgaaacattcaacttaattgtcaatgaaaccaataattatgcttctcagaaaaatgtcagcttggaagtcacagttcaggaaatgaggtgtgtgtttggtgtcttacttttgagtggatttatgaggcatcctagaagggaaatgtattgggaagtctctgacaccgatcagaacctggttagagatgcaatcagaagggacagatttgaattgattttctcaaacctgcactttgcagataatggccacctagatcaaaaagataagtttacaaagttgagacctctcataaaacaaatgaataaaaatttcctcttgtatgctcccctgg

SEQ ID NO: 3912 - protein, 538 aa, Homo sapiens
MYEALPGPAPENEDGLVKVKEEDPTWEQVCNSQEGSSHTQEICRLRFRHFCYQEAHGPQEALAQLRELCHQWLRPEMHTKEQIMELLVLEQFLTILPKELQPCVKTYPLESGEEAVTVLENLETGSGDTGQQASVYIQGQDMHPMVAEYQGVSLECQSLQLLPGITTLKCEPPQRPQGNPQEVSGPVPHGSAHLQEKNPRDKAVVPVFNPVRSQTLVKTEEETAQAVAAEKWSHLSLTRRNLCGNSAQETVMSLSPMTEEIVTKDRLFKAKQETSEEMEQSGEASGKPNRECAPQIPCSTPIATERTVAHLNTLKDRHPGDLWARMHISSLEYAAGDITRKGRKKDKARVSELLQGLSFSGDSDVEKDNEPEIQPAQKKLKVSCFPEKSWTKRDIKPNFPSWSALDSGLLNLKSEKLNPVELFELFFDDETFNLIVNETNNYASQKNVSLEVTVQEMRCVFGVLLLSGFMRHPRREMYWEVSDTDQNLVRDAIRRDRFELIFSNLHFADNGHLDQKDKFTKLRPLIKQMNKNFLLYAP

SEQ ID NO: 3913 - DNA, 3064 bp, Homo sapiens
ctggaggcgccggcagcgcccgccagacccgccagcccagcggcccgggctctggggaaaccggcgctcccgacaggggagcaccgggcctctgagctccctcgggagcctttcacgaggtcagctacgtctttgttgtgcgcgttcctgaacttttggtccattaaccaacaattagacacgccggtattcagtgcctggcgcggtgctagatgctgggtgtaatctcagaaaaatacattcaggggcgcgcctgagggtgctggctgctggcatctcaggtgctttacgtgcattcgtgaagaagcccatcagtatttcttgaataccagaccccaagctaagtgaagctttagcctctaagctcaacatgtatgaagctttgccaggccctgctcctgaaaatgaagatggccttgtgaaagtgaaggaggaagatcccacctgggagcaggtgtgcaactcacaggagggcagctcccacactcaggagatttgccgcctgcgctttcggcacttctgctaccaggaggctcacggaccccaggaagctctggcccaactccgagaactttgtcatcaatggctgagaccggagatgcacaccaaggaacagataatggaactgctggtgctggagcagttcctgaccatcctgcccaaggagctccagccctgtgtgaagacatatcctctggagagtggagaggaggcagtgacagtgctggagaatctagagacaggaagtggagacacaggacaacaggcctctgtctatattcagggacaggacatgcacccaatggtggcagaatatcaaggagtctctttggagtgtcagagcctccagctcctgcctgggataaccaccctgaagtgtgaacctccacagcgtcctcaagggaacccccaagaagtgagtgggcctgttccccacggatcagctcatctccaggaaaaaaaccccagagacaaggctgtagtgcctgtgtttaacccagtcaggtcccagacattggtgaagactgaggaagaaacagcccaggccgttgctgcagagaagtggtcacatctgagtctgactcggaggaacctctgtgggaactcagctcaggagacagttatgagcctcagtccgatgactgaagaaattgtaactaaagatagattgtttaaagcaaagcaagaaacttctgaagaaatggaacaaagtggagaagcctcaggaaagcccaacagagagtgtgcaccccagattccttgtagtactcctattgctactgaaaggacagttgcacatttgaacactctgaaggaccgtcacccaggtgatttgtgggcccgcatgcacatctcatccctggaatatgctgcaggagacattacccgaaaagggagaaaaaaagacaaagctcgagtgagtgaactgctccaaggcctctcattctctggtgactcagatgtggaaaaagataatgagcctgagatccagcctgctcaaaagaagttaaaggtatcatgtttcccagaaaagagttggaccaaaagagacattaaacccaattttccaagctggtcagcactggattctggacttttgaatctcaagagcgaaaagttgaacccagtagagctttttgaattattttttgatgatgaaacattcaacttaattgtcaatgaaaccaataattatgcttctcagaaaaatgtcagcttggaagtcacagttcaggaaatgaggtgtgtgtttggtgtcttacttttgagtggatttatgaggcatcctagaagggaaatgtattgggaagtctctgacaccgatcagaacctggttagagatgcaatcagaagggacagatttgaattgattttctcaaacctgcactttgcagataatggccacctagatcaaaaagataagtttacaaagttgagacctctcataaaacaaatgaataaaaatttcctcttgtatgctcccctggaagaatactattgctttgataagtcaatgtgtgaatgctttgatagtgaccaattcctgaatggaaagcctattagaattggctataaaatttggtgtggtacaaccacacagggttatctggtttggtttgaaccctatcaagaagaatcaactatgaaggtagatgaggatcctgatcttgggttaggtggaaatctagtgatgaacttcgctgatgttcttttagagagaggtcagtatccctatcacctgtgttttgatagcttctttacaagtgtcaaattgttgtcagccttgaaaaagaagggggtgagggcaacaggaacaattcgtgagaacaggaccgaaaaatgtccccttatgaatgtagaacatatgaaaaaaatgaagagagggtattttgatttccgaatagaagaaaacaatgagataattttgtgtcgttggtatggggatggcattatcagtctgtgctccaatgctgtgggcatagaaccagtcaatgaggtaagctgttgtgatgctgataacgaagaaatccctcagataagtcaaccatccatagtaaaagtgtatgatgaatgcaaggaaggtgtagctaaaatggatcaaattatttcgaaatacagggtgaggataagaagcaagaaatggtactcaattttggtgagctacatgattgatgtagccatgaacaatgcatggcaactacacagagcctgtaacccaggtgcttctctagaccccttggattttcggagatttgttgcacatttctacttggaacacaatgctcatctgtcagattagggtacataaaatggacatagtgcagacattaataagacatagaaaaataataattatacatgctgttgtaccctcccaaagtaaatctgatatatgtaatgaagttattaaataatacttttaaaaatcagacatttatatagagtttcaaagactattgtaacaagtaatgttaaaaattgtctgtgagaatgttgaactgtagtacctttctctatgtcaagttttgtgtcagacatgggaaatcatgtatttgttcaattg

SEQ ID NO: 3914 - protein, 809 aa, Homo sapiens; identical to SEQ ID NO: 448

SEQ ID NO: 3915 - DNA, 795 bp, Homo sapiens
agcaaggcagaaaagcagcaggcacattccactggagagagacgccacaggtgcaatgaatgtgggaaaagcttcactaagagttcagtactcattgagcaccagagaatccacactggggagaagccatatgaatgtgaagaatgtgggaaggccttcagccggaggtcaagcctgaatgaacatcggcggagccacactggagagaaaccctatcaatgtaaggagtgtgggaaagccttcagtgccagcaatggcctcactcgacacagaagaatccacacaggggaaaaaccatatgaatgcaaagtgtgtgggaaggctttcctcctcagctcatgccttgttcagcatcagaggatacacactggagagaagcgctatcagtgtcgtgagtgtggcaaagccttcattcagaatgcagggcttttccagcatctccgagtccacactggtgagaaaccctatcagtgcagtcagtgcagtaaactctttagtaagcggacacttcttaagaaacatcagaaaatccacactggagagagaccataagggtgatgagtttgggaaagccttcagtcatcattgcaaccttattaggcattttagaatccatactgttccagcagaactggactaattctgtggaccctcagacccctaaatggggccgtcttggaaatcaaaacctgaatcagaatatttcaaaagagaggaaataaaagttcagcttaaaactgttctgccctaaacctttggctttgaagtttatttttaaagcgttaaagaatacat

SEQ ID NO: 3916 - protein, 54 aa, Homo sapiens
MSLGKPSVIIATLLGILESILFQQNWTNSVDPQTPKWGRLGNQNLNQNISKERK

SEQ ID NO: 3917 - DNA, 304 bp, Homo sapiens
gtaaggagtgtgggaaagccttcagtgccagcaatggcctcactcgacacagaagaatccacacaggggaaaaaccatatgaatgcaaagtgtgtgggaaggctttcctcctcagctcatgccttgttcagcatcagaggatacacactggagagaagcgctatcagtgtcgtgagtgtggcaaagccttcattcagaatgcagggcttttccagcatctccgagtccacactgtcaaaacctgaatcagaatatttcaaaagagaggaaataaaagttcagcttaaaactgttctgccctaaa

SEQ ID NO: 3918 - protein, 89 aa, Homo sapiens
MASLDTEESTQGKNHMNAKCVGRLSSSAHALFSIRGYTLERSAISVVSVAKPSFRMQGFSSISESTLSKPESEYFKREEIKVQLKTVLP

SEQ ID NO: 3919 - DNA, 2344 bp, Homo sapiens
gcctttctttgtctgagataacgcccggagttctttgtcctgcctccaagacgataaaggagcgcagacacaaaggctccagaccatgaacatggacattctgaagtgctcttggaggatgtggaacatctgaaggtcaagcaggaaccaacagacatacagcttcagcctatggtgacacagctcagatatgaatctttttgcctccaccaatttcaagaacaagatggtgaaagtatacctgagaaccaggagttggcatcaaagcaagaaatcttaaaagaaatggaacatttgggggatagcaaactccaaagagatgtatctttggattctaagtacagagaaacttgtaaacgagacagcaaggcagaaaagcagcaggcacattccactggagagagacgccacaggtgcaatgaatgtgggaaaagcttcactaagagttcagtactcattgagcaccagagaatccacactggggagaagccatatgaatgtgaagaatgtgggaaggccttcagccggaggtcaagcctgaatgaacatcggcggagccacactggagagaaaccctatcaatgtaaggagtgtgggaaagccttcagtgccagcaatggcctcactcgacacagaagaatccacacaggggaaaaaccatatgaatgcaaagtgtgtgggaaggctttcctcctcagctcatgccttgttcagcatcagaggatacacactggagagaagcgctatcagtgtcgtgagtgtggcaaagccttcattcagaatgcagggcttttccagcatctccgagtccacactggtgagaaaccctatcagtgcagtcagtgcagtaaactctttagtaagcggacacttcttaagaaacatcagaaaatccacactggagagagaccataagggtgatgagtttgggaaagccttcagtcatcattgcaaccttattaggcattttagaatccatactgttccagcagaactggactaattctgtggaccctcagacccctaaatggggccgtcttggaaagtaagattttcaagtggcttattctgttcttataaaatttattttgtattgcattgaaccacttgtctacaaaccaggtgttggtgtctcctgtgtggatgactgtgattgtagggggttgctgggtggccttcttattccctagcctttggtccatttcttatgatttcctttaaaggcaccaaatcttatctggaaataaattgttatggaggggctgtttttgagcaatactgcatattgaacaattctaaaagaccagtatctatgtatacttttaaaaaaaagatttgctaagatcaaaggatattcagaggtgcatctttttctgtaagagtgacattttaaacaaatgtaaggttttggggaataagaatcgtccacattcccacaggaaatcattgctatggtctcccctaggaatgtgatagatagcttctataattatgcagcattatccatagtatgaaacctgtagttttaatggtttagaaatctatgtctcatttcatatctaactcatgtttttgatacgaatcaatatatatgttgatatcatgagttaatatgagtttgacatgaatcatcaacatagtatatacatatcaacataactatgttgatgattcatatcaaattctcaatgcaggtcattactgtaagttttccatttttgttacaaataataagtaagatgatactttaaaatctctgttcttcacaaggtacctctttaattcatagccttttatgtcagcattattcttcttttgggggttggtcagcaactttgagtgccattgcaagcagcatcatttaagtagttttataaagaaaagaagtctgatatcttgggcagcttgctgcttactggggagaccagcatgcttagacacttattgccagggttaaacatatgctctggcaccaagttcaaatctttcctccccatttgtgagctgtgggactttaggcaagttatctaaatgctgctatgctatagtctccccacctgtaaaacagaggatgataccaataccttcctcatagggtacataagattaaataaatacaaacttgtacttaaaatgtagctctcaataaatatgcattatgatttacatacgaaataatagcatttaacaaatgtaggtagaattttaagtatcatgttaaaattaggatacgaaatgcctctgctgacattcttgttactcttttctccacagtcaaaacctgaatcagaatatttcaaaagagaggaaataaaagttcagcttaaaactgttctgccctaaa

SEQ ID NO: 3920 - protein, 247 aa, Homo sapiens
MVTQLRYESFCLHQFQEQDGESIPENQELASKQEILKEMEHLGDSKLQRDVSLDSKYRETCKRDSKAEKQQAHSTGERRHRCNECGKSFTKSSVLIEHQRIHTGEKPYECEECGKAFSRRSSLNEHRRSHTGEKPYQCKECGKAFSASNGLTRHRRIHTGEKPYECKVCGKAFLLSSCLVQHQRIHTGEKRYQCRECGKAFIQNAGLFQHLRVHTGEKPYQCSQCSKLFSKRTLLKKHQKIHTGERP

SEQ ID NO: 3921 - DNA, 3399 bp, Homo sapiens
tggaactcttcgcaggcttttcctgtaaataaacctgtttggccgtggaattgcctcctgttactcgctctctacgtttatatcttcctaacaccttccggctctaatgttttgggtctcgatgaccatctaactcctaaatgctgggggccgctccccatagaaatgcctcgccggatttctccgcctcgcacccagtgggactgggatttttggccccggggtttgcaataagggagtcaccaagcagcagccacctctggaattcctagaaaggaaagagttgcctggcttcagccagtgggctcagaacggctgacgcatttccggcctttgcggttgatcggtcattggggtgctgcagccccgccacctgttccgtagcttgccggtgccccgaaggtgagtcttggccccttgtcgcgacccgccaggttcccagaagatttcaggtctgtgccttggagtaggcggggagggaacgtctgcgcaggcgtgacccccgcccctacacattcactggcctgaagcccccgtggagtaggtggaggtcccgccccttatcctgaagattaaacagcctttctttgtctgagataacgcccggagttctttgtcctgcctccaagacgataaaggagcgcagacacaaaggtgtcttctcctaaggaagattaaatcagaaaattttaaatcacagttatccctttacttaaagccagagtaagccttccaaattaaccccaggaatggcttcaacagaggaacagtacgatcttaagattgtgaaagtggaggaagaccctatctgggaccaagaaacccaccttcgagggaacaacttttctggccaagaagcctcccgacaactttttaggcagttttgttaccaagagactcctggtccccgagaagctctgagccggctccgagaactctgtcatcagtggctaaggccagaaatccacaccaaagagcaaatcttggagctgctggtgctggagcaattcctgactatcctgcctgaggagctccaggcctgggtgcgggagcaccatccggagagtggggaggaggctgtggctgtagttgaagatctggaacaagagcttagtgagccagggaaccaggctccagaccatgaacatggacattctgaagtgctcttggaggatgtggaacatctgaaggtcaagcaggaaccaacagacatacagcttcagcctatggtgacacagctcagatatgaatctttttgcctccaccaatttcaagaacaagatggtgaaagtatacctgagaaccaggagttggcatcaaagcaagaaatcttaaaagaaatggaacatttgggggatagcaaactccaaagagatgtatctttggattctaagtacagagaaacttgtaaacgagacagcaaggcagaaaagcagcaggcacattccactggagagagacgccacaggtgcaatgaatgtgggaaaagcttcactaagagttcagtactcattgagcaccagagaatccacactggggagaagccatatgaatgtgaagaatgtgggaaggccttcagccggaggtcaagcctgaatgaacatcggcggagccacactggagagaaaccctatcaatgtaaggagtgtgggaaagccttcagtgccagcaatggcctcactcgacacagaagaatccacacaggggaaaaaccatatgaatgcaaagtgtgtgggaaggctttcctcctcagctcatgccttgttcagcatcagaggatacacactggagagaagcgctatcagtgtcgtgagtgtggcaaagccttcattcagaatgcagggcttttccagcatctccgagtccacactggtgagaaaccctatcagtgcagtcagtgcagtaaactctttagtaagcggacacttcttaagaaacatcagaaaatccacactggagagagaccataagggtgatgagtttgggaaagccttcagtcatcattgcaaccttattaggcattttagaatccatactgttccagcagaactggactaattctgtggaccctcagacccctaaatggggccgtcttggaaagtaagattttcaagtggcttattctgttcttataaaatttattttgtattgcattgaaccacttgtctacaaaccaggtgttggtgtctcctgtgtggatgactgtgattgtagggggttgctgggtggccttcttattccctagcctttggtccatttcttatgatttcctttaaaggcaccaaatcttatctggaaataaattgttatggaggggctgtttttgagcaatactgcatattgaacaattctaaaagaccagtatctatgtatacttttaaaaaaaagatttgctaagatcaaaggatattcagaggtgcatctttttctgtaagagtgacattttaaacaaatgtaaggttttggggaataagaatcgtccacattcccacaggaaatcattgctatggtctcccctaggaatgtgatagatagcttctataattatgcagcattatccatagtatgaaacctgtagttttaatggtttagaaatctatgtctcatttcatatctaactcatgtttttgatacgaatcaatatatatgttgatatcatgagttaatatgagtttgacatgaatcatcaacatagtatatacatatcaacataactatgttgatgattcatatcaaattctcaatgcaggtcattactgtaagttttccatttttgttacaaataataagtaagatgatactttaaaatctctgttcttcacaaggtacctctttaattcatagccttttatgtcagcattattcttcttttgggggttggtcagcaactttgagtgccattgcaagcagcatcatttaagtagttttataaagaaaagaagtctgatatcttgggcagcttgctgcttactggggagaccagcatgcttagacacttattgccagggttaaacatatgctctggcaccaagttcaaatctttcctccccatttgtgagctgtgggactttaggcaagttatctaaatgctgctatgctatagtctccccacctgtaaaacagaggatgataccaataccttcctcatagggtacataagattaaataaatacaaacttgtacttaaaatgtagctctcaataaatatgcattatgatttacatacgaaataatagcatttaacaaatgtaggtagaattttaagtatcatgttaaaattaggatacgaaatgcctctgctgacattcttgttactcttttctccacagtcaaaacctgaatcagaatatttcaaaagagaggaaataaaagttcagcttaaaactgttctgccctaaa

SEQ ID NO: 3922 - protein, 406 aa, Homo sapiens; identical to SEQ ID NO: 452

SEQ ID NO: 3923 - DNA, 2671 bp, Homo sapiens
tggaactcttcgcaggcttttcctgtaaataaacctgtttggccgtggaattgcctcctgttactcgctctctacgtttatatcttcctaacaccttccggctctaatgttttgggtctcgatgaccatctaactcctaaatgctgggggccgctccccatagaaatgcctcgccggatttctccgcctcgcacccagtgggactgggatttttggccccggggtttgcaataagggagtcaccaagcagcagccacctctggaattcctagaaaggaaagagttgcctggcttcagccagtgggctcagaacggctgacgcatttccggcctttgcggttgatcggtcattggggtgctgcagccccgccacctgttccgtagcttgccggtgccccgaaggctccagaccatgaacatggacattctgaagtgctcttggaggatgtggaacatctgaaggtcaagcaggaaccaacagacatacagcttcagcctatggtgacacagctcagatatgaatctttttgcctccaccaatttcaagaacaagatggtgaaagtatacctgagaaccaggagttggcatcaaagcaagaaatcttaaaagaaatggaacatttgggggatagcaaactccaaagagatgtatctttggattctaagtacagagaaacttgtaaacgagacagcaaggcagaaaagcagcaggcacattccactggagagagacgccacaggtgcaatgaatgtgggaaaagcttcactaagagttcagtactcattgagcaccagagaatccacactggggagaagccatatgaatgtgaagaatgtgggaaggccttcagccggaggtcaagcctgaatgaacatcggcggagccacactggagagaaaccctatcaatgtaaggagtgtgggaaagccttcagtgccagcaatggcctcactcgacacagaagaatccacacaggggaaaaaccatatgaatgcaaagtgtgtgggaaggctttcctcctcagctcatgccttgttcagcatcagaggatacacactggagagaagcgctatcagtgtcgtgagtgtggcaaagccttcattcagaatgcagggcttttccagcatctccgagtccacactggtgagaaaccctatcagtgcagtcagtgcagtaaactctttagtaagcggacacttcttaagaaacatcagaaaatccacactggagagagaccataagggtgatgagtttgggaaagccttcagtcatcattgcaaccttattaggcattttagaatccatactgttccagcagaactggactaattctgtggaccctcagacccctaaatggggccgtcttggaaagtaagattttcaagtggcttattctgttcttataaaatttattttgtattgcattgaaccacttgtctacaaaccaggtgttggtgtctcctgtgtggatgactgtgattgtagggggttgctgggtggccttcttattccctagcctttggtccatttcttatgatttcctttaaaggcaccaaatcttatctggaaataaattgttatggaggggctgtttttgagcaatactgcatattgaacaattctaaaagaccagtatctatgtatacttttaaaaaaaagatttgctaagatcaaaggatattcagaggtgcatctttttctgtaagagtgacattttaaacaaatgtaaggttttggggaataagaatcgtccacattcccacaggaaatcattgctatggtctcccctaggaatgtgatagatagcttctataattatgcagcattatccatagtatgaaacctgtagttttaatggtttagaaatctatgtctcatttcatatctaactcatgtttttgatacgaatcaatatatatgttgatatcatgagttaatatgagtttgacatgaatcatcaacatagtatatacatatcaacataactatgttgatgattcatatcaaattctcaatgcaggtcattactgtaagttttccatttttgttacaaataataagtaagatgatactttaaaatctctgttcttcacaaggtacctctttaattcatagccttttatgtcagcattattcttcttttgggggttggtcagcaactttgagtgccattgcaagcagcatcatttaagtagttttataaagaaaagaagtctgatatcttgggcagcttgctgcttactggggagaccagcatgcttagacacttattgccagggttaaacatatgctctggcaccaagttcaaatctttcctccccatttgtgagctgtgggactttaggcaagttatctaaatgctgctatgctatagtctccccacctgtaaaacagaggatgataccaataccttcctcatagggtacataagattaaataaatacaaacttgtacttaaaatgtagctctcaataaatatgcattatgatttacatacgaaataatagcatttaacaaatgtaggtagaattttaagtatcatgttaaaattaggatacgaaatgcctctgctgacattcttgttactcttttctccacagtcaaaacctgaatcagaatatttcaaaagagaggaaataaaagttcagcttaaaactgttctgccctaaa

SEQ ID NO: 3924 - protein, 247 aa, Homo sapiens; identical to SEQ ID NO: 3920

SEQ ID NO: 3925 - DNA, 3147 bp, Homo sapiens
tggaactcttcgcaggcttttcctgtaaataaacctgtttggccgtggaattgcctcctgttactcgctctctacgtttatatcttcctaacaccttccggctctaatgttttgggtctcgatgaccatctaactcctaaatgctgggggccgctccccatagaaatgcctcgccggatttctccgcctcgcacccagtgggactgggatttttggccccggggtttgcaataagggagtcaccaagcagcagccacctctggaattcctagaaaggaaagagttgcctggcttcagccagtgggctcagaacggctgacgcatttccggcctttgcggttgatcggtcattggggtgctgcagccccgccacctgttccgtagcttgccggtgccccgaaggtgtcttctcctaaggaagattaaatcagaaaattttaaatcacagttatccctttacttaaagccagagtaagccttccaaattaaccccaggaatggcttcaacagaggaacagtacgatcttaagattgtgaaagtggaggaagaccctatctgggaccaagaaacccaccttcgagggaacaacttttctggccaagaagcctcccgacaactttttaggcagttttgttaccaagagactcctggtccccgagaagctctgagccggctccgagaactctgtcatcagtggctaaggccagaaatccacaccaaagagcaaatcttggagctgctggtgctggagcaattcctgactatcctgcctgaggagctccaggcctgggtgcgggagcaccatccggagagtggggaggaggctgtggctgtagttgaagatctggaacaagagcttagtgagccagggaaccaggctccagaccatgaacatggacattctgaagtgctcttggaggatgtggaacatctgaaggtcaagcaggaaccaacagacatacagcttcagcctatggtgacacagctcagatatgaatctttttgcctccaccaatttcaagaacaagatggtgaaagtatacctgagaaccaggagttggcatcaaagcaagaaatcttaaaagaaatggaacatttgggggatagcaaactccaaagagatgtatctttggattctaagtacagagaaacttgtaaacgagacagcaaggcagaaaagcagcaggcacattccactggagagagacgccacaggtgcaatgaatgtgggaaaagcttcactaagagttcagtactcattgagcaccagagaatccacactggggagaagccatatgaatgtgaagaatgtgggaaggccttcagccggaggtcaagcctgaatgaacatcggcggagccacactggagagaaaccctatcaatgtaaggagtgtgggaaagccttcagtgccagcaatggcctcactcgacacagaagaatccacacaggggaaaaaccatatgaatgcaaagtgtgtgggaaggctttcctcctcagctcatgccttgttcagcatcagaggatacacactggagagaagcgctatcagtgtcgtgagtgtggcaaagccttcattcagaatgcagggcttttccagcatctccgagtccacactggtgagaaaccctatcagtgcagtcagtgcagtaaactctttagtaagcggacacttcttaagaaacatcagaaaatccacactggagagagaccataagggtgatgagtttgggaaagccttcagtcatcattgcaaccttattaggcattttagaatccatactgttccagcagaactggactaattctgtggaccctcagacccctaaatggggccgtcttggaaagtaagattttcaagtggcttattctgttcttataaaatttattttgtattgcattgaaccacttgtctacaaaccaggtgttggtgtctcctgtgtggatgactgtgattgtagggggttgctgggtggccttcttattccctagcctttggtccatttcttatgatttcctttaaaggcaccaaatcttatctggaaataaattgttatggaggggctgtttttgagcaatactgcatattgaacaattctaaaagaccagtatctatgtatacttttaaaaaaaagatttgctaagatcaaaggatattcagaggtgcatctttttctgtaagagtgacattttaaacaaatgtaaggttttggggaataagaatcgtccacattcccacaggaaatcattgctatggtctcccctaggaatgtgatagatagcttctataattatgcagcattatccatagtatgaaacctgtagttttaatggtttagaaatctatgtctcatttcatatctaactcatgtttttgatacgaatcaatatatatgttgatatcatgagttaatatgagtttgacatgaatcatcaacatagtatatacatatcaacataactatgttgatgattcatatcaaattctcaatgcaggtcattactgtaagttttccatttttgttacaaataataagtaagatgatactttaaaatctctgttcttcacaaggtacctctttaattcatagccttttatgtcagcattattcttcttttgggggttggtcagcaactttgagtgccattgcaagcagcatcatttaagtagttttataaagaaaagaagtctgatatcttgggcagcttgctgcttactggggagaccagcatgcttagacacttattgccagggttaaacatatgctctggcaccaagttcaaatctttcctccccatttgtgagctgtgggactttaggcaagttatctaaatgctgctatgctatagtctccccacctgtaaaacagaggatgataccaataccttcctcatagggtacataagattaaataaatacaaacttgtacttaaaatgtagctctcaataaatatgcattatgatttacatacgaaataatagcatttaacaaatgtaggtagaattttaagtatcatgttaaaattaggatacgaaatgcctctgctgacattcttgttactcttttctccacagtcaaaacctgaatcagaatatttcaaaagagaggaaataaaagttcagcttaaaactgttctgccctaaa

SEQ ID NO: 3926 - protein, 406 aa, Homo sapiens; identical to SEQ ID NO: 452

SEQ ID NO: 3927 - DNA, 3176 bp, Homo sapiens
cagagagagagagaaaaactgctgaccctgtaagagagaactggccatcttgcagacagacagagccccgagtgttctttcaactacctgccacccatccaacaactcccctcggacctcagtatgggctggaacctgacacttggcatgacagtgaccccaggcatccaaaccatgacagttccatcagctctccaaatgagagacagagtctcactatgtcgcccaggcttgtcttgaactcctggactcaagagatcctcccatctcggcctctcaaagtgttgggattacaggcgtgagctattacacctgacttaagtctccattttcatatctatactttgggattccagaagacagaggtttgagtgtaaaacacaaaataacaaaaccacaacaaaaacaactctgtattctcgtccccaccattaccatctctcctttgtgatgtcaaagagaccagaggaagtggacagactcggggaagaatagccagagtaagccttccaaattaaccccaggaatggcttcaacagaggaacagtacgatcttaagattgtgaaagtggaggaagaccctatctgggaccaagaaacccaccttcgagggaacaacttttctggccaagaagcctcccgacaactttttaggcagttttgttaccaagagactcctggtccccgagaagctctgagccggctccgagaactctgtcatcagtggctaaggccagaaatccacaccaaagagcaaatcttggagctgctggtgctggagcaattcctgactatcctgcctgaggagctccaggcctgggtgcgggagcaccatccggagagtggggaggaggctgtggctgtagttgaagatctggaacaagagcttagtgagccagggaaccaggctccagaccatgaacatggacattctgaagtgctcttggaggatgtggaacatctgaaggtcaagcaggaaccaacagacatacagcttcagcctatggtgacacagctcagatatgaatctttttgcctccaccaatttcaagaacaagatggtgaaagtatacctgagaaccaggagttggcatcaaagcaagaaatcttaaaagaaatggaacatttgggggatagcaaactccaaagagatgtatctttggattctaagtacagagaaacttgtaaacgagacagcaaggcagaaaagcagcaggcacattccactggagagagacgccacaggtgcaatgaatgtgggaaaagcttcactaagagttcagtactcattgagcaccagagaatccacactggggagaagccatatgaatgtgaagaatgtgggaaggccttcagccggaggtcaagcctgaatgaacatcggcggagccacactggagagaaaccctatcaatgtaaggagtgtgggaaagccttcagtgccagcaatggcctcactcgacacagaagaatccacacaggggaaaaaccatatgaatgcaaagtgtgtgggaaggctttcctcctcagctcatgccttgttcagcatcagaggatacacactggagagaagcgctatcagtgtcgtgagtgtggcaaagccttcattcagaatgcagggcttttccagcatctccgagtccacactggtgagaaaccctatcagtgcagtcagtgcagtaaactctttagtaagcggacacttcttaagaaacatcagaaaatccacactggagagagaccataagggtgatgagtttgggaaagccttcagtcatcattgcaaccttattaggcattttagaatccatactgttccagcagaactggactaattctgtggaccctcagacccctaaatggggccgtcttggaaagtaagattttcaagtggcttattctgttcttataaaatttattttgtattgcattgaaccacttgtctacaaaccaggtgttggtgtctcctgtgtggatgactgtgattgtagggggttgctgggtggccttcttattccctagcctttggtccatttcttatgatttcctttaaaggcaccaaatcttatctggaaataaattgttatggaggggctgtttttgagcaatactgcatattgaacaattctaaaagaccagtatctatgtatacttttaaaaaaaagatttgctaagatcaaaggatattcagaggtgcatctttttctgtaagagtgacattttaaacaaatgtaaggttttggggaataagaatcgtccacattcccacaggaaatcattgctatggtctcccctaggaatgtgatagatagcttctataattatgcagcattatccatagtatgaaacctgtagttttaatggtttagaaatctatgtctcatttcatatctaactcatgtttttgatacgaatcaatatatatgttgatatcatgagttaatatgagtttgacatgaatcatcaacatagtatatacatatcaacataactatgttgatgattcatatcaaattctcaatgcaggtcattactgtaagttttccatttttgttacaaataataagtaagatgatactttaaaatctctgttcttcacaaggtacctctttaattcatagccttttatgtcagcattattcttcttttgggggttggtcagcaactttgagtgccattgcaagcagcatcatttaagtagttttataaagaaaagaagtctgatatcttgggcagcttgctgcttactggggagaccagcatgcttagacacttattgccagggttaaacatatgctctggcaccaagttcaaatctttcctccccatttgtgagctgtgggactttaggcaagttatctaaatgctgctatgctatagtctccccacctgtaaaacagaggatgataccaataccttcctcatagggtacataagattaaataaatacaaacttgtacttaaaatgtagctctcaataaatatgcattatgatttacatacgaaataatagcatttaacaaatgtaggtagaattttaagtatcatgttaaaattaggatacgaaatgcctctgctgacattcttgttactcttttctccacagtcaaaacctgaatcagaatatttcaaaagagaggaaataaaagttcagcttaaaactgttctgccctaaa

SEQ ID NO: 3928 - protein, 406 aa, Homo sapiens; identical to SEQ ID NO: 452

SEQ ID NO: 3929 - DNA, 3551 bp, Homo sapiens
attgctgggcaactaggtcccgccggagcgttccagctcaaagattacctgctgcagtcaggcagaaatgtaaagtctttcctgtttgattgggaactgacccaggtgccaggcttggggggacaccggacaaccaaaggcaatatgtggactcggcaagccactggtccctaaacctgaataagtttccgggcagagctgcatttattgacggttatgaaagctgatttagaagcagcaacgcagcctcttgcctggaattgggatgatgcggctgaaaccaccttcctggcagccaaacaggctattcagcaggcacaagccctatgggtagctgatcggggcacccatttaaacttgatgtgcatgtgaccagatagttttgactggggcttatggcatcacacagagctctttagaatgccagtagacttttggtcccaactttggaagggagctgagctccagtattcctcgacagagaagcagttactaactgcatatgctgccctttagactcgtgacagcctggcaggatgggctacagtcgtcgcgcgcatgacttacccaatagcaggccccgagtgttctttcaactacctgccacccatccaacaactcccctcggacctcagtatgggctggaacctgacacttggcatgacagtgaccccaggcatccaaaccatgacagttccatcagctctccaaatgagactttgggattccagaagacagaggtttgagtgtaaaacacaaaataacaaaaccacaacaaaaacaactctgtattctcgtccccaccattaccatctctcctttgtgatgtcaaagagaccagaggaagtggacagactcggggaagaatagccagagtaagccttccaaattaaccccaggaatggcttcaacagaggaacagtacgatcttaagattgtgaaagtggaggaagaccctatctgggaccaagaaacccaccttcgagggaacaacttttctggccaagaagcctcccgacaactttttaggcagttttgttaccaagagactcctggtccccgagaagctctgagccggctccgagaactctgtcatcagtggctaaggccagaaatccacaccaaagagcaaatcttggagctgctggtgctggagcaattcctgactatcctgcctgaggagctccaggcctgggtgcgggagcaccatccggagagtggggaggaggctgtggctgtagttgaagatctggaacaagagcttagtgagccagggaaccaggctccagaccatgaacatggacattctgaagtgctcttggaggatgtggaacatctgaaggtcaagcaggaaccaacagacatacagcttcagcctatggtgacacagctcagatatgaatctttttgcctccaccaatttcaagaacaagatggtgaaagtatacctgagaaccaggagttggcatcaaagcaagaaatcttaaaagaaatggaacatttgggggatagcaaactccaaagagatgtatctttggattctaagtacagagaaacttgtaaacgagacagcaaggcagaaaagcagcaggcacattccactggagagagacgccacaggtgcaatgaatgtgggaaaagcttcactaagagttcagtactcattgagcaccagagaatccacactggggagaagccatatgaatgtgaagaatgtgggaaggccttcagccggaggtcaagcctgaatgaacatcggcggagccacactggagagaaaccctatcaatgtaaggagtgtgggaaagccttcagtgccagcaatggcctcactcgacacagaagaatccacacaggggaaaaaccatatgaatgcaaagtgtgtgggaaggctttcctcctcagctcatgccttgttcagcatcagaggatacacactggagagaagcgctatcagtgtcgtgagtgtggcaaagccttcattcagaatgcagggcttttccagcatctccgagtccacactggtgagaaaccctatcagtgcagtcagtgcagtaaactctttagtaagcggacacttcttaagaaacatcagaaaatccacactggagagagaccataagggtgatgagtttgggaaagccttcagtcatcattgcaaccttattaggcattttagaatccatactgttccagcagaactggactaattctgtggaccctcagacccctaaatggggccgtcttggaaagtaagattttcaagtggcttattctgttcttataaaatttattttgtattgcattgaaccacttgtctacaaaccaggtgttggtgtctcctgtgtggatgactgtgattgtagggggttgctgggtggccttcttattccctagcctttggtccatttcttatgatttcctttaaaggcaccaaatcttatctggaaataaattgttatggaggggctgtttttgagcaatactgcatattgaacaattctaaaagaccagtatctatgtatacttttaaaaaaaagatttgctaagatcaaaggatattcagaggtgcatctttttctgtaagagtgacattttaaacaaatgtaaggttttggggaataagaatcgtccacattcccacaggaaatcattgctatggtctcccctaggaatgtgatagatagcttctataattatgcagcattatccatagtatgaaacctgtagttttaatggtttagaaatctatgtctcatttcatatctaactcatgtttttgatacgaatcaatatatatgttgatatcatgagttaatatgagtttgacatgaatcatcaacatagtatatacatatcaacataactatgttgatgattcatatcaaattctcaatgcaggtcattactgtaagttttccatttttgttacaaataataagtaagatgatactttaaaatctctgttcttcacaaggtacctctttaattcatagccttttatgtcagcattattcttcttttgggggttggtcagcaactttgagtgccattgcaagcagcatcatttaagtagttttataaagaaaagaagtctgatatcttgggcagcttgctgcttactggggagaccagcatgcttagacacttattgccagggttaaacatatgctctggcaccaagttcaaatctttcctccccatttgtgagctgtgggactttaggcaagttatctaaatgctgctatgctatagtctccccacctgtaaaacagaggatgataccaataccttcctcatagggtacataagattaaataaatacaaacttgtacttaaaatgtagctctcaataaatatgcattatgatttacatacgaaataatagcatttaacaaatgtaggtagaattttaagtatcatgttaaaattaggatacgaaatgcctctgctgacattcttgttactcttttctccacagtcaaaacctgaatcagaatatttcaaaagagaggaaataaaagttcagcttaaaactgttctgccctaaa

SEQ ID NO: 3930 - protein, 406 aa, Homo sapiens; identical to SEQ ID NO: 452

SEQ ID NO: 3931 - DNA, 364 bp, Homo sapiens
tggaacatttgggggatagcaaactccaaagagatgtatctttggattctaagtacagagaaacttgtaaacgagacagcaaggcagaaaagcagcaggcacattccactggagagagacgccacaggtgcaatgaatgtgggaaaagcttcactaagagttcagtactcattgagcaccagagaatccacactggggagaagccatatgaatgtgaagaatgtgggaaggccttcagccggaggtcaagcctgaatgaacatcggcggagccacactggagagaaaccctatcaattcaaaacctgaatcagaatatttcaaaagagaggaaataaaagttcagcttaaaactgttctgccct

SEQ ID NO: 3932 - protein, 35 aa, Homo sapiens
MNIGGATLERNPINSKPESEYFKREEIKVQLKTVL

SEQ ID NO: 3933 - DNA, 860 bp, Homo sapiens
tggaactcttcgcaggcttttcctgtaaataaacctgtttggccgtggaattgcctcctgttactcgctctctacgtttatatcttcctaacaccttccggctctaatgttttgggtctcgatgaccatctaactcctaaatgctgggggccgctccccatagaaatgcctcgccggatttctccgcctcgcacccagtgggactgggatttttggccccggggtttgcaataagggagtcaccaagcagcagccacctctggaattcctagaaaggaaagagttgcctggcttcagccagtgggctcagaacggctgacgcatttccggcctttgcggttgatcggtcattggggtgctgcagccccgccacctgttccgtagcttgccggtgccccgaagccagagtaagccttccaaattaaccccaggaatggcttcaacagaggaacagtacgatcttaagattgtgaaagtggaggaagaccctatctgggaccaagaaacccaccttcgagggaacaacttttctggccaagaagcctcccgacaactttttaggcagttttgttaccaagagactcctggtccccgagaagctctgagccggctccgagaactctgtcatcagtggctaaggccagaaatccacaccaaagagcaaatcttggagctgctggtgctggagcaattcctgactatcctgcctgaggagctccaggcctgggtgcgggagcaccatccggagagtggggaggaggctgtggctgtagttgaagatctggaacaagagcttagtgagccagggaaccaggctccagaccatgaacatggacattctgaagtgctcttggaggatg

SEQ ID NO: 3934 - protein, 141 aa, Homo sapiens
MASTEEQYDLKIVKVEEDPIWDQETHLRGNNFSGQEASRQLFRQFCYQETPGPREALSRLRELCHQWLRPEIHTKEQILELLVLEQFLTILPEELQAWVREHHPESGEEAVAVVEDLEQELSEPGNQAPDHEHGHSEVLLE

SEQ ID NO: 3935 - DNA, 735 bp, Homo sapiens
agagaaaaactgctgaccctgtaagagagaactggccatcttgcagacagacagagccccgagtgttctttcaactacctgccacccatccaacaactcccctcggacctcagtatgggctggaacctgacacttggcatgacagtgactttgggattccagaagacagaggtttgagtgtaaaacacaaaataacaaaaccacaacaaaaacaactctgtattctcgtccccaccattaccatctctcctttgtgatgtcaaagagaccagaggaagtggacagactcggggaagaataggtgtcttctcctaaggaagattaaatcagaaaattttaaatcacagttatccctttacttaaagccagagtaagccttccaaattaaccccaggaatggcttcaacagaggaacagtacgatcttaagattgtgaaagtggaggaagaccctatctgggaccaagaaacccaccttcgagggaacaacttttctggccaagaagcctcccgacaactttttaggcagttttgttaccaagagactcctggtccccgagaagctctgagccggctccgagaactctgtcatcagtggctaaggccagaaatccacaccaaagagcaaatcttggagctgctggtgctggagcaattcctgactatcctgcctgaggagctccaggcctgggtgcgggagcaccatccggagagtggggaggaggctgtggctgta

SEQ ID NO: 3936 - protein, 112 aa, Homo sapiens
MASTEEQYDLKIVKVEEDPIWDQETHLRGNNFSGQEASRQLFRQFCYQETPGPREALSRLRELCHQWLRPEIHTKEQILELLVLEQFLTILPEELQAWVREHHPESGEEAVA

SEQ ID NO: 3937 - DNA, 3575 bp, Homo sapiens
agtggcttctgtgccccgccctgcgggtggtttgctagtttcaagcactttgtgagtatggggtgaatcggcgtcggccttccactgtggggttaaatctcatcccgcggctctcctcctgtcggtcctgcagttcttttgtccccgggtagagggatcttctgcagaaatagcgctggaagctagagtgaggcctgagtactgccttggcctaggatggctagagaattaagtgaaagcacagccctggatgcccagtctacagaagaccagatggagcttctggtcataaaggtggaggaagaagaagccggttttcccagtagcccagatctgggttctgagggctcccgcgagcgcttccgaggcttccgctacccggaggctgcaggcccccgcgaggcgctgagtcggctccgagagctctgccgacagtggctgcagcctgagatgcacagcaaggagcagatcctggagctgctggtgctggagcagttcctgaccatcctgccggggaatctgcagagctgggtgcgggagcagcatccagagagcggggaggaggtggtggtgctattggagtatttggagaggcagctggatgagccggcgccgcaggtagaaagaacaggtttagtatctgagcgctgtggcctgtttcctcctgaaatcccagatcagagtgaggggcattcctttaacatccaggagttcttcatctcttttttgtaccgtgaacctccttggcagtaaggtgaagtccctggactccttctcagaataattttttttttaaaatacataaaccataaaggattacaaaagaacgcagtcatatcaacatacagtttgcaaagtattaactttgtattaaagtcatacttttttttattagtacactaaataataaaacctacggacagggcttataactggcaattacaaagcagtgataagtatctctttgcttggttgtaatgtgatgtaaaaacatctgcaggttctattggtgacaaagtcgtgggtactgcttatgctacattgatttgttgcttccattcataattggaaggaaatgctaactttctcttaaagactagttaaaaataagattagcttttgtcctgttcaagttcatggactacgtgggaaggagttcatggaccactggttatgaacctctggtagaaaatgggccgacttttacctccatgttcttccctgttttatgagactgtgtcctctttgcatcatcctgtgtccctgtgcacacaccctcagaggacctgtgtggccagagccttctaaatggtgagctggataccagggttcttgacttgggtctgttgcacccaaggcctgtaacagtggaaagtcagtgcgagtctcttagcttcattctttataaaggatgtgggaaattctgagctgcacatgagaaagtaacttgaaaactgtaattttataataactataaatgtctggaaggaaacctgcatacatatcgtatgccaggccatgttaggtgatttcacgtactgtgatgttgtttgggtcccccaaactccataaactagagattgtaatccccttttcagataataaaaggtattaatattctctgagaattttgcaccagtttccaatggattttcataaaagcacaaatgtatatatgaaggagcatagagtaatgataagaacgtgtgctctggcatcattctacctgagctcccatcctagcattgccactgattagctatttaaactggctgtgccttaatttccctatcagtaaaatgggtataataataatacctcccttataagattgttgttttctgcgttaaatgagttaacatttataatgctcttggaaatagtgccagccacctaggtagttctatggaagtgtttgatgaaaacatgaaaataagaacaaatgatttctaggtttcaggtgttgaccaggggcaagaactgctctgttgcaagatggcactattgacaccagccccagggtcacaaagtagccaatttcagctaatgaaggctctgctcaagcatgaatctgtgggatcccagcctttacaagatagagttctccaggtccccgtgcttgcccatggaggatgctgcagagaagataaagtggtagcttctaggcttactccagagtcccaggtgatgaaaaacagactaagagcagggacttgcctccagctgaggagcttccagaaaaggagcatgggaagatatcgtgccacctgagagaagacattgcccagattcctacatgtgcagaagctggtgaacaggagggcaggctacaaagaaagcagaaaaatgccacaggagggaggcggcacatctgccatgaatgtggaaagagttttgctcaaagctcaggcctgagtaaacacaggagaatccacactggtgagaaaccctacgaatgtgaagagtgtggcaaagccttcattgggagctctgcccttgtcattcatcagagagtccacactggtgagaagccatatgagtgtgaagaatgtggtaaggccttcagtcatagctcagaccttatcaagcatcagagaacccacactggggagaagccctatgagtgtgatgactgtgggaagaccttcagccagagctgcagcctccttgaacatcacagaatccacattggtcagattcataaagtcttatatccccctctgtgccttttctgcaggtgctaataaatgtttattgaatgtaccagtgagattaccttcatagatctgaaaatctgatgttatccaggtttctgaagaacttctcgccaaggccatttgtgcttgtgtccaattctctgacctagattgtgactcaatctagtgtgtttcttaccaagtacataggcagagcagggttactgtgattgaaagaatccattttttttttggagacgtagtcttgctctgtcgcccaggctggagtgcagtggcacaatcttggctcactgcaacctccacctcctgggttcaagcgattctcctgcctcagcctcctgagtagctgggattacaggtgtgtgccaccatgcccggctaattttttatgtttttagtagagacgggattttaccgtgttagccaggatggtctcgatctcctaacctcatgatcctcctgcctcagcctaccaaagtgctgggattacaggcatgagccaccatgcccggccaagaatccatatttctttaccagactaggaattctattctagtgcaaatgccttaaaaagcttatcactaaatcattacgaatgtgtgccatccgtggaattgcttttttttttttttttttgtaaatatgaggtctcactatgttgcccaggctggtctcgaaatcctgggcaatcctcctgcctcaccctctcaagtactggaattacaggcgtgagccaccatacccagcccaaatttcactctttaatgttttcctgttgctattctttaaggaaaaaactttcctattcagacagtgtgaaaatcagtcatcaagtcagaataaaatgatgaatattct

SEQ ID NO: 3938 - protein, 91 aa, Homo sapiens
MALLTPAPGSQSSQFQLMKALLKHESVGSQPLQDRVLQVPVLAHGGCCREDKVVASRLTPESQVMKNRLRAGTCLQLRSFQKRSMGRYRAT

SEQ ID NO: 3939 - DNA, 1795 bp, Homo sapiens
agtttcaagcactttgtgagtatggggtgaatcggcgtcggccttccactgtggggttaaatctcatcccgcggctctcctcctgtcggtcctgcagttcttttgtccccgggtagaggtttcaggtgttgaccaggggcaagaactgctctgttgcaagatggcactattgacaccagccccagggtcacaaagtagccaatttcagctaatgaaggctctgctcaagcatgaatctgtgggatcccagcctttacaagatagagttctccaggtccccgtgcttgcccatggaggatgctgcagagaagataaagtggtagcttctaggcttactccagagtcccaggggttgttgaaagtggaagatgtggccctgaccctcacccctgaatggacacagcaggattcatctcaggggaatctctgtagagatgaaaagcaggagaaccatggcagcctggtctccctgggtgatgaaaaacagactaagagcagggacttgcctccagctgaggagcttccagaaaaggagcatgggaagatatcgtgccacctgagagaagacattgcccagattcctacatgtgcagaagctggtgaacaggagggcaggctacaaagaaagcagaaaaatgccacaggagggaggcggcacatctgccatgaatgtggaaagagttttgctcaaagctcaggcctgagtaaacacaggagaatccacactggtgagaaaccctacgaatgtgaagagtgtggcaaagccttcattgggagctctgcccttgtcattcatcagagagtccacactggtgagaagccatatgagtgtgaagaatgtggtaaggccttcagtcatagctcagaccttatcaagcatcagagaacccacactggggagaagccctatgagtgtgatgactgtgggaagaccttcagccagagctgcagcctccttgaacatcacagaatccacactggggagaagccgtatcagtgcagtatgtgtggcaaagcctttaggcgaagttcacatctcctgagacatcagaggatccatactggggataaaaatgttcaggaacctgagcagggagaggcctggaaaagtaggatggaaagccagttggaaaatgttgaaactcccatgtcttataaatgtaatgagtgtgaaagaagtttcactcagaatacaggcctcattgaacatcaaaaaatccacactggtgagaaaccctatcagtgtaatgcgtgtggaaaaggcttcacccgaatttcataccttgttcaacatcagagaagccatgtagggaaaaacatcctatcacagtgacccatgccatacatgccagagttggtgctcatttgtcactgatctgaagccactccccctggagtctcaactatagaaattgtgggctgggctttatttaccactacacattatcaggtgttagaaaatgtagactgggttagacaaattatcttctaagttctagaaggggtttgtaatcaaaacatatttgataggaggctacgggagagttgtctagaagaggtaagacctgaaactgtttgttctctcccactagaattaaatggatgtttagactggctacttgccctaaaccagcacttggtgatgtctactgggtggatggttgtgatttgggggctgcttctctgaccattctttttgactgtaatgaatcctccacagttggtcagattcataaagtcttatatccccctctgtgccttttctgcaggtgctaataaatgtttattgaatgta

SEQ ID NO: 3940 - protein, 390 aa, Homo sapiens
MALLTPAPGSQSSQFQLMKALLKHESVGSQPLQDRVLQVPVLAHGGCCREDKVVASRLTPESQGLLKVEDVALTLTPEWTQQDSSQGNLCRDEKQENHGSLVSLGDEKQTKSRDLPPAEELPEKEHGKISCHLREDIAQIPTCAEAGEQEGRLQRKQKNATGGRRHICHECGKSFAQSSGLSKHRRIHTGEKPYECEECGKAFIGSSALVIHQRVHTGEKPYECEECGKAFSHSSDLIKHQRTHTGEKPYECDDCGKTFSQSCSLLEHHRIHTGEKPYQCSMCGKAFRRSSHLLRHQRIHTGDKNVQEPEQGEAWKSRMESQLENVETPMSYKCNECERSFTQNTGLIEHQKIHTGEKPYQCNACGKGFTRISYLVQHQRSHVGKNILSQ

SEQ ID NO: 3941 - DNA, 2251 bp, Homo sapiens
gcactttgtgagtatggggtgaatcggcgtcggccttccactgtggggttaaatctcatcccgcggctctcctcctgtcggtcctgcagttcttttgtccccgggtagagggatcttctgcagaaatagcgctggaagctagagtgaggcctgagtactgccttggcctaggatggctagagaattaagtgaaagcacagccctggatgcccagtctacagaagaccagatggagcttctggtcataaaggtggaggaagaagaagccggttttcccagtagcccagatctgggttctgagggctcccgcgagcgcttccgaggcttccgctacccggaggctgcaggcccccgcgaggcgctgagtcggctccgagagctctgccgacagtggctgcagcctgagatgcacagcaaggagcagatcctggagctgctggtgctggagcagttcctgaccatcctgccggggaatctgcagagctgggtgcgggagcagcatccagagagcggggaggaggtggtggtgctattggagtatttggagaggcagctggatgagccggcgccgcaggtttcaggtgttgaccaggggcaagaactgctctgttgcaagatggcactattgacaccagccccagggtcacaaagtagccaatttcagctaatgaaggctctgctcaagcatgaatctgtgggatcccagcctttacaagatagagttctccaggtccccgtgcttgcccatggaggatgctgcagagaagataaagtggtagcttctaggcttactccagagtcccaggggttgttgaaagtggaagatgtggccctgaccctcacccctgaatggacacagcaggattcatctcaggggaatctctgtagagatgaaaagcaggagaaccatggcagcctggtctccctgggtgatgaaaaacagactaagagcagggacttgcctccagctgaggagcttccagaaaaggagcatgggaagatatcgtgccacctgagagaagacattgcccagattcctacatgtgcagaagctggtgaacaggagggcaggctacaaagaaagcagaaaaatgccacaggagggaggcggcacatctgccatgaatgtggaaagagttttgctcaaagctcaggcctgagtaaacacaggagaatccacactggtgagaaaccctacgaatgtgaagagtgtggcaaagccttcattgggagctctgcccttgtcattcatcagagagtccacactggtgagaagccatatgagtgtgaagaatgtggtaaggccttcagtcatagctcagaccttatcaagcatcagagaacccacactggggagaagccctatgagtgtgatgactgtgggaagaccttcagccagagctgcagcctccttgaacatcacagaatccacactggggagaagccgtatcagtgcagtatgtgtggcaaagcctttaggcgaagttcacatctcctgagacatcagaggatccatactggggataaaaatgttcaggaacctgagcagggagaggcctggaaaagtaggatggaaagccagttggaaaatgttgaaactcccatgtcttataaatgtaatgagtgtgaaagaagtttcactcagaatacaggcctcattgaacatcaaaaaatccacactggtgagaaaccctatcagtgtaatgcgtgtggaaaaggcttcacccgaatttcataccttgttcaacatcagagaagccatgtagggaaaaacatcctatcacagtgacccatgccatacatgccagagttggtgctcatttgtcactgatctgaagccactccccctggagtctcaactatagaaattgtgggctgggctttatttaccactacacattatcaggtgttagaaaatgtagactgggttagacaaattatcttctaagttctagaaggggtttgtaatcaaaacatatttgataggaggctacgggagagttgtctagaagaggtaagacctgaaactgtttgttctctcccactagaattaaatggatgtttagactggctacttgccctaaaccagcacttggtgatgtctactgggtggatggttgtgatttgggggctgcttctctgaccattctttttgactgtaatgaatcctccacagttggtcagattcataaagtcttatatccccctctgtgccttttctgcaggtgctaataaatgtttattgaatgta

SEQ ID NO: 3942 - protein, 538 aa, Homo sapiens
MARELSESTALDAQSTEDQMELLVIKVEEEEAGFPSSPDLGSEGSRERFRGFRYPEAAGPREALSRLRELCRQWLQPEMHSKEQILELLVLEQFLTILPGNLQSWVREQHPESGEEVVVLLEYLERQLDEPAPQVSGVDQGQELLCCKMALLTPAPGSQSSQFQLMKALLKHESVGSQPLQDRVLQVPVLAHGGCCREDKVVASRLTPESQGLLKVEDVALTLTPEWTQQDSSQGNLCRDEKQENHGSLVSLGDEKQTKSRDLPPAEELPEKEHGKISCHLREDIAQIPTCAEAGEQEGRLQRKQKNATGGRRHICHECGKSFAQSSGLSKHRRIHTGEKPYECEECGKAFIGSSALVIHQRVHTGEKPYECEECGKAFSHSSDLIKHQRTHTGEKPYECDDCGKTFSQSCSLLEHHRIHTGEKPYQCSMCGKAFRRSSHLLRHQRIHTGDKNVQEPEQGEAWKSRMESQLENVETPMSYKCNECERSFTQNTGLIEHQKIHTGEKPYQCNACGKGFTRISYLVQHQRSHVGKNILSQ

SEQ ID NO: 3943 - DNA, 379 bp, Homo sapiens
aaaagtaagatattctgaaagagagcctatcccagaagccatgagacctgggcctgatctaagagggaagggaaacctgagattcctgtgaaccagctgggactagattttaaactagaagtcattctgatgtgcagctgagtttgagatctaataagttaaagatactaaaaagaagcaatcgaccaaatccagaatgtgaggcattttataaaacagaaggttcaagttcctcaacaaataaatggcatttttaccaaaaggagtgggagggaatgggaactgtcatagattagaagactgaacagacttatcaaataaatgcaaatggtgaaccatattcggaccccactgaaaacaacaactgtaaaaagactgt

SEQ ID NO: 3944 - protein, 39 aa, Homo sapiens
KEAIDQIQNVRHFIKQKVQVPQQINGIFTKRSGREWELS

SEQ ID NO: 3945 - DNA, 1153 bp, Homo sapiens
ggtgatgaaaaacagactaagagcagggacttgcctccagctgaggagcttccagaaaaggagcatgggaagatatcgtgccacctgagagaagacattgcccagattcctacatgtgcagaagctggtgaacaggagggcaggctacaaagaaagcagaaaaatgccacaggagggaggcggcacatctgccatgaatgtggaaagagttttgctcaaagctcaggcctgagtaaacacaggagaatccacaactggtgagaagccatatgagtgtgaagaatgtggtaaggccttcagtcatagctcagaccttatcaagcatagaatccacactggggagaagccgtatcagtgcagtatgtgtggcaaagcctttaggcgaagttcacatctcctgagacatcagaggatccatactggggataaaaatgttcaggaacctgagcagggagaggcctggaaaagtaggatggaaagccagttggaaaatgttgaaactcccatgtcttataaatgtaatgagtgtgaaagaagtttcactcagaatacaggcctcattgaacatcaaaaaatccacactggtgagaaaccctatcagtgtaatgcgtgtggaaaaggcttcacccgaatttcataccttgttcaacatcagagaagccatgtagggaaaaacatcctatcacagtgacccatgccatacatgccagagttggtgctcatttgtcactgatctgaagccactccccctggagtctcaactatagaaattgtgggctgggctttatttaccactacacattatcaggtgttagaaaatgtagactgggttagacaaattatcttctaagttctagaaggggtttgtaatcaaaacatatttgataggaggctacgggagagttgtctagaagaggtaagacctgaaactgtttgttctctcccactagaattaaatggatgtttagactggctacttgccctaaaccagcacttggtgatgtctactgggtggatggttgtgatttgggggctgcttctctgaccattctttttgactgtaatgaatcctccacagttggtcagattcataaagtcttatatccccctctgtgccttttctgcaggtgctaataaatgtttattgaatgta

SEQ ID NO: 3946 - protein, 43 aa, Homo sapiens
MSVKNVVRPSVIAQTLSSIESTLGRSRISAVCVAKPLGEVHIS

SEQ ID NO: 3947 - DNA, 1136 bp, Homo sapiens
catgcccggccaagaatccatatttctttaccagactaggaattctattctagtgcaaatgccttaaaaagcttatcactaaatcattacgaatgtgtgccatccgtggaattgcttttttttttttttttttgtaaatatgaggtctcactatgttgcccaggctggtctcgaaatcctgggcaatcctcctgcctcaccctctcaagtactggaattacaggcgtgagccaccgcgcccggcccaagtatcacttatggtttcagaacgccattattagtgtctgactgtcttggtcttcttatacattgattcccaaatcacgtgtggtaacagcatctcaatttttcatgatgacggtttgaaccattaatttaattcctcaggctatctacttttttgttaaacatactgtgtagaccatcttttttttttcccatcatgatagtcaaaattttagtctgtgtattcaagtgagaaaatttttagtcagcattatacaagtagtatttattatgtatacattcagtggagttgtttctacaaaagtatttcggaatgactattctgctgcaaacttttgtgtaagcgcttcaccttattcctacaataaggagaagtgcactaacaaaatgaacaatgcagcaagggcttcagtcgcagctcaggtcttatcaaacaccagagaaccctcaatgggagaagccttatgagtgtgacaactgtggaaagacagttccttttttgttagtatcacttctacttattgtagaaatatgctttcattattgcatctactcacatttctcactcggtttctggcaccagcaatctcttccatatttataatatcagtcaaaaactctggaattcaaatataacaagacttttctggtcacctttgatagttaatgacttgggcattgtgatatattatctcctgctgtatgtattttgtttagtagaaattgaatcattatccacaatcctttatagaactatccaagtccctgtttttatgctagtttccaaggcttggtccttcaaggttttcagggatctaggggacacaaatctaacaaatcctaatgtatattatttgtattatagtaataaaccatatggttactttgtt

SEQ ID NO: 3948 - protein, 42 aa, Homo sapiens
MLPRLVSKSWAILLPHPLKYWNYRREPPRPAQVSLMVSERHY

SEQ ID NO: 3949 - DNA, 1152 bp, Homo sapiens
catgcccggccaagaatccatatttctttaccagactaggaattctattctagtgcaaatgccttaaaaagcttatcactaaatcattacgaatgtgtgccatccgtggaattgcttttttttttttttttttgtaaatatgaggtctcactatgttgcccaggctggtctcgaaatcctgggcaatcctcctgcctcaccctctcaagtactggaattacaggcgtgagccaccgcgcccggcccaagtatcacttatggtttcagaacgccattattagtgtctgactgtcttggtcttcttatacattgattcccaaatcacgtgtggtaacagcatctcaatttttcatgatgacggtttgaaccattaatttaattcctcaggctatctacttttttgttaaacatactgtgtagaccatcttttttttttcccatcatgatagtcaaaattttagtctgtgtattcaagtgagaaaatttttagtcagcattatacaagtagtatttattatgtatacattcagtggagttgtttctacaaaagtatttcggaatgactattctgctgcaaacttttgtgtaagcgcttcaccttattcctacaataaggagaagtgcactaacaaaatgaacaatgcagcaagggcttcagtcgcagctcaggtcttatcaaacaccagagaaccctcaatgggagaagccttatgagtgtgacaactgtggaaagacagttccttttttgttagtatcacttctacttattgtagaaatatgctttcattattgcatctactcacatttctcactcggtttctggcaccagcaatctcttccatatttataatatcagtcaaaaactctggaattcaaatataacaagacttttctggtcacctttgatagttaatgacttgggcattgtgatatattatctcctgctgtatgtattttgtttagtagaaattgaatcattatccacaatcctttatagaactatccaagtccctgtttttatgctagtttccaaggcttggtccttcaaggttttcagggatctaggggacacaaatctaacaaatcctaatgtatattatttgtattatagtaataaaccatatggttactttgtttgagtggattcttaaa

SEQ ID NO: 3950 - protein, 42 aa, Homo sapiens; identical to SEQ ID NO: 3948

SEQ ID NO: 3951 - DNA, 354 bp, Homo sapiens
caatatcatatgccacttcctgatgaatgtttagaggttaagttactttaggtaggattgaacccagttgcccaatgccttagttgttattaaaagtttgttgcaggccaggcatgagccactgcgcccggctgtcttttcatctttttaacagggtctttcagagcataaattttacattttgataaatacaaagtcataaacatttcatttaatgaattatgcttttgatgtcagttttaagaatctttgcctagccctaggctctgatgcttctaagaggtctcaagttttaggtattattttagcccatgacccattttgagtttgttgttgttgttgtttggtttacgg

SEQ ID NO: 3952 - protein, 36 aa, Homo sapiens
MNYAFDVSFKNLCLALGSDASKRSQVLGIILAHDPF

SEQ ID NO: 3953 - DNA, 589 bp, Homo sapiens
caaagaaaaggagtaacaggctgggtgcggtggctcacgcctataatcccaaagttcagggattacaggcatgagccaccatgcccggctgtttttttaagatagaaaaatatacttcatgtatagcctattgacagataatgactgatattttttcttatagataacacataataaacattgtgaagactaataagtaacttgcttattcttttcagttctaaaacctgtaggaaagaatctttagaagctgtcaacaagttgataatgtagcccaatctctacccatgataggagagtaaggcttatatattttatagtagggcactaaatacaggaaccatgtatttaaaaactttttagtgattatctcagaattctaggtgtccctctgctgtacatccctaaattttttgcataggtattattaataaattcattattttcaaagatggactgtgttctgtaaaaagcttttccagtatctgcaaatcacacagttttttttaactctattactattatataaaatgatttcttaatattgaaccaaccttgcattcctagaataaacctcacttagccatga

SEQ ID NO: 3954 - protein, 34 aa, Homo sapiens
QRKGVTGWVRWLTPIIPKFRDYRHEPPCPAVFLR

SEQ ID NO: 3955 - DNA, 2513 bp, Homo sapiens
gggtggtttcagattcgtgcgctccggcctttcagtgtctctggaagaagaccagctacaaggaaatacttctgaaaaatcactctgaaccccaagctggagtgaatcttctcctgagctctctcattccagaatggcaatcttgtttcaggagagatctctaatagtgactgatggtaaaggaagaaggctgtgcctagaacaaagaatcaggctggcaaagaaatcacaggtctttcctcaaactttaaattgctactctctggagatagctacctggactttacagagctgtcagaagacttgggaaggtttgccagcattggaaaaagccacttggacttcacagagctgtcagaagacttaggaagctttgccagtagttcctgagaccagaaatacatattatgaagcaggtgctggaacaggccctggcccctacttgtgaagctgcagatatagatggtgttactgagaaggaaactaaggacttggctccaaaacaaaacaaaacaaaatctggagatgctgaattttgttggggggaatgtctgtagaactgcaacatcaatgcagtaagtgtagtaaaagctttagtttatggtgagtcattactcagcatcatggagtccacgatgaagagaatctcttttcaatctgtgcaatcaacaagtttttgaaaggcttttgtttatagtggaaccctcttttccccctagaagaaccaccacaaggaaaaatgctgtcaccataaggaatgtgggaaagttttcagccacatggccttatttgacttcaaagaatccacatgagagagagactgcataaatgtaataactgaggaggcctttgttcagcaaagaaaccttatacaaactcgtataaagaatgtaggaagaccttcacccagaagccaggactgactgtgcaccagagaatctgcacaataaacatgatgaatgtggagatgcttgcttcagcattggagaattcacagtaaagggaaaccctgccagtgtgatgagtacggaaaagtcttcagaggttggaacttgggaaaaatcagtgagtgaattcatattagagaggctcttataaatgagaggattgtggaaacttgtatagacagagatcagacctcaacaagggagcctccacagtattgaaaagttaatataattaatgtaagtgggcaagttgtatggggaatgggtagtctaaattgctcattttagccagtaaaaacattaaattagtttcttagatcaagaaaaggaaatgttagaagttatttttcccttccagaggggtctatatgtgtaagcaaccaggacttttgaaataagttgcatctctggatttgtgatctgtctcctggatgattatctctgttttgggagacaggtattttttcttcatgcctgctctagtctcatctcatatctttaattcattcagcaagtatacacaatagtattatcgtctactgtttgttgtaaatatatatatattattttctttttggtctgagtaggcttgtattggtaccctaggacataaaaatcacatatatcatgtttcagtaaatgcagtgaaaggaactatattattaaattgctgggaatttctgtaaatttgagactacctttatattctccaacacaagaccgtgtaggtgtcccttcagagagtatatttttctagcttggcttctttattttctttatttttttgagatggagtcttgctcctgtcgcccaggctggagtgcaatggcacgatctcggctcactgcaacctccgcctcccaggttcaagtgattctcctgtctcagtctcccgagtagctgggattacaggcacttgccaccattcccagctaatttttgtatttttagtagagacggggtttcaccatgttggccaggctggtctcgaactcctgaccttgtgatctgcccaccttggcctcccaaagttcagggattacaggcatgagccaccatgcccggctgtttttttaagatagaaaaatatacttcatgtatagcctattgacagataatgactgatattttttcttatagataacacataataaacattgtgaagactaataagtaacttgcttattcttttcagttctaaaacctgtaggaaagaatctttagaagctgtcaacaagttgataatgtagcccaatctctacccatgataggagagtaaggcttatatattttatagtagggcactaaatacaggaaccatgtatttaaaaactttttagtgattatctcagaattctaggtgtccctctgctgtacatccctaaattttttgcataggtattattaataaattcattattttcaaagatggactgtgttctgtaaaaagcttttccagtatctgcaaatcacacagttttttttaactctattactattatataaaatgatttcttaatattgaaccaaccttgcattcctagaataaacctcacttagccatga

SEQ ID NO: 3956 - protein, 49 aa, Homo sapiens [sequence omitted]

SEQ ID NO: 3957 - DNA, 2646 bp, Homo sapiens
cagccgttgacggcagcggcacgtgaaagtaccgacctttctggcctttgtgacggacctttggaggcgggtggtttcagattcgtgcgctccggcctttcagtgtctctggtgaggttgggcctgataggttgagagctgccaggggaagttaaggatgacttccaagttttgaggaagaagaccagctacaaggaaatacttctgaaaaatcactctgaaccccaagctggagtgaatcttctcctgagctctctcattccagaatggcaatcttgtttcaggagagatctctaatagtgactgatggtaaaggaagaaggctgtgcctagaacaaagaatcaggctggcaaagaaatcacaggtctttcctcaaactttaaattgctactctctggagatagctacctggactttacagagctgtcagaagacttgggaaggtttgccagcattggaaaaagccacttggacttcacagagctgtcagaagacttaggaagctttgccagtagttcctgagaccagaaatacatattatgaagcaggtgctggaacaggccctggcccctacttgtgaagctgcagatatagatggtgttactgagaaggaaactaaggacttggctccaaaacaaaacaaaacaaaatctggagatgctgaattttgttggggggaatgtctgtagaactgcaacatcaatgcagtaagtgtagtaaaagctttagtttatggtgagtcattactcagcatcatggagtccacgatgaagagaatctcttttcaatctgtgcaatcaacaagtttttgaaaggcttttgtttatagtggaaccctcttttccccctagaagaaccaccacaaggaaaaatgctgtcaccataaggaatgtgggaaagttttcagccacatggccttatttgacttcaaagaatccacatgagagagagactgcataaatgtaataactgaggaggcctttgttcagcaaagaaaccttatacaaactcgtataaagaatgtaggaagaccttcacccagaagccaggactgactgtgcaccagagaatctgcacaataaacatgatgaatgtggagatgcttgcttcagcattggagaattcacagtaaagggaaaccctgccagtgtgatgagtacggaaaagtcttcagaggttggaacttgggaaaaatcagtgagtgaattcatattagagaggctcttataaatgagaggattgtggaaacttgtatagacagagatcagacctcaacaagggagcctccacagtattgaaaagttaatataattaatgtaagtgggcaagttgtatggggaatgggtagtctaaattgctcattttagccagtaaaaacattaaattagtttcttagatcaagaaaaggaaatgttagaagttatttttcccttccagaggggtctatatgtgtaagcaaccaggacttttgaaataagttgcatctctggatttgtgatctgtctcctggatgattatctctgttttgggagacaggtattttttcttcatgcctgctctagtctcatctcatatctttaattcattcagcaagtatacacaatagtattatcgtctactgtttgttgtaaatatatatatattattttctttttggtctgagtaggcttgtattggtaccctaggacataaaaatcacatatatcatgtttcagtaaatgcagtgaaaggaactatattattaaattgctgggaatttctgtaaatttgagactacctttatattctccaacacaagaccgtgtaggtgtcccttcagagagtatatttttctagcttggcttctttattttctttatttttttgagatggagtcttgctcctgtcgcccaggctggagtgcaatggcacgatctcggctcactgcaacctccgcctcccaggttcaagtgattctcctgtctcagtctcccgagtagctgggattacaggcacttgccaccattcccagctaatttttgtatttttagtagagacggggtttcaccatgttggccaggctggtctcgaactcctgaccttgtgatctgcccaccttggcctcccaaagttcagggattacaggcatgagccaccatgcccggctgtttttttaagatagaaaaatatacttcatgtatagcctattgacagataatgactgatattttttcttatagataacacataataaacattgtgaagactaataagtaacttgcttattcttttcagttctaaaacctgtaggaaagaatctttagaagctgtcaacaagttgataatgtagcccaatctctacccatgataggagagtaaggcttatatattttatagtagggcactaaatacaggaaccatgtatttaaaaactttttagtgattatctcagaattctaggtgtccctctgctgtacatccctaaattttttgcataggtattattaataaattcattattttcaaagatggactgtgttctgtaaaaagcttttccagtatctgcaaatcacacagttttttttaactctattactattatataaaatgatttcttaatattgaaccaaccttgcattcctagaataaacctcacttagccatga

SEQ ID NO: 3958 - protein, 49 aa, Homo sapiens [sequence omitted]

SEQ ID NO: 3959 - DNA, 5662 bp, Homo sapiens
gcttccggcctttgtgggtcacttttgatgggttccgggtcccaaaagggttcgaggcctcttgccttcgctccgtaggagggagttctcttctggccctgggggccgcaggactgtccaggaatacagtttccaggtgagatcttacttgaaacaccggtagttctagcacagctaaaatggcatctacttgggctatccaggcccacatggaccaggatgaacctttggaagtaaagatagaggaagagaaatataccaccagacaggattgggacctgcgtaaaaacaacacccatagcagagaggtcttccgtcagtacttcagacagttctgctaccaggagacatctggtccccgtgaggctttgagccgactccgagaactttgccatcagtggctgaggccagagacccacaccaaagaacagattctggagctgctggtgctggagcagttcctgaccatcctacctgaggagctccaggcctgggtgcaggagcagcatccagagagtggggaggaggtggtgactgtgctggaggatttagagagagaactggatgaaccaggagagcaggtctcagtccacactggggaacaggaaatgttcttgcaggagacggtacgtctacgaaaagaaggagaacccagtatgtccctccagtccatgaaagcccagccaaagtatgaatctccagaacttgaatcccaacaggagcaagttttagatgttgagactggaaatgagtatgggaatttaaagcaagaagtttctgaagaaatggaaccacatgggaagacatccagtaaatttgaaaatgatatgtccaagtctgctaggtgtggagaaactcgtgaacctgaagaaataacagaagagccctctgcttgctccagagaagataaacaacctacctgtgatgaaaatggagtaagcctgactgagaactctgaccatactgaacatcagagaatctgtccaggagaagaatcttacggatgtgatgactgtggaaaagcttttagtcagcactcacacctcatagaacatcagaggatccatactggagatagaccctacaaatgcgaagaatgtggaaaagctttccgtgggagaactgtgcttattcgacacaaaataatacacactggagagaaaccgtataagtgtaatgaatgtggcaaagcctttggccggtggtcagctcttaaccaacatcagagacttcacacaggagaaaaacactatcactgtaatgactgtggcaaagcctttagtcagaaagcaggcctctttcaccatatcaagatccacacaagagacaaaccttatcagtgcactcagtgtaataaaagttttagtcggcgttccatacttactcagcatcaaggagttcataccggcgccaagccgtatgagtgcaacgagtgtggaaaagcctttgtttataactcatcccttgtttcccatcaggaaatccaccacaaagaaaaatgctatcagtgtaaggaatgtgggaaatccttcagtcagagtggccttattcagcatcagagaattcacactggggaaaaaccctacaaatgtgacgtatgtgaaaaagcctttattcaaaggacaagtcttacagaacatcagcgaattcacactggagaaagaccctataaatgtgataagtgtgggaaggcgtttactcaaagatcagtcctcacggaacatcagagaatccacactggagagaggccctacaagtgtgatgagtgtgggaatgccttccgaggaatcaccagcctcattcagcatcagagaatccacactggggagaagccctaccaatgtgatgagtgtggaaaagccttcagacagaggaagaagaccagctacaaggaaatacttctgaaaaatcactctgaaccccaagctggagtgaatcttctcctgagctctctcattccagaatggcaatcttgtttcaggagagatctctaatagtgactgatggtaaaggaagaaggctgtgcctagaacaaagaatcaggctggcaaagaaatcacaggtctttcctcaaactttaaattgctactctctggagatagctacctggactttacagagctgtcagaagacttgggaaggtttgccagcattggaaaaagccacttggacttcacagagctgtcagaagacttaggaagctttgccagtagttcctgagaccagaaatacatattatgaagcaggtgctggaacaggccctggcccctacttgtgaagctgcagatataggtaagataatatcatccagaatgtggagacgaggcaatcgatgatgctggaaaagttgaagagagagtttgaatgaaggacaaaccaccgatgggaaagcttgggaggatcacttatagcttgactagcaaaaggctttgggaataggatagaaagcagcaaacctgaactttaggatccaccagatgtctctggagccataacccaacatttcccataaatagtaggttttaattctcctgttatttaggtgcatctctgggacctcctctttctatattgggttttttgtttgttgggtgttttaacttaggatttagcttcaaattccatttcccaagaccaattttatcacattgcctttaggtctcaggctaaatgatataacaagatatgcttttggcaaagatagtaccttggaatgaaaggtttcagatcaaacctaagatcctaccttagtttacctctcagtgttattgccttttgatatggaaagctgatgagagagcatctctggagagaaagaagaggagagcctcacgggaagcttttagaacttttagtagcatcctctccccagaaaacttgtctctactcatctccttctcattatctacctgattcgttaagtaggaaatctcagccatatttgtaggggattggggttttgttttttttgacccacttaactcctttagcttcagagtgttgctttcttacattttagacatgaatattacctagaaaatttatttccccactgttaattttccagtttattgatttccccacatcagattagtgtgtattttgaaactggtttagctattgtttcaagttaactttgatcatatcccgttgtttactgatccactcaacaaatatttattgaacattctgtaggtttatagtagtagccaagatacttaaagtgagtagaaatagtccttttaactgtccttaacaaattaaactttctcttggtttcatgatattccttgtttctcagctttggattcaaactgatcttctcttttttgattatactttcctgatttcttttattgtcacatttttgtgaaaagtcttccatgcacttccagtctctttctgcctagctgtctcttctcacccaaattggacccccctactcctaccctgccacgtgccttcacaaaaatgagatgcttgtttagagacttagaaaaggcatgcactttaggtaaaagtggattttatttttaatcactgtaccctatcataaatctcatttcagaagagacaactgacatttgaattgtctgtgcattttgttttagatggtgttactgagaaggaaactaaggacttggctccaaaacaaaacaaaacaaaatctggagatgctgaattttgttggggggaatgtctgtagaactgcaacatcaatgcagtaagtgtagtaaaagctttagtttatggtgagtcattactcagcatcatggagtccacgatgaagagaatctcttttcaatctgtgcaatcaacaagtttttgaaaggcttttgtttatagtggaaccctcttttccccctagaagaaccaccacaaggaaaaatgctgtcaccataaggaatgtgggaaagttttcagccacatggccttatttgacttcaaagaatccacatgagagagagactgcataaatgtaataactgaggaggcctttgttcagcaaagaaaccttatacaaactcgtataaagaatgtaggaagaccttcacccagaagccaggactgactgtgcaccagagaatctgcacaataaacatgatgaatgtggagatgcttgcttcagcattggagaattcacagtaaagggaaaccctgccagtgtgatgagtacggaaaagtcttcagaggttggaacttgggaaaaatcagtgagtgaattcatattagagaggctcttataaatgagaggattgtggaaacttgtatagacagagatcagacctcaacaagggagcctccacagtattgaaaagttaatataattaatgtaagtgggcaagttgtatggggaatgggtagtctaaattgctcattttagccagtaaaaacattaaattagtttcttagatcaagaaaaggaaatgttagaagttatttttcccttccagaggggtctatatgtgtaagcaaccaggacttttgaaataagttgcatctctggatttgtgatctgtctcctggatgattatctctgttttgggagacaggtattttttcttcatgcctgctctagtctcatctcatatctttaattcattcagcaagtatacacaatagtattatcgtctactgtttgttgtaaatatatatatattattttctttttggtctgagtaggcttgtattggtaccctaggacataaaaatcacatatatcatgtttcagtaaatgcagtgaaaggaactatattattaaattgctgggaatttctgtaaatttgagactacctttatattctccaacacaagaccgtgtaggtgtcccttcagagagtatatttttctagcttggcttctttattttctttatttttttgagatggagtcttgctcctgtcgcccaggctggagtgcaatggcacgatctcggctcactgcaacctccgcctcccaggttcaagtgattctcctgtctcagtctcccgagtagctgggattacaggcacttgccaccattcccagctaatttttgtatttttagtagagacggggtttcaccatgttggccaggctggtctcgaactcctgaccttgtgatctgcccaccttggcctcccaaagttcagggattacaggcatgagccaccatgcccggctgtttttttaagatagaaaaatatacttcatgtatagcctattgacagataatgactgatattttttcttatagataacacataataaacattgtgaagactaataagtaacttgcttattcttttcagttctaaaacctgtaggaaagaatctttagaagctgtcaacaagttgataatgtagcccaatctctacccatgataggagagtaaggcttatatattttatagtagggcactaaatacaggaaccatgtatttaaaaactttttagtgattatctcagaattctaggtgtccctctgctgtacatccctaaattttttgcataggtattattaataaattcattattttcaaagatggactgtgttctgtaaaaagcttttccagtatctgcaaatcacacagttttttttaactctattactattatataaaatgatttcttaatattgaaccaaccttgcattcctagaataaacctcacttagccatga

SEQ ID NO: 3960 - protein, 604 aa, Homo sapiens
MASTWAIQAHMDQDEPLEVKIEEEKYTTRQDWDLRKNNTHSREVFRQYFRQFCYQETSGPREALSRLRELCHQWLRPETHTKEQILELLVLEQFLTILPEELQAWVQEQHPESGEEVVTVLEDLERELDEPGEQVSVHTGEQEMFLQETVRLRKEGEPSMSLQSMKAQPKYESPELESQQEQVLDVETGNEYGNLKQEVSEEMEPHGKTSSKFENDMSKSARCGETREPEEITEEPSACSREDKQPTCDENGVSLTENSDHTEHQRICPGEESYGCDDCGKAFSQHSHLIEHQRIHTGDRPYKCEECGKAFRGRTVLIRHKIIHTGEKPYKCNECGKAFGRWSALNQHQRLHTGEKHYHCNDCGKAFSQKAGLFHHIKIHTRDKPYQCTQCNKSFSRRSILTQHQGVHTGAKPYECNECGKAFVYNSSLVSHQEIHHKEKCYQCKECGKSFSQSGLIQHQRIHTGEKPYKCDVCEKAFIQRTSLTEHQRIHTGERPYKCDKCGKAFTQRSVLTEHQRIHTGERPYKCDECGNAFRGITSLIQHQRIHTGEKPYQCDECGKAFRQRKKTSYKEILLKNHSEPQAGVNLLLSSLIPEWQSCFRRDL

SEQ ID NO: 3961 - DNA, 3945 bp, Homo sapiens
gcttccggcctttgtgggtcacttttgatgggttccgggtcccaaaagggttcgaggcctcttgccttcgctccgtaggagggagttctcttctggccctgggggccgcaggactgtccaggaatacagtttccaggtgagatcttacttgaaacaccggtagttctagcacagctaaaatggcatctacttgggctatccaggcccacatggaccaggatgaacctttggaagtaaagatagaggaagagaaatataccaccagacaggattgggacctgcgtaaaaacaacacccatagcagagaggtcttccgtcagtacttcagacagttctgctaccaggagacatctggtccccgtgaggctttgagccgactccgagaactttgccatcagtggctgaggccagagacccacaccaaagaacagattctggagctgctggtgctggagcagttcctgaccatcctacctgaggagctccaggcctgggtgcaggagcagcatccagagagtggggaggaggtggtgactgtgctggaggatttagagagagaactggatgaaccaggagagcaggtctcagtccacactggggaacaggaaatgttcttgcaggagacggtacgtctacgaaaagaaggagaacccagtatgtccctccagtccatgaaagcccagccaaagtatgaatctccagaacttgaatcccaacaggagcaagttttagatgttgagactggaaatgagtatgggaatttaaagcaagaagtttctgaagaaatggaaccacatgggaagacatccagtaaatttgaaaatgatatgtccaagtctgctaggtgtggagaaactcgtgaacctgaagaaataacagaagagccctctgcttgctccagagaagataaacaacctacctgtgatgaaaatggagtaagcctgactgagaactctgaccatactgaacatcagagaatctgtccaggagaagaatcttacggatgtgatgactgtggaaaagcttttagtcagcactcacacctcatagaacatcagaggatccatactggagatagaccctacaaatgcgaagaatgtggaaaagctttccgtgggagaactgtgcttattcgacacaaaataatacacactggagagaaaccgtataagtgtaatgaatgtggcaaagcctttggccggtggtcagctcttaaccaacatcagagacttcacacaggagaaaaacactatcactgtaatgactgtggcaaagcctttagtcagaaagcaggcctctttcaccatatcaagatccacacaagagacaaaccttatcagtgcactcagtgtaataaaagttttagtcggcgttccatacttactcagcatcaaggagttcataccggcgccaagccgtatgagtgcaacgagtgtggaaaagcctttgtttataactcatcccttgtttcccatcaggaaatccaccacaaagaaaaatgctatcagtgtaaggaatgtgggaaatccttcagtcagagtggccttattcagcatcagagaattcacactggggaaaaaccctacaaatgtgacgtatgtgaaaaagcctttattcaaaggacaagtcttacagaacatcagcgaattcacactggagaaagaccctataaatgtgataagtgtgggaaggcgtttactcaaagatcagtcctcacggaacatcagagaatccacactggagagaggccctacaagtgtgatgagtgtgggaatgccttccgaggaatcaccagcctcattcagcatcagagaatccacactggggagaagccctaccaatgtgatgagtgtggaaaagccttcagacagaggaagaagaccagctacaaggaaatacttctgaaaaatcactctgaaccccaagctggagtgaatcttctcctgagctctctcattccagaatggcaatcttgtttcaggagagatctctaatagtgactgatggtaaaggaagaaggctgtgcctagaacaaagaatcaggctggcaaagaaatcacaggtctttcctcaaactttaaattgctactctctggagatagctacctggactttacagagctgtcagaagacttgggaaggtttgccagcattggaaaaagccacttggacttcacagagctgtcagaagacttaggaagctttgccagtagttcctgagaccagaaatacatattatgaagcaggtgctggaacaggccctggcccctacttgtgaagctgcagatatagatggtgttactgagaaggaaactaaggacttggctccaaaacaaaacaaaacaaaatctggagatgctgaattttgttggggggaatgtctgtagaactgcaacatcaatgcagtaagtgtagtaaaagctttagtttatggtgagtcattactcagcatcatggagtccacgatgaagagaatctcttttcaatctgtgcaatcaacaagtttttgaaaggcttttgtttatagtggaaccctcttttccccctagaagaaccaccacaaggaaaaatgctgtcaccataaggaatgtgggaaagttttcagccacatggccttatttgacttcaaagaatccacatgagagagagactgcataaatgtaataactgaggaggcctttgttcagcaaagaaaccttatacaaactcgtataaagaatgtaggaagaccttcacccagaagccaggactgactgtgcaccagagaatctgcacaataaacatgatgaatgtggagatgcttgcttcagcattggagaattcacagtaaagggaaaccctgccagtgtgatgagtacggaaaagtcttcagaggttggaacttgggaaaaatcagtgagtgaattcatattagagaggctcttataaatgagaggattgtggaaacttgtatagacagagatcagacctcaacaagggagcctccacagtattgaaaagttaatataattaatgtaagtgggcaagttgtatggggaatgggtagtctaaattgctcattttagccagtaaaaacattaaattagtttcttagatcaagaaaaggaaatgttagaagttatttttcccttccagaggggtctatatgtgtaagcaaccaggacttttgaaataagttgcatctctggatttgtgatctgtctcctggatgattatctctgttttgggagacaggtattttttcttcatgcctgctctagtctcatctcatatctttaattcattcagcaagtatacacaatagtattatcgtctactgtttgttgtaaatatatatatattattttctttttggtctgagtaggcttgtattggtaccctaggacataaaaatcacatatatcatgtttcagtaaatgcagtgaaaggaactatattattaaattgctgggaatttctgtaaatttgagactacctttatattctccaacacaagaccgtgtaggtgtcccttcagagagtatatttttctagcttggcttctttattttctttatttttttgagatggagtcttgctcctgtcgcccaggctggagtgcaatggcacgatctcggctcactgcaacctccgcctcccaggttcaagtgattctcctgtctcagtctcccgagtagctgggattacaggcacttgccaccattcccagctaatttttgtatttttagtagagacggggtttcaccatgttggccaggctggtctcgaactcctgaccttgtgatctgcccaccttggcctcccaaagttcagggattacaggcatgagccaccatgcccggctgtttttttaagatagaaaaatatacttcatgtatagcctattgacagataatgactgatattttttcttatagataacacataataaacattgtgaagact

SEQ ID NO: 3962 - protein, 604 aa, Homo sapiens; identical to SEQ ID NO: 3960

SEQ ID NO: 3963 - DNA, 370 bp, Homo sapiens
attcacactggagaaagaccctataaatgtgataagtgtgggaaggcgtttactcaaagatcagtcctcacggaacatcagagaatccacactggagagaggccctacaagtgtgatgagtgtgggaatgccttccgaggaatcaccagcctcattcagcatcagagaatccacactggggagaagccctaccaatgtgatgagtgtggaaaagccttcagacagaggtaaacaagacattaagtgtttaaggcaaaaagcatggagaggttggggaagagccaagtttctaaagtaatgaaaagtgaggaagaagaccagctacaaggaaatacttctgaaaaatcactctgaaccccaagctggagtg

SEQ ID NO: 3964 - protein, 60 aa, Homo sapiens
MSVGMPSEESPASFSIRESTLGRSPTNVMSVEKPSDRGKQDIKCLRQKAWRGWGRAKFLK

SEQ ID NO: 3965 - DNA, 1496 bp, Homo sapiens
gcttccggcctttgtgggtcacttttgatgggttccgggtcccaaaagggttcgaggcctcttgccttcgctccgtaggagggagttctcttctggccctgggggccgcaggactgtccaggaatacagtttccaggtgagatcttacttgaaacaccggtagttctagcacagctaaaatggcatctacttgggctatccaggcccacatggaccaggatgaacctttggaagtaaagatagaggaagagaaatataccaccagacaggattgggacctgcgtaaaaacaacacccatagcagagaggtcttccgtcagtacttcagacagttctgctaccaggagacatctggtccccgtgaggctttgagccgactccgagaactttgccatcagtggctgaggccagagacccacaccaaagaacagattctggagctgctggtgctggagcagttcctgaccatcctacctgaggagctccaggcctgggtgcaggagcagcatccagagagtggggaggaggtggtgactgtgctggaggatttagagagagaactggatgaaccaggagagcagagtgagtctgtcagctacatctcattttcctcaggtctcagtccacactggggaacaggaaatgttcttgcaggagacggtacgtctacgaaaagaaggagaacccagtatgtccctccagtccatgaaagcccagccaaagtatgaatctccagaacttgaatcccaacaggagcaagttttagatgttgagactggaaatgagtatgggaatttaaagcaagaagtttctgaagaaatggaaccacatgggaagacatccagtaaatttgaaaatgatatgtccaagtctgctaggtgtggagaaactcgtgaacctgaagaaataacagaagagccctctgcttgctccagagaagataaacaacctacctgtgatgaaaatggagtaagcctgactgagaactctgaccatactgaacatcagagaatctgtccaggagaagaatcttacggatgtgatgactgtggaaaagcttttagtcagcactcacacctcatagaacatcagaggatccatactggagatagaccctacaaatgcgaagaatgtggaaaagctttccgtgggagaactgtgcttattcgacacaaaataatacacactggagagaaaccgtataagtgtaatgaatgtggcaaagcctttggccggtggtcagctcttaaccaacatcagagacttcacacaggagaaaaacactatcactgtaatgactgtggcaaagcctttagtcagaaagcaggcctctttcaccatatcaagatccacacaagagacaaaccttatcagtgcactcagtgtaataaaagttttagtcggcgttccatacttactcagcatcaaggagttcataccggcgccaagccgtatgagtgcaacgagtgtggaaaagcctttgtttataactcatc

SEQ ID NO: 3966 - protein, 309 aa, Homo sapiens
MNQESRVSLSATSHFPQVSVHTGEQEMFLQETVRLRKEGEPSMSLQSMKAQPKYESPELESQQEQVLDVETGNEYGNLKQEVSEEMEPHGKTSSKFENDMSKSARCGETREPEEITEEPSACSREDKQPTCDENGVSLTENSDHTEHQRICPGEESYGCDDCGKAFSQHSHLIEHQRIHTGDRPYKCEECGKAFRGRTVLIRHKIIHTGEKPYKCNECGKAFGRWSALNQHQRLHTGEKHYHCNDCGKAFSQKAGLFHHIKIHTRDKPYQCTQCNKSFSRRSILTQHQGVHTGAKPYECNECGKAFVYN

SEQ ID NO: 3967 - DNA, 2240 bp, Homo sapiens
gatctcggggtttccagaagaaaagatcaagggagaattatcaagaatagattatttttctgaatagttaaacctttgatggccataaccttgacccttcagactgcagagatgcaggaaggacttctggcagtgaaggtaaaggaggaagaggaggaacattcctgtgggccagaatcaggcctgtcaagaaataaccctcataccagagagatctttcgtagacgcttcaggcagttctgctatcaggagtcccctgggccccgggaggctcttcaaagactccaggagctctgccatcagtggctgagaccagagatgcacaccaaggagcagatcctagagctgctggtgctggagcagttcctgactatcctgcctgaggagctccaggcctgggtcagacagcaccgtcctgtgagtggagaggaggcagtgactgtgctggaggatttggagagagagctggatgacccaggagagcagatggcaaggctgggacttggaatgtggagttagccccaaagagggagatttctcaggaagtgaaatctcttatacaagttcttggaaaacagaatggtaatattactcagattcctgagtatggagatacctgtgaccgtgagggcagattggaaaagcaaagggtgagctcttcagtggagagaccctatatctgtagtgaatgtggaaaaagcttcacccagaattccatccttatcgagcaccagagaacacacacaggtgagaagccttatgaatgtgatgagtgtgggcgggccttcagccagaggtcaggcctattccagcaccagagactccacactggggagaagcgctaccagtgcagtgtttgtggcaaagccttcagccagaatgccgggcttttccatcacctcagaattcacactggggagaagccttaccagtgcaatcagtgcaataagagttttagtcgacgttcagtcctcattaagcatcagagaattcacactggagagagaccttatgaatgtgaagaatgtggcaagaacttcatttaccattgcaacctaatccagcatcggaaagtccacccagtggctgaatcaagctagctccttggaacagacacttacacttggagccctgagacccactgtaggcatctgcaaacaacagcaacaacaaagtgggatggaaagaaaaaagaacaaaatataagaacataaaaaagaatcagacagaagatactgtgttttctgcaaattgaaagtttgtggcaaccctgcatcaagcaagtctgtcaacaccatttttccaacatcatgtgcacacttcgtgtttctgtgtcacattttggcctccctattccctgagacacacagtgttgaaatgaaaccagttaataacactacagtggcctctcagtgttcacgtgaaaggaagagtctcacatctctctctttaaattaaaagctagaaatgattaagcttagtgaggaagacatgttgaaagctgagataggttgaaagctaggcctcttgtaccaaacagccagttgtgaatgcaaaggaaaagttcttgaaggaagtaaaaccactccactgaacacatgagtgataagaaaccaaaacagctttattgctgatacggagaaagtttgagtgatctggaaagaagatcaaaccagccacaacatgcctttaagccacagcctaatccacagcagggtcctaactttcttcaattctgtgacggctgagagagatgaggaagctgcagaagaaaagttagaagctagcagaggttgcttcatgaggtttaaggaaagaagctgtctccacaacataacagtgcaaagtgaagcagcaaatgttagtgtagacactgcagcaagttattcagaaaacctagctaagatagtggatgaaggtggctatactaaacaacatatttttaatgtagatgaaacactttatattggaagaagataccatcttggacttccataactagagagaagtcagtgcctggcttcaaaggacagtctgcctttcttgataggagctaatggagctggtgacttgaagttgaagccaatgctcatttactaagctgaaaatcctagagtccttaaggatcatgctggctgggcatgctgtaatcctagcacattgagaggccaagtcaggaggattgctgagcccaggagtttgagactagcctgggcaacatggaaaaaccctgtctctac

SEQ ID NO: 3968 - protein, 146 aa, Homo sapiens
MAITLTLQTAEMQEGLLAVKVKEEEEEHSCGPESGLSRNNPHTREIFRRRFRQFCYQESPGPREALQRLQELCHQWLRPEMHTKEQILELLVLEQFLTILPEELQAWVRQHRPVSGEEAVTVLEDLERELDDPGEQMARLGLGMWS

SEQ ID NO: 3969 - DNA, 3126 bp, Homo sapiens
ctgcggttgtcaaggattcagagcagatgtgatctgcgctaggtggcatctcctctcacggatgcctcgatctcggggtttccagaagaaaagatcaagggagaattatcaagaatagattatttttctgaatagttaaacctttgatggccataaccttgacccttcagactgcagagatgcaggaaggacttctggcagtgaaggtaaaggaggaagaggaggaacattcctgtgggccagaatcaggcctgtcaagaaataaccctcataccagagagatctttcgtagacgcttcaggcagttctgctatcaggagtcccctgggccccgggaggctcttcaaagactccaggagctctgccatcagtggctgagaccagagatgcacaccaaggagcagatcctagagctgctggtgctggagcagttcctgactatcctgcctgaggagctccaggcctgggtcagacagcaccgtcctgtgagtggagaggaggcagtgactgtgctggaggatttggagagagagctggatgacccaggagagcaggtcctgagccatgctcatgaacaggaagagtttgtaaaggagaaggcaactccaggagcagctcaggagtcatcaaatgaccaattccaaaccttggaagagcaacttgggtataatttgcgagaggtgtgcccagttcaagagattgatggcaaggctgggacttggaatgtggagttagccccaaagagggagatttctcaggaagtgaaatctcttatacaagttcttggaaaacagaatggtaatattactcagattcctgagtatggagatacctgtgaccgtgagggcagattggaaaagcaaagggtgagctcttcagtggagagaccctatatctgtagtgaatgtggaaaaagcttcacccagaattccatccttatcgagcaccagagaacacacacaggtgagaagccttatgaatgtgatgagtgtgggcgggccttcagccagaggtcaggcctattccagcaccagagactccacactggggagaagcgctaccagtgcagtgtttgtggcaaagccttcagccagaatgccgggcttttccatcacctcagaattcacactggggagaagccttaccagtgcaatcagtgcaataagagttttagtcgacgttcagtcctcattaagcatcagagaattcacactggagagagaccttatgaatgtgaagaatgtggcaagaacttcatttaccattgcaacctaatccagcatcggaaagtccacccagtggctgaatcaagctagctccttggaacaggtaggggataatatttcttactttgtccctgctgtgtcctctagcatagaaaagttcaagggaaagccagtaaaaattcccttacttttatgcagagagaagcataatatcttaaatacatctgccgagttctctgatcagtgacatccacagctttgcaatactgaatgttgcctcttgtgttgatttcatcatgtatgctgtagacctagtttcacacacatctgtgcaagaagttttctatttcaggaaaacttcttcatcctagtttttaaaaactttttttaaaagtttaaaatagttatatgtaggctgagtacaaaataatctcaaatgcagttcaccgagtatttaaaaattaacttaaaaataattgtaataaaattcataatataggtttcctgacttctttccattcacataaaatatgataatttgttttgtaacctacaaaaaggggcagatgaatcctcctatataaatgtagatttatagtaagttagatttctatagattttttagttagcctttaggaaccaaggaactgaagcagccatatgttattagcagctcagtggctcctcataacaaatattgctcatgattttaaatttacgcagaggctaagaaacttagctaaaaatctgatatctcacctcagatttcttattggaaaatacaggcctctttgtatttttcccgtaacatataatgagcatttttttgtttttgcctttttctcctttattcaatattttgtatggaaaatttgaaacatattcaagattgaagagaagagtatgatcactctttcatgttgattgtttttataacctccacattttctcagcatttactattgattaccaccaagatcataaataaaaaaatttatttcccttaacattgacttagtaactctttacaaagctttacacaaggtccaggagacaaagaaatggaaaacctatggtgaaaacaatctggtttggaatacacccaaatacccaatacatagcaagtaactttagaataacagaatcactctaagggaccttagagatcacttctgcttgctcttatttgacagataagagaaaaggaagttctgggaagtaactaagatcatacagccagttaaaagcagagctggaactagaaccctgtctcctacttcctagtgtaacattctattaagccactggaggcattatatcaccaaataaaaattacaagtatatggaatttataggatttataagtcactgaagttgctcaacaaacccacccatttatatgtttcaataaagcacaactcctctatttaatttacagtggagtccaggaaagactcttctcatttattcctcattgaaagcattttatttttgtaattattatttttagcttttaaaatttaatttactcagtaggacttttttaaaaagataattcattcttcacctggttcaaaaatcaaaataatacaaaaaggtctactttccctttataagtagccattgtactagtttcttatgtatctttcagtgtttctttatgtaaatataggcaaatatgaatgtataatcttatttcttccattactcaggaagatggcatattatttatactcttctaataccttgctgttttcatgaaagaatataatctttagagatgtccacatcataacagaacttcttcattctttttataagtgaatagaattttatttgttcatactccatagtttaacaaactcctatagatgaaaaatctcactattttaaaatgtta

SEQ ID NO: 3970 - protein, 389 aa, Homo sapiens
MAITLTLQTAEMQEGLLAVKVKEEEEEHSCGPESGLSRNNPHTREIFRRRFRQFCYQESPGPREALQRLQELCHQWLRPEMHTKEQILELLVLEQFLTILPEELQAWVRQHRPVSGEEAVTVLEDLERELDDPGEQVLSHAHEQEEFVKEKATPGAAQESSNDQFQTLEEQLGYNLREVCPVQEIDGKAGTWNVELAPKREISQEVKSLIQVLGKQNGNITQIPEYGDTCDREGRLEKQRVSSSVERPYICSECGKSFTQNSILIEHQRTHTGEKPYECDECGRAFSQRSGLFQHQRLHTGEKRYQCSVCGKAFSQNAGLFHHLRIHTGEKPYQCNQCNKSFSRRSVLIKHQRIHTGERPYECEECGKNFIYHCNLIQHRKVHPVAESS

SEQ ID NO: 3971 - DNA, 908 bp, Homo sapiens
atgggagggctctggcatccgggatggaggcgcgtcgctttctgtggctggcgctggatccaccctgggtctccagccacggctgcagagagggtagcgcggtttcttaggccagagtggagtgggacaggaggtgcccagagacgactgtggtggcttgagacatggaagcgctgcagcctttgagcccagtatccagcattgcagccgccgcggcggtctaagagctcaaaccctttcaggcgcgcgcaggaggaggagcggcgggggcggcggaacaagacgaccctcacttaacgtggccgctgtcgccgtgggcatgctgggggcgtcctacgctgccgttcccctttatcggctctattgccagactactggacttggaggatcagcagtttcaggtcatgcctcagaccagattgaaaacatggtgcctgttaaggatcgaatcattaaaattaactttgatgcagatgtgcatgcaagtcttcagtggaactttagacttcagcaaacagaaatatatgtggtgccaggagacactgcactggggttttacagagctaagaatcctgctgacaaaccactaattggaatttctacatacaatgttgttccatttgaagctggacagtatttcaataaaatacagtgcttctgttttgaagaacaaaggcttaatccccaagaggaagtagatatgccagtgtttttctacattgatcctgaatttgctaaagacccaagaatgattaatgttgatcttatcactctttcttacactttttttgaagcaaaggaagggcacaatttgccagttccaggatataactgaagtcagcaactaagtcttccttcaaagttgtgatttttgggaaaatcatgtatcctatcttctcaaaggagaa

SEQ ID NO: 3972 - protein, 171 aa, Homo sapiens
MLGASYAAVPLYRLYCQTTGLGGSAVSGHASDQIENMVPVKDRIIKINFDADVHASLQWNFRLQQTEIYVVPGDTALGFYRAKNPADKPLIGISTYNVVPFEAGQYFNKIQCFCFEEQRLNPQEEVDMPVFFYIDPEFAKDPRMINVDLITLSYTFFEAKEGHNLPVPGYN

SEQ ID NO: 3973 - DNA, 446 bp, Homo sapiens
gaggcgctctcgcagccgtggcagtctggacgaaaagaaccaggtccctttcctggtctagcctacctccctacctctcttccctcatatccagaagaagcgacggagagatggagtttcgctcttgttgcccaggctggagtgcaatggcgcgatctcggctcaccgcaacctctgcctccagggttcaagcgattctcctgccgcctcagcttcccgagtagctgggattacaggcacgcgccaccaccccagctaattttttttttgtgtgtgtgacggagtctcgctctgtcgcccaggctggagtgcagtggcgcgcgctgcaagctccgcctcccgggttcacgccattctcctgcctcagcctcccgagtagctgggactacaggcgcctgccaccacgcctggctaattttttgtattttttagtagaattggggttt

SEQ ID NO: 3974 - protein, 37 aa, Homo sapiens
MEFRSCCPGWSAMARSRLTATSASRVQAILLPPQLPE

SEQ ID NO: 3975 - DNA, 2394 bp, Homo sapiens
cagcttccttggctctttttgcccatatgccgaagagccgagcattgccgccaagcattggcaccggccatgcggagactagcgaaagctttgcaattcctctacttctcagtgatgactcgggctttctccttacattcttgatgggcatgaccggtcctgtcagctgggtggccaatttctgttcttcagcagaactgtctcccttcttgggggccgagggctttctggggaagaggatgagtttggagcaatactcattcagacgctgcacattggcctgcagggaatcggtggacttgttctgcctcctcggatccacagagatgccagtggtccgggtcaccttcttgtgaatgcccgccaccctgagctccaggctgaagcctctgccggcgcgcaccttgatgtgataacgcacagcagggcacagcacaatgggccagatgggtcccgactctccgggcgcggggcgatgcagcgccctttggcttgccgggccttgattctgcggatcttctggttgaaccacgtggccacacgctgctgccagtccttgtggaagtggggcttcaacatcatgccattcctgctgggcgccatggctgcctacggccctcctacgaaggaaacactttatagatttctatagcagtgttacatagtaaggttttatggcgagttttgtagcatggatcatactaccttaggactgatggtaaagttttagtctaaggaaagctctgaaaatttgaaaatgtgtaaccacccaatgagttcagcttgcccactgcctagacagaaccatttatcaagacgggcatgcaaagccggctgtgtgggagacccgttttattattattcaaatcagtctccccaagtggattgcagtttttaaggataatttggtgggtaggggaccagtgagttgggaaagttgattagtcgggtcggagatgaaatcagagggagtcgaagctgtcctcttgtgttggcttaatttctggatgggggccacaagaccagatgagccagtttatcgttatgggtggtgctagctgatccatagagtacaggggctgcaaaatatctcaagaactgatcttcggttttacaatagtgatgttatcctgaggagcaattgggggaggtttagaatcttgcagcctccagctgcatgactcctaaaccataatttataatcttgtggctaatttgttagtcctgcgaaagcagtctagtccccaggcaggaagcgggtttgttttggaaagggctgctattgtctttgtttcaaagctaaactataaactaagttcctcccaaagttaggtcagcctacgaccaggaatgaacaaggacagcttggaggttagaagcaagatggaattggttaggttagatctctcactgtctcagttgtaattttgcgatggtgttttcaaatgttgatttaaagaagaccataaatttgtgttgctttctcagattttgagaataaggacaaaaagtgtatgttttaatgggagaatcttaagaatttcactactgaagtggatttctctgtccattaacagtgctaaatgttttgtatttcccagttggaaaaacaaaatctgcaagctttgaatgatacttgttattaggttttggtaacagctgttgtactattcccatttcaatgctcaatagccacacgtggcatgtcatacctaccaggtggacagcacagatatagaacattttcatcattgtaaaaagccctatttgacaacactaacttaaagtattaatcttttagaagagaaagcttcagtccaacccaaattacacaattttacttttgaaaatattgttgaaacaacgttcaattttttaaaattttggaaaactgaatgaaatccatttgtaaatgcgcaaatggtactggaggtggaaaactgaagccttgctatagttttagttttttggagggttatgatcaacacagagaagaaaagattcatctacccatagagcttcttgagaaaaattttctaacaataattttgaaaatttgtagtgaatttgttcttgccattatttatgggtgctttcatgtgcgaggcacatcaaagttctggggaatgacttaggcacaaccaaatggctatcttgggaagaccaaagtcctttgctatatatgagagttttgagatggcgactacctttctgtatggtagattcttgtttttgaatatgccctctgggttttcaaaacaaattgtttttacaatacctatagtagttatctagggcatattctttagcttcaaaaattctatctttagaatgggcttcaatattcataactgagttattttcctctaataaatcattaacattttcccatgt

SEQ ID NO: 3976 - protein, 109 aa, Homo sapiens
MPKSRALPPSIGTGHAETSESFAIPLLLSDDSGFLLTFLMGMTGPVSWVANFCSSAELSPFLGAEGFLGKRMSLEQYSFRRCTLACRESVDLFCLLGSTEMPVVRVTFL

SEQ ID NO: 3977 - DNA, 413 bp, Homo sapiens
ggccttataactgttatcgccatctcgaaaaacgtgtgcgggttttttttttttttttttttgctcccagcctgcccagatttcaggaaggaaagaagatcttttgcttcttcggtcgctgggtcggctctccagtgtctgatgtttactgaaatcttgatcgtggttagcctcccccaggacttcattgtttggaagatgccttcgccaagcaatctgagctccaggccgggaagccccaaggtcacaaattttaatggagccctgaaactaaacagaaatcatccctcccactagaacaagagcccctagaggccagcgacaccgctaaaataacatgtgtagaccaatgccgtccaggtaacagtgcctggcaaacacggtagaggttcaataaatacattttaactcaa

SEQ ID NO: 3978 - protein, 51 aa, Homo sapiens
MFTEILIVVSLPQDFIVWKMPSPSNLSSRPGSPKVTNFNGALKLNRNHPSH

SEQ ID NO: 3979 - DNA, 2491 bp, Homo sapiens
aaaattcctgggcagtctggtggattctgaaatccttatatgtaggtaaacccttctcttaattattagaaattacaaacccccacaatctttgataattttctattttgtatatgctgggttcatatatgcattgcatctattcagatatatactttttggggcatctagcaacatagagctagcagatacatgtcctctacaagcaagacaaatggggagaaactccactcaatacagtggataataccagaagtggttagttcaggcatgactttccttgatctggctcttcttttcttgccacttaaaagtcttagtgggataatgtgtgagaaattctgtttcaactataaagtgccttataaatgaatggtcatgtttaccccagagtgtcagtgagtgtcacttgagccattcagctcttgtacacagatgacttatgcaactcaaaagttatgtatgacgtggggttggaaccgcgtttccctctgcagaatcagctgactcactggaaggtggaattcttgatcttggctcagttttatcccatattctaccagtctcaggcatgtggttatccctgtacttaagattcccaatccctctccccttaaagcttttggttggatgatagagccatacatcatatgaaaaaattagtgcatgactaacaacagaggttctggggtttctggtggagaccactgctttatgatgactaaccaaagcccccttagttatgtatttcctggaaaccctcatgacttccataactttgctcttttattctttcagaattaagagaggctcagttatactcagtggacgtgactctggacccagacacggcctaccccagcctgatcctctctgataatctgcggcaagtgcggtacagttacctccaacaggacctgcctgacaaccccgagaggttcaatctgtttccctgtgtcttgggctctccatgcttcatcgccgggagacattattgggaggtagaggtgggagataaagccaagtggaccataggtgtctgtgaagactcagtgtgcagaaaaggtggagtaacctcagccccccagaatggattctgggcagtgtctttgtggtatgggaaagaatattgggctcttacctccccaatgactgccctacccctgcggaccccgctccagcgggtggggattttcttggactatgatgctggtgaggtctccttctacaacgtgacagagaggtgtcacaccttcactttctctcatgctaccttttgtgggcctgtccggccctacttcagtctgagttactcgggagggaaaagtgcagctcctctgatcatctgccccatgagtgggatagatgggttttctggccatgttgggaatcatggtcattccatggagacctccccttgaggaggtgaattcaggccaaaagggctgttggctgtaatcctacgccaggcacaaggcatcttgttgccttgccacgtcctgtcacagctgggtatccttaccatgttccacgcccttgcagtgggagacaggatgtccatgttctctaccatccttttccttcccatgcagattgtgaaatgtaatgagatgtatcaagatatcctagaaataaaaaccagatgtccacctccagtgtttcatactttctggttttacacatcgctggagggataaagagtatggataatctttggatttggagagccgttcaagatacttccagcttcttggctcagcctggcttcctctggttcagccccacataatgattatggctatttgctgtcatttctgggctagggctcctttctaacaacctagactggaataaggccctgtcagcatggctccctttatcccagttttccgtctgggaacagtacctctgcccctgattcccaatgtgccatagttttattaactccattaaagaagcctgtatgtgttttggttagttacagttattttacaataatggtgggtaatggccccacctctgttatgagataatgttctaatcaatgtctctgcctttgtatcttttctgagggctttgtctgttctcttcattctaatgaaaggtgtattctagtgctgggtgcatatcatccaggataatattctgcccaactccatcctctgttactagatcccttaccagtcacatttgtggactggtggccagtcgtataccatccctggaaggattctgggacaatattccagggattcattgacttcttggctccttttctccatttcctttgggggaagggggaattgaccatgcttaagtgcatcctatcaaggggcagctccgtccccatggccattggatcatgagacactctgaagtcagaaggctggggcagatcacttcaagcaagcccccatgatggttctcagtcctgcttctctgtgggtacgtgcccctctgtttaaaaataaactgaatatggatgtttaca

SEQ ID NO: 3980 - protein, 44 aa, Homo sapiens
MYFLETLMTSITLLFYSFRIKRGSVILSGRDSGPRHGLPQPDPL

SEQ ID NO: 3981 - DNA, 2077 bp, Homo sapiens
gagcctaacccagatggagagggagaagattgtttgggagtttgagcagctgtatcactccttaaaggagcatgagtatcgcctcctggcccgccttgaggagctagacttggccatctacaatagcatcaatggtgccatcacccagttctcttgcaacatctcccacctcagcagcctgatcgctcagctagaagagaagcagcagcagcccaccagggagctcctgcaggagggctgaaagaatcaggattcctgaaccttggatcacacctccagatttgcaagagaaaatccacatttttgcccaaaaatgtctattcttgacggagagtctaaagcagttcacagaaaaaatgcagtcagatatggagaaaatccaagaattaagagaggctcagttatactcagtggacgtgactctggacccagacacggcctaccccagcctgatcctctctgataatctgcggcaagtgcggtacagttacctccaacaggacctgcctgacaaccccgagaggttcaatctgtttccctgtgtcttgggctctccatgcttcatcgccgggagacattattgggaggtagaggtgggagataaagccaagtggaccataggtgtctgtgaagactcagtgtgcagaaaaggtggagtaacctcagccccccagaatggattctgggcagtgtctttgtggtatgggaaagaatattgggctcttacctccccaatgactgccctacccctgcggaccccgctccagcgggtggggattttcttggactatgatgctggtgaggtctccttctacaacgtgacagagaggtgtcacaccttcactttctctcatgctaccttttgtgggcctgtccggccctacttcagtctgagttactcgggagggaaaagtgcagctcctctgatcatctgccccatgagtgggatagatgggttttctggccatgttgggaatcatggtcattccatggagacctccccttgaggaggtgaattcaggccaaaagggctgttggctgtaatcctacgccaggcacaaggcatcttgttgccttgccacgtcctgtcacagctgggtatccttaccatgttccacgcccttgcagtgggagacaggatgtccatgttctctaccatccttttccttcccatgcagattgtgaaatgtaatgagatgtatcaagatatcctagaaataaaaaccagatgtccacctccagtgtttcatactttctggttttacacatcgctggagggataaagagtatggataatctttggatttggagagccgttcaagatacttccagcttcttggctcagcctggcttcctctggttcagccccacataatgattatggctatttgctgtcatttctgggctagggctcctttctaacaacctagactggaataaggccctgtcagcatggctccctttatcccagttttccgtctgggaacagtacctctgcccctgattcccaatgtgccatagttttattaactccattaaagaagcctgtatgtgttttggttagttacagttattttacaataatggtgggtaatggccccacctctgttatgagataatgttctaatcaatgtctctgcctttgtatcttttctgagggctttgtctgttctcttcattctaatgaaaggtgtattctagtgctgggtgcatatcatccaggataatattctgcccaactccatcctctgttactagatcccttaccagtcacatttgtggactggtggccagtcgtataccatccctggaaggattctgggacaatattccagggattcattgacttcttggctccttttctccatttcctttgggggaagggggaattgaccatgcttaagtgcatcctatcaaggggcagctccgtccccatggccattggatcatgagacactctgaagtcagaaggctggggcagatcacttcaagcaagcccccatgatggttctcagtcctgcttctctgtgggtacgtgcccctctgtttaaaaataaactgaatatggatgtttaca

SEQ ID NO: 3982 - protein, 216 aa, Homo sapiens
MQSDMEKIQELREAQLYSVDVTLDPDTAYPSLILSDNLRQVRYSYLQQDLPDNPERFNLFPCVLGSPCFIAGRHYWEVEVGDKAKWTIGVCEDSVCRKGGVTSAPQNGFWAVSLWYGKEYWALTSPMTALPLRTPLQRVGIFLDYDAGEVSFYNVTERCHTFTFSHATFCGPVRPYFSLSYSGGKSAAPLIICPMSGIDGFSGHVGNHGHSMETSP

SEQ ID NO: 3983 - DNA, 2972 bp, Homo sapiens
ggggtttacgctgccgccggcatccgctcggacgcggccacgttgtcttgcgcgctttgcccgcctggccctgggactctgaccctcggctaccctttcctgccccactagcgtggccgcgagcctcggtgagccggccgtattcccgctctcgcttagggggcacaggcgcaggcatcggcccggccactccaagccttcggtgcgcgggcgcgtctgggatacgggcccgggaggcgccgccctccgtccgcccggtgcctctcaggaacagcgaaccggagagagcgccggagagttgggctcagtgcagagctcggcgccggggcccatgcccgtgcgcccccgcaggccggcgccatggcctccgggagtgtggccgagtgcctgcagcaggagaccacctgccccgtgtgcctgcagtacttcgcagagcccatgatgctcgactgcggccataacatctgttgcgcgtgcctcgcccgctgctggggcacggcagagactaacgtgtcgtgcccgcagtgccgggagaccttcccgcagaggcacatgcggcccaaccggcacctggccaacgtgacccaactggtaaagcagctgcgcaccgagcggccgtcggggcccggcggcgagatgggcgtgtgcgagaagcaccgcgagcccctgaagctgtactgcgaggaggaccagatgcccatctgcgtggtgtgcgaccgctcccgcgagcaccgcggccacagcgtgctgccgctcgaggaggcggtggagggcttcaaggagcaaatccagaaccagctcgaccatttaaaaagagtgaaagatttaaagaagagacgtcgggcccagggggaacaggcacgagctgaactcttgagcctaacccagatggagagggagaagattgtttgggagtttgagcagctgtatcactccttaaaggagcatgagtatcgcctcctggcccgccttgaggagctagacttggccatctacaatagcatcaatggtgccatcacccagttctcttgcaacatctcccacctcagcagcctgatcgctcagctagaagagaagcagcagcagcccaccagggagctcctgcaggacattggggacacattgagcagggctgaaagaatcaggattcctgaaccttggatcacacctccagatttgcaagagaaaatccacatttttgcccaaaaatgtctattcttgacggagagtctaaagcagttcacagaaaaaatgcagtcagatatggagaaaatccaagaattaagagaggctcagttatactcagtggacgtgactctggacccagacacggcctaccccagcctgatcctctctgataatctgcggcaagtgcggtacagttacctccaacaggacctgcctgacaaccccgagaggttcaatctgtttccctgtgtcttgggctctccatgcttcatcgccgggagacattattgggaggtagaggtgggagataaagccaagtggaccataggtgtctgtgaagactcagtgtgcagaaaaggtggagtaacctcagccccccagaatggattctgggcagtgtctttgtggtatgggaaagaatattgggctcttacctccccaatgactgccctacccctgcggaccccgctccagcgggtggggattttcttggactatgatgctggtgaggtctccttctacaacgtgacagagaggtgtcacaccttcactttctctcatgctaccttttgtgggcctgtccggccctacttcagtctgagttactcgggagggaaaagtgcagctcctctgatcatctgccccatgagtgggatagatgggttttctggccatgttgggaatcatggtcattccatggagacctccccttgaggaggtgaattcaggccaaaagggctgttggctgtaatcctacgccaggcacaaggcatcttgttgccttgccacgtcctgtcacagctgggtatccttaccatgttccacgcccttgcagtgggagacaggatgtccatgttctctaccatccttttccttcccatgcagattgtgaaatgtaatgagatgtatcaagatatcctagaaataaaaaccagatgtccacctccagtgtttcatactttctggttttacacatcgctggagggataaagagtatggataatctttggatttggagagccgttcaagatacttccagcttcttggctcagcctggcttcctctggttcagccccacataatgattatggctatttgctgtcatttctgggctagggctcctttctaacaacctagactggaataaggccctgtcagcatggctccctttatcccagttttccgtctgggaacagtacctctgcccctgattcccaatgtgccatagttttattaactccattaaagaagcctgtatgtgttttggttagttacagttattttacaataatggtgggtaatggccccacctctgttatgagataatgttctaatcaatgtctctgcctttgtatcttttctgagggctttgtctgttctcttcattctaatgaaaggtgtattctagtgctgggtgcatatcatccaggataatattctgcccaactccatcctctgttactagatcccttaccagtcacatttgtggactggtggccagtcgtataccatccctggaaggattctgggacaatattccagggattcattgacttcttggctccttttctccatttcctttgggggaagggggaattgaccatgcttaagtgcatcctatcaaggggcagctccgtccccatggccattggatcatgagacactctgaagtcagaaggctggggcagatcacttcaagcaagcccccatgatggttctcagtcctgcttctctgtgggtacgtgcccctctgtttaaaaataaactgaatatggatgtttaca

SEQ ID NO: 3984 - protein, 513 aa, Homo sapiens; identical to SEQ ID NO: 458

SEQ ID NO: 3985 - DNA, 2692 bp, Homo sapiens
ggggtttacgctgccgccggcatccgctcggacgcggccacgttgtcttgcgcgctttgcccgcctggccctgggactctgaccctcggctaccctttcctgccccactagcgtggccgcgagcctcggtgagccggccgtattcccgctctcgcttagggggcacaggcgcaggcatcggcccggccactccaagccttcggtgcgcgggcgcgtctgggatacgggcccgggaggcgccgccctccgtccgcccggtgcctctcaggaacagcgaaccggagagagcgccggagagttgggctcagtgcagagctcggcgccggggcccatgcccgtgcgcccccgcaggccggcgccatggcctccgggagtgtggccgagtgcctgcagcaggagaccacctgccccgtgtgcctgcagtacttcgcagagcccatgatgctcgactgcggccataacatctgttgcgcgtgcctcgcccgctgctggggcacggcagagactaacgtgtcgtgcccgcagtgccgggagaccttcccgcagaggcacatgcggcccaaccggcacctggccaacgtgacccaactggtaaagcagctgcgcaccgagcggccgtcggggcccggcggcgagatgggcgtgtgcgagaagcaccgcgagcccctgaagctgtactgcgaggaggaccagatgcccatctgcgtggtgtgcgaccgctcccgcgagcaccgcggccacagcgtgctgccgctcgaggaggcggtggagggcttcaaggagcaaatccagaaccagctcgaccatttaaaaagagtgaaagatttaaagaagagacgtcgggcccagggggaacaggcacgagctgaactcttgagcctaacccagatggagagggagaagattgtttgggagtttgagcagctgtatcactccttaaaggagcatgagtatcgcctcctggcccgccttgaggagctagacttggccatctacaatagcatcaatggtgccatcacccagttctcttgcaacatctcccacctcagcagcctgatcgctcagctagaagagaagcagcagcagcccaccagggagctcctgcaggacattggggacacattgagcagggctgaaagaatcaggattcctgaaccttggatcacacctccagatttgcaagagaaaatccacatttttgcccaaaaatgtctattcttgacggagagtctaaagcagttcacagaaaaaatgcagtcagatatggagaaaatccaagaattaagagaggctcagttatactcagtggacgtgactctggacccagacacggcctaccccagcctgatcctctctgataatctgcggcaagtgcggtacagttacctccaacaggacctgcctgacaaccccgagaggtctccttctacaacgtgacagagaggtgtcacaccttcactttctctcatgctaccttttgtgggcctgtccggccctacttcagtctgagttactcgggagggaaaagtgcagctcctctgatcatctgccccatgagtgggatagatgggttttctggccatgttgggaatcatggtcattccatggagacctccccttgaggaggtgaattcaggccaaaagggctgttggctgtaatcctacgccaggcacaaggcatcttgttgccttgccacgtcctgtcacagctgggtatccttaccatgttccacgcccttgcagtgggagacaggatgtccatgttctctaccatccttttccttcccatgcagattgtgaaatgtaatgagatgtatcaagatatcctagaaataaaaaccagatgtccacctccagtgtttcatactttctggttttacacatcgctggagggataaagagtatggataatctttggatttggagagccgttcaagatacttccagcttcttggctcagcctggcttcctctggttcagccccacataatgattatggctatttgctgtcatttctgggctagggctcctttctaacaacctagactggaataaggccctgtcagcatggctccctttatcccagttttccgtctgggaacagtacctctgcccctgattcccaatgtgccatagttttattaactccattaaagaagcctgtatgtgttttggttagttacagttattttacaataatggtgggtaatggccccacctctgttatgagataatgttctaatcaatgtctctgcctttgtatcttttctgagggctttgtctgttctcttcattctaatgaaaggtgtattctagtgctgggtgcatatcatccaggataatattctgcccaactccatcctctgttactagatcccttaccagtcacatttgtggactggtggccagtcgtataccatccctggaaggattctgggacaatattccagggattcattgacttcttggctccttttctccatttcctttgggggaagggggaattgaccatgcttaagtgcatcctatcaaggggcagctccgtccccatggccattggatcatgagacactctgaagtcagaaggctggggcagatcacttcaagcaagcccccatgatggttctcagtcctgcttctctgtgggtacgtgcccctctgtttaaaaataaactgaatatggatgtttaca

SEQ ID NO: 3986 - protein, 358 aa, Homo sapiens; identical to SEQ ID NO: 460

SEQ ID NO: 3987 - DNA, 1654 bp, Homo sapiens
aaaattcctgggcagtctggtggattctgaaatccttatatgtaggtaaacccttctcttaattattagaaattacaaacccccacaatctttgataattttctattttgtatatgctgggttcatatatgcattgcatctattcagatatatactttttggggcatctagcaacatagagctagcagatacatgtcctctacaagcaagacaaatggggagaaactccactcaatacagtggataataccagaagtggttagttcaggcatgactttccttgatctggctcttcttttcttgccacttaaaagtcttagtgggataatgtgtgagaaattctgtttcaactataaagtgccttataaatgaatggtcatgtttaccccagagtgtcagtgagtgtcacttgagccattcagctcttgtacacagatgacttatgcaactcaaaagttatgtatgacgtggggttggaaccgcgtttccctctgcagaatcagctgactcactggaaggtggaattcttgatcttggctcagttttatcccatattctaccagtctcaggcatgtggttatccctgtacttaagattcccaatccctctccccttaaagcttttggttggatgatagagccatacatcatatgaaaaaattagtgcatgactaacaacagaggttctggggtttctggtggagaccactgctttatgatgactaaccaaagcccccttagttatgtatttcctggaaaccctcatgacttccataactttgctcttttattctttcagaattaagagaggctcagttatactcagtggacgtgactctggacccagacacggcctaccccagcctgatcctctctgataatctgcggcaagtgcggtacagttacctccaacaggacctgcctgacaaccccgagaggttcaatctgtttccctgtgtcttgggctctccatgcttcatcgccgggagacattattgggaggtagaggtgggagataaagccaagtggaccataggtgtctgtgaagactcagtgtgcagaaaaggtggagtaacctcagccccccagaatggattctgggcagtgtctttgtggtatgggaaagaatattgggctcttacctccccaatgactgccctacccctgcggaccccgctccagcgggtggggattttcttggactatgatgctggtgaggtctccttctacaacgtgacagagaggtgtcacaccttcactttctctcatgctaccttttgtgggcctgtccggccctacttcagtctgagttactcgggagggaaaagtgcagctcctctgatcatctgccccatgagtgggatagatgggttttctggccatgttgggaatcatggtcattccatggagacctccccttgaggaggtgaattcaggccaaaagggctgttggctgtaatcctacgccaggcacaaggcatcttgttgccttgccacgtcctgtcacagctgggtatccttaccatgttccacgcccttgcagtgggagacaggatgtccatgttctctaccatccttttccttcccatgcagattgtgaaatgtaatgagatgtatcaagatatcctagaaataaaaaccagatgtccacctcc

SEQ ID NO: 3988 - protein, 44 aa, Homo sapiens; identical to SEQ ID NO: 3980

SEQ ID NO: 3989 - DNA, 1240 bp, Homo sapiens
gagcctaacccagatggagagggagaagattgtttgggagtttgagcagctgtatcactccttaaaggagcatgagtatcgcctcctggcccgccttgaggagctagacttggccatctacaatagcatcaatggtgccatcacccagttctcttgcaacatctcccacctcagcagcctgatcgctcagctagaagagaagcagcagcagcccaccagggagctcctgcaggagggctgaaagaatcaggattcctgaaccttggatcacacctccagatttgcaagagaaaatccacatttttgcccaaaaatgtctattcttgacggagagtctaaagcagttcacagaaaaaatgcagtcagatatggagaaaatccaagaattaagagaggctcagttatactcagtggacgtgactctggacccagacacggcctaccccagcctgatcctctctgataatctgcggcaagtgcggtacagttacctccaacaggacctgcctgacaaccccgagaggttcaatctgtttccctgtgtcttgggctctccatgcttcatcgccgggagacattattgggaggtagaggtgggagataaagccaagtggaccataggtgtctgtgaagactcagtgtgcagaaaaggtggagtaacctcagccccccagaatggattctgggcagtgtctttgtggtatgggaaagaatattgggctcttacctccccaatgactgccctacccctgcggaccccgctccagcgggtggggattttcttggactatgatgctggtgaggtctccttctacaacgtgacagagaggtgtcacaccttcactttctctcatgctaccttttgtgggcctgtccggccctacttcagtctgagttactcgggagggaaaagtgcagctcctctgatcatctgccccatgagtgggatagatgggttttctggccatgttgggaatcatggtcattccatggagacctccccttgaggaggtgaattcaggccaaaagggctgttggctgtaatcctacgccaggcacaaggcatcttgttgccttgccacgtcctgtcacagctgggtatccttaccatgttccacgcccttgcagtgggagacaggatgtccatgttctctaccatccttttccttcccatgcagattgtgaaatgtaatgagatgtatcaagatatcctagaaataaaaaccagatgtccacctcc

SEQ ID NO: 3990 - protein, 216 aa, Homo sapiens; identical to SEQ ID NO: 3982

SEQ ID NO: 3991 - DNA, 2135 bp, Homo sapiens
ggggtttacgctgccgccggcatccgctcggacgcggccacgttgtcttgcgcgctttgcccgcctggccctgggactctgaccctcggctaccctttcctgccccactagcgtggccgcgagcctcggtgagccggccgtattcccgctctcgcttagggggcacaggcgcaggcatcggcccggccactccaagccttcggtgcgcgggcgcgtctgggatacgggcccgggaggcgccgccctccgtccgcccggtgcctctcaggaacagcgaaccggagagagcgccggagagttgggctcagtgcagagctcggcgccggggcccatgcccgtgcgcccccgcaggccggcgccatggcctccgggagtgtggccgagtgcctgcagcaggagaccacctgccccgtgtgcctgcagtacttcgcagagcccatgatgctcgactgcggccataacatctgttgcgcgtgcctcgcccgctgctggggcacggcagagactaacgtgtcgtgcccgcagtgccgggagaccttcccgcagaggcacatgcggcccaaccggcacctggccaacgtgacccaactggtaaagcagctgcgcaccgagcggccgtcggggcccggcggcgagatgggcgtgtgcgagaagcaccgcgagcccctgaagctgtactgcgaggaggaccagatgcccatctgcgtggtgtgcgaccgctcccgcgagcaccgcggccacagcgtgctgccgctcgaggaggcggtggagggcttcaaggagcaaatccagaaccagctcgaccatttaaaaagagtgaaagatttaaagaagagacgtcgggcccagggggaacaggcacgagctgaactcttgagcctaacccagatggagagggagaagattgtttgggagtttgagcagctgtatcactccttaaaggagcatgagtatcgcctcctggcccgccttgaggagctagacttggccatctacaatagcatcaatggtgccatcacccagttctcttgcaacatctcccacctcagcagcctgatcgctcagctagaagagaagcagcagcagcccaccagggagctcctgcaggacattggggacacattgagcagggctgaaagaatcaggattcctgaaccttggatcacacctccagatttgcaagagaaaatccacatttttgcccaaaaatgtctattcttgacggagagtctaaagcagttcacagaaaaaatgcagtcagatatggagaaaatccaagaattaagagaggctcagttatactcagtggacgtgactctggacccagacacggcctaccccagcctgatcctctctgataatctgcggcaagtgcggtacagttacctccaacaggacctgcctgacaaccccgagaggttcaatctgtttccctgtgtcttgggctctccatgcttcatcgccgggagacattattgggaggtagaggtgggagataaagccaagtggaccataggtgtctgtgaagactcagtgtgcagaaaaggtggagtaacctcagccccccagaatggattctgggcagtgtctttgtggtatgggaaagaatattgggctcttacctccccaatgactgccctacccctgcggaccccgctccagcgggtggggattttcttggactatgatgctggtgaggtctccttctacaacgtgacagagaggtgtcacaccttcactttctctcatgctaccttttgtgggcctgtccggccctacttcagtctgagttactcgggagggaaaagtgcagctcctctgatcatctgccccatgagtgggatagatgggttttctggccatgttgggaatcatggtcattccatggagacctccccttgaggaggtgaattcaggccaaaagggctgttggctgtaatcctacgccaggcacaaggcatcttgttgccttgccacgtcctgtcacagctgggtatccttaccatgttccacgcccttgcagtgggagacaggatgtccatgttctctaccatccttttccttcccatgcagattgtgaaatgtaatgagatgtatcaagatatcctagaaataaaaaccagatgtccacctcc

SEQ ID NO: 3992 - protein, 513 aa, Homo sapiens; identical to SEQ ID NO: 458

SEQ ID NO: 3993 - DNA, 1855 bp, Homo sapiens
ggggtttacgctgccgccggcatccgctcggacgcggccacgttgtcttgcgcgctttgcccgcctggccctgggactctgaccctcggctaccctttcctgccccactagcgtggccgcgagcctcggtgagccggccgtattcccgctctcgcttagggggcacaggcgcaggcatcggcccggccactccaagccttcggtgcgcgggcgcgtctgggatacgggcccgggaggcgccgccctccgtccgcccggtgcctctcaggaacagcgaaccggagagagcgccggagagttgggctcagtgcagagctcggcgccggggcccatgcccgtgcgcccccgcaggccggcgccatggcctccgggagtgtggccgagtgcctgcagcaggagaccacctgccccgtgtgcctgcagtacttcgcagagcccatgatgctcgactgcggccataacatctgttgcgcgtgcctcgcccgctgctggggcacggcagagactaacgtgtcgtgcccgcagtgccgggagaccttcccgcagaggcacatgcggcccaaccggcacctggccaacgtgacccaactggtaaagcagctgcgcaccgagcggccgtcggggcccggcggcgagatgggcgtgtgcgagaagcaccgcgagcccctgaagctgtactgcgaggaggaccagatgcccatctgcgtggtgtgcgaccgctcccgcgagcaccgcggccacagcgtgctgccgctcgaggaggcggtggagggcttcaaggagcaaatccagaaccagctcgaccatttaaaaagagtgaaagatttaaagaagagacgtcgggcccagggggaacaggcacgagctgaactcttgagcctaacccagatggagagggagaagattgtttgggagtttgagcagctgtatcactccttaaaggagcatgagtatcgcctcctggcccgccttgaggagctagacttggccatctacaatagcatcaatggtgccatcacccagttctcttgcaacatctcccacctcagcagcctgatcgctcagctagaagagaagcagcagcagcccaccagggagctcctgcaggacattggggacacattgagcagggctgaaagaatcaggattcctgaaccttggatcacacctccagatttgcaagagaaaatccacatttttgcccaaaaatgtctattcttgacggagagtctaaagcagttcacagaaaaaatgcagtcagatatggagaaaatccaagaattaagagaggctcagttatactcagtggacgtgactctggacccagacacggcctaccccagcctgatcctctctgataatctgcggcaagtgcggtacagttacctccaacaggacctgcctgacaaccccgagaggtctccttctacaacgtgacagagaggtgtcacaccttcactttctctcatgctaccttttgtgggcctgtccggccctacttcagtctgagttactcgggagggaaaagtgcagctcctctgatcatctgccccatgagtgggatagatgggttttctggccatgttgggaatcatggtcattccatggagacctccccttgaggaggtgaattcaggccaaaagggctgttggctgtaatcctacgccaggcacaaggcatcttgttgccttgccacgtcctgtcacagctgggtatccttaccatgttccacgcccttgcagtgggagacaggatgtccatgttctctaccatccttttccttcccatgcagattgtgaaatgtaatgagatgtatcaagatatcctagaaataaaaaccagatgtccacctcc

SEQ ID NO: 3994 - protein, 358 aa, Homo sapiens; identical to SEQ ID NO: 460

SEQ ID NO: 3995 - DNA, 465 bp, Homo sapiens
tcagctcccagatggatcctggacaggatgctgcaggtggtgcaggaggggaatcctgccccatttatcatcaacacagtaaaaaggggtcgaagagaccgagagcgccagaggacgccatgggctccacatccacttggattccagggaaggcggtacatctacgaaagccctaatcatagagggaaagactcctcgttcctggcccagaaatgagatgagaaatccagggccccgtacaggaaggcctttcgcaaagtccagactcaattgccttcgcagcccttaaagtttccttaggaaggtctgtgggagaacgaggttggtttaggaattggcccctgccttgtactacgtagttttgtcatccaaagtgttttagaagtgaattgaatcatagttacgccttattttgaaacactgtaattcagagaacgtaaaaccttattaaaatgcctcataatc

SEQ ID NO: 3996 - protein, 62 aa, Homo sapiens
MLQVVQEGNPAPFIINTVKRGRRDRERQRTPWAPHPLGFQGRRYIYESPNHRGKDSSFLAQK

SEQ ID NO: 3997 - DNA, 1458 bp, Homo sapiens
cttcaggattctcagtcttccctccgggagacttttggccagtcttgtctcgctccaacctcctacccccaccccattcctcagtgcattcgtgaatttctccaagcaggcctttccagatcgacactaagttccaatcccgagctgtgtgacccagcaccaattcagtcacgatgatgacttgcaattgcttaatcagttggcctttcctcctagctgtgaagtttaccgtgcaggattgcaaacaccagagagaaaatcagtctctggaatgatgcctttgatggaccaagatgcagctgatgaagcattgaaccaattagcacctagcaggagggcacccttgctctgtgtccttgaaggttaaagctgtcaaaaagtggtctccctcaagttcggccatcttgctctcagagatctagaactggtaggagaatatagccttgatagtggagaggaaactattgctgttgtgagggactgagagaaccaggcagagagcccagattgacacagcaggtgacaaaagaggcgcgcctaccttggggaatacggaggaacagaggaaagtgagaccaggagaaagagcaggggggcgggtgtgcaggccgggcgccgtggctcacgcctgtaatcccagcactttgggaggccaaggcaggcggatcacaaggtcaggagttcgagaccagcctggccaatatggtgaaaccctgtctctactaaaaatacaaaaattagctgggcgtggtggcgaatgcctgtagtcccagctactcggaaggctgaggcaggagaatcgcttgaacccggaacccgggaggcagaggttgcagtgagccgagatggcgccattgcactctagcctgggcgacggactgagacttcgtctcaaaaaagggagtgactgtgttgcttttgctttcttggaaatcttttttcttagtaattttcctaaagtaatttccttaggaaataatgtattgctaagagtattgcaacttttagtattgacgaggtacttttactgaatcagtataagtcaacaagcaaccaccagaagctggaaaaggccaggataggattttactctaaagtttctagagggagctggacgcagcccacaccttgattttggcccacatactgattgtggatttctggccttcagaaatacatatctgttgtaagagaatacatatctgttgtttttagacagtttctgataatttgttacagtaaccacaggaaattaacaccaggcactatgcagtaaattccgtatgaacaactcaaatataagaatttgtaagacagccgggcgcggtggctcacgcctgtaatcccagcactttgggaggcgcggtggctcacgcctgtaatcccagcactttgggaggcgcggtggctcacgcctgtaatcccagcactttgggaggccgaggcgggcggatcacc

SEQ ID NO: 3998 - protein, 33 aa, Homo sapiens
MMTCNCLISWPFLLAVKFTVQDCKHQRENQSLE

SEQ ID NO: 3999 - DNA, 317 bp, Homo sapiens
tctgtgtccttgaaggttaaagctgtcaaaaagtggtctccctcaagttcggccatcttgctctcagagatctagaactggactcagtcaaaattttgggccaaggagaccgacgcgctgtcgcctgcactaagagaaacgcaacgaacaactttgtcaatgcattgcattatactatagcagcaactatacttttaaatgattcgaatcttgaggtttcaaactgaaccgtcttgtgccttttgcccggcgggcatttctgcggggaccgcgggtcaccttctgaatttttaccttcataaacagcaaggactgcg

SEQ ID NO: 4000 - protein, 38 aa, Homo sapiens
MIRILRFQTEPSCAFCPAGISAGTAGHLLNFYLHKQQG

SEQ ID NO: 4001 - DNA, 2190 bp, Homo sapiens
atgcaggagatttcattaatactgtgctatattgactcttggcttacttatcttccctcagctctattacctgctccatatcctgccttcactaaagatggaagccaaggaaacctgccgcaagcagatatcacactaatgagccaggcccaagagtcagtgacatttgaggatgtagctgtgaacttcactaacagggagtggcagtgtctgacctacgctcaaaggcatctctataaggatgtgatgttggaaaattatgggaacatggtatcacttggatttccatttcctaaacctcctttaatctctcatctggagcgagaagtagacccctgtgtgcaggatccacaggacagggagtccctaagctgctcctacccagtgtcagctgacaagatgtggcctgagaatgaaaaggcaagttcacaacaagagatttttgaaaatggagaagcctactggatgaaatttaacagtctcctaaaagttgattcccgggatcctaaggttagagaagtttgtgttcaggatgtcaaattagagaatcaatgggaaacatctataagggagaaactgagagaagagaaagaaggctctgaggaagtgacctgcaaaaaaggaaagaaccagaaagtgcttagtaaaaacttgaatccaaactcaaaacatagtcaatgtaataaagttcttatagcacagaaactccatgaatgtgccaggtgtggcaaaaacttcagttggcactcagatctaattctccatgagcaaattcattctggtgagaaaccccatgtgtgtaatgagtgtgggaaagcattcaagaccagaaatcagctttctatgcaccggataatccacacaggggagaaaccttttaattgcacccagtgtgggaaggctttcaacagtagatcagctctttgccgacataaaaaaacccacagtggggagaagcctcacgagtgcagggactgtgggaaggccttcaagaccaggaaccgtctctgtatgcatcagcttatccacaccggggagaagccttacaaatgtaactgctgtgggaaggccttccagtttaagcattcccttaccatccatggcagaatccacactggggagaagccatatgaatgtgaggagtgcgggaaggccttcagtgggagttcagacctcaccaaacacataagaatccacactggggaacgaccttatgagtgcagcaagtgtggaagggccttcagtcggagctcagacctaagcaaacacaaacgaatccatactcgggagaaacactatgggtgtccccagtgtggaaaagacttcagcatcaaggcagaactcaccaaacacagaaggatccacactgaagagaaacgttacaggtgtgaggagtgtgggaaagcctttcgtcataactgtaagcgcagggctcatgaacgagagcatacaggggagaagccctatcaatgcagggattgtgggaaaaccttccaagataagcactgccttaccatccatcagagaatccacactggagagaaaccttacaaatgtttagagtgtgggaaagctttcagtgggaagtcaaacttgaccaatcatcgaagaattcacactggagagaagcctcacaaatgtgaggtatgtggaatggccttccatcatagttcagtcctgaggcagcacaaaagaatccacactggtgagaagccatacacctgcagtgagtgtggcacgtccttccgtcagggctcagctctgattggacataagcgagttcatactggggagaaaccttatgaatgtgaggaatgtggaaaagcttttagagtgagctcaaatcttactggacataagaaaagaaaacatcaagtatggagtacccatgaacttgatgggagtaggaaatccctctctccagtgactgtttctcagacctcagtagtcagtattttgaccagtgcctgagtataacgattctggtgttactttctgtttttcctacctcttaggctggtccttctgtctcttatattagttattcctgatttcctgacccttaattgtgagattccccaaagacattgtcctttaccttcttattcactattttttcagtgagcacatttacttccaagagtttatcaatcacttcctaatattaataaacacttattagtgcttgct

SEQ ID NO: 4002 - protein, 656 aa, Homo sapiens
MQEISLILCYIDSWLTYLPSALLPAPYPAFTKDGSQGNLPQADITLMSQAQESVTFEDVAVNFTNREWQCLTYAQRHLYKDVMLENYGNMVSLGFPFPKPPLISHLEREVDPCVQDPQDRESLSCSYPVSADKMWPENEKASSQQEIFENGEAYWMKFNSLLKVDSRDPKVREVCVQDVKLENQWETSIREKLREEKEGSEEVTCKKGKNQKVLSKNLNPNSKHSQCNKVLIAQKLHECARCGKNFSWHSDLILHEQIHSGEKPHVCNECGKAFKTRNQLSMHRIIHTGEKPFNCTQCGKAFNSRSALCRHKKTHSGEKPHECRDCGKAFKTRNRLCMHQLIHTGEKPYKCNCCGKAFQFKHSLTIHGRIHTGEKPYECEECGKAFSGSSDLTKHIRIHTGERPYECSKCGRAFSRSSDLSKHKRIHTREKHYGCPQCGKDFSIKAELTKHRRIHTEEKRYRCEECGKAFRHNCKRRAHEREHTGEKPYQCRDCGKTFQDKHCLTIHQRIHTGEKPYKCLECGKAFSGKSNLTNHRRIHTGEKPHKCEVCGMAFHHSSVLRQHKRIHTGEKPYTCSECGTSFRQGSALIGHKRVHTGEKPYECEECGKAFRVSSNLTGHKKRKHQVWSTHELDGSRKSLSPVTVSQTSVVSILTSA

SEQ ID NO: 4003 - DNA, 3027 bp, Homo sapiens
gagaccggagtcttgctcttgtcgcctcctgacccattctttttattcttctctacagcatccattcatatattcattcagtcagctaatttttaatccagcacatactattgcaagcgctgttttaggcgttgagaatacaactgtgaacaagacgacaaaaattcctgccctcatggagcctaagagcctagattttagcgaaggtagaaccaccgtaaacaatgtatatattaataagtaacttatgcaccatactggaaaattataaagtgctatagaggaaaagaagaattcatgtaaagcaaggaggctggcatcaactggagccacttcacagcttgtttgagaactggatctgaccagtaggaagaaaccaggacagcagtggaagactgttaaagaaacctgagtaaaaagatgcaggaggtaagaagaggagggtctgtgatacatcacaaggaggaagaaggagaagttgtgctgttggatgagagttcaggaccaccaagccagctgctttggacccgccaggatacccagctccctcaggaaagcgctctattacctgctccatatcctgccttcactaaagatggaagccaaggaaacctgccgcaagcagatatcacactaatgagccaggcccaagtgagctgaggcccctttcctcctccttgaaaatacatcactacctccaaaatatggccttgttttcactgcgttctctggctgtgcaactcctaaatcaatgttctccctctcataaggaacattttgttgcatgataaaccacttgtgggttgttttctctttcattattttttgctatcaaaaccccatgctccctttcatctcatttgtacatacccaccaaaagggaagagcctttcacttctataaacctcctccttgcaaattcctttcttctgcctctgtttcctgaggaaactatggcgttttctccaggatagcaggagcatattatttcaggagtcagtgacatttgaggatgtagctgtgaacttcactaacagggagtggcagtgtctgacctacgctcaaaggcatctctataaggatgtgatgttggaaaattatgggaacatggtatcacttggatttccatttcctaaacctcctttaatctctcatctggagcgagaagtagacccctgtgtgcaggatccacaggacagggagtccctaagctgctcctacccagtgtcagctgacaagatgtggcctgagaatgaaaaggcaagttcacaacaagagatttttgaaaatggagaagcctactggatgaaatttaacagtctcctaaaagttgattcccgggatcctaaggttagagaagtttgtgttcaggatgtcaaattagagaatcaatgggaaacatctataagggagaaactgagagaagagaaagaaggctctgaggaagtgacctgcaaaaaaggaaagaaccagaaagtgcttagtaaaaacttgaatccaaactcaaaacatagtcaatgtaataaagttcttatagcacagaaactccatgaatgtgccaggtgtggcaaaaacttcagttggcactcagatctaattctccatgagcaaattcattctggtgagaaaccccatgtgtgtaatgagtgtgggaaagcattcaagaccagaaatcagctttctatgcaccggataatccacacaggggagaaaccttttaattgcacccagtgtgggaaggctttcaacagtagatcagctctttgccgacataaaaaaacccacagtggggagaagcctcacgagtgcagggactgtgggaaggccttcaagaccaggaaccgtctctgtatgcatcagcttatccacaccggggagaagccttacaaatgtaactgctgtgggaaggccttccagtttaagcattcccttaccatccatggcagaatccacactggggagaagccatatgaatgtgaggagtgcgggaaggccttcagtgggagttcagacctcaccaaacacataagaatccacactggggaacgaccttatgagtgcagcaagtgtggaagggccttcagtcggagctcagacctaagcaaacacaaacgaatccatactcgggagaaacactatgggtgtccccagtgtggaaaagacttcagcatcaaggcagaactcaccaaacacagaaggatccacactgaagagaaacgttacaggtgtgaggagtgtgggaaagcctttcgtcataactgtaagcgcagggctcatgaacgagagcatacaggggagaagccctatcaatgcagggattgtgggaaaaccttccaagataagcactgccttaccatccatcagagaatccacactggagagaaaccttacaaatgtttagagtgtgggaaagctttcagtgggaagtcaaacttgaccaatcatcgaagaattcacactggagagaagcctcacaaatgtgaggtatgtggaatggccttccatcatagttcagtcctgaggcagcacaaaagaatccacactggtgagaagccatacacctgcagtgagtgtggcacgtccttccgtcagggctcagctctgattggacataagcgagttcatactggggagaaaccttatgaatgtgaggaatgtggaaaagcttttagagtgagctcaaatcttactggacataagaaaagaaaacatcaagtatggagtacccatgaacttgatgggagtaggaaatccctctctccagtgactgtttctcagacctcagtagtcagtattttgaccagtgcctgagtataacgattctggtgttactttctgtttttcctacctcttaggctggtccttctgtctcttatattagttattcctgatttcctgacccttaattgtgagattccccaaagacattgtcctttaccttcttattcactattttttcagtgagcacatttacttccaagagtttatcaatcacttcctaatattaataaacacttattagtgctt

SEQ ID NO: 4004 - protein, 574 aa, Homo sapiens
MLENYGNMVSLGFPFPKPPLISHLEREVDPCVQDPQDRESLSCSYPVSADKMWPENEKASSQQEIFENGEAYWMKFNSLLKVDSRDPKVREVCVQDVKLENQWETSIREKLREEKEGSEEVTCKKGKNQKVLSKNLNPNSKHSQCNKVLIAQKLHECARCGKNFSWHSDLILHEQIHSGEKPHVCNECGKAFKTRNQLSMHRIIHTGEKPFNCTQCGKAFNSRSALCRHKKTHSGEKPHECRDCGKAFKTRNRLCMHQLIHTGEKPYKCNCCGKAFQFKHSLTIHGRIHTGEKPYECEECGKAFSGSSDLTKHIRIHTGERPYECSKCGRAFSRSSDLSKHKRIHTREKHYGCPQCGKDFSIKAELTKHRRIHTEEKRYRCEECGKAFRHNCKRRAHEREHTGEKPYQCRDCGKTFQDKHCLTIHQRIHTGEKPYKCLECGKAFSGKSNLTNHRRIHTGEKPHKCEVCGMAFHHSSVLRQHKRIHTGEKPYTCSECGTSFRQGSALIGHKRVHTGEKPYECEECGKAFRVSSNLTGHKKRKHQVWSTHELDGSRKSLSPVTVSQTSVVSILTSA

SEQ ID NO: 4005 - DNA, 627 bp, Homo sapiens
ggagaagcctactggatgaaatttaacagtctcctaaaagttgattcccgggatcctaaggttagagaagtttgtgttcaggatgtcaaattagagaatcaatgggaaacatctataagggagaaactgagagaagagaaagaaggctctgaggaagtgacctgcagtgagtgtggcacgtccttccgtcagggctcagctctgattggacataagcgagttcatactggggagaaaccttatgaatgtgaggaatgtggaaaagcttttagagtgagctcaaatcttactggacataagaaaagaaaacatcaagtatggagtacccatgaacttgatgggagtaggaaatccctctctccagtgactgtttctcagacctcagtagtcagtattttgaccagtgcctgagtataacgattctggtgttactttctgtttttcctacctcttaggctggtccttctgtctcttatattagttattcctgatttcctgacccttaattgtgagattccccaaagacattgtcctttaccttcttattcactattttttcagtgagcacatttacttccaagagtttatcaatcacttcctaatattaataaacacttattagtgctt

SEQ ID NO: 4006 - protein, 131 aa, Homo sapiens
MKFNSLLKVDSRDPKVREVCVQDVKLENQWETSIREKLREEKEGSEEVTCSECGTSFRQGSALIGHKRVHTGEKPYECEECGKAFRVSSNLTGHKKRKHQVWSTHELDGSRKSLSPVTVSQTSVVSILTSA

SEQ ID NO: 4007 - DNA, 697 bp, Homo sapiens
agcatccattcatatattcattcagtcagctaatttttaatccagcacatactattgcaagcgctgttttaggcgttgagaatacaactgtgaacaagacgacaaaaattcctgccctcatggagcctaagagcctagattttagcgaaggtagaaccaccgtaaacaatgtatatattaataagtaacttatgcaccatactggaaaattataaagtgctatagaggaaaagaagaattcatgtaaagcaagggaaacaagatgtgagatcacagcggtttagtgttgctaatgaaccccaaatccagggcagtgtttgacacattaagccaaacagtagcggcactgtgggtcaagaagggccctttggctggcaccaccaaaacatgtgttctccaaaggaggctggcatcaactggagccacttcacagcttgtttgagaactggatctgaccagtaggaagaaaccaggacagcagtggaagactgttaaagaaacctgagtaaaaagatgcaggaggttgtgctgttggatgagagttcaggaccaccaagccagctgctttggacccgccaggatacccagctccctcaggaaagcgctctattacctgctccatatcctgccttcactaaagatggaagccaaggaaacctgccgcaagcagatatcacactaatgagccaggcccaag

SEQ ID NO: 4008 - protein, 60 aa, Homo sapiens
MQEVVLLDESSGPPSQLLWTRQDTQLPQESALLPAPYPAFTKDGSQGNLPQADITLMSQA

SEQ ID NO: 4009 - DNA, 963 bp, Homo sapiens
atggaccaaagcaattatagttctttacatggttttattctgcttggcttctctaaccatccaaaaatggagatgatcctgtcaggagttgtcgccatcttctacttaattacattggtgggtaacacagccatcattcttgcatctctcctggattcccagcttcatacaccaatgtactttttcctcagaaatttatctttcctagatctatgtttcacaaccagcatcatccctcagatgctggtcaacttgtggggacctgataagaccatcagctatgtgggttgtatcatccaactctatgtttacatgtggttgggctcagttgagtgccttctcctggctgttatgtcctatgatcgttttacagctatatgtaagcccttgcattattttgtagtcatgaacccacatctatgtctaaagatgattatcatgatctggagtattagtttggccaattctgtagtattatgtacactcactctgaatttgcccacatgtggaaacaacattctggatcatttcttgtgtgagttgccagctctggtcaagatagcttgtgtagacaccacaacagttgaaatgtctgttttcgctttaggcattataattgtcctcacacctctcatccttattcttatatcctatggctacattgccaaagctgtgctgagaacgaagtcaaaagcaagccagcgaaaagcaatgaatacctgtggatctcatcttactgtagtgtctatgttctatggaactattatctacatgtacctgcaaccaggtaacagggcttccaaagaccagggcaagttcctcaccctcttttacaccgtcatcactccaagtctcaacccgctcatttacaccttaagaaataaggacatgaaggatgccctgaagaaactgatgagatttcaccacaaatctacaaaaataaagaggaattgcaagtcatag

SEQ ID NO: 4010 - protein, 320 aa, Homo sapiens; identical to SEQ ID NO: 464

SEQ ID NO: 4011 - DNA, 1272 bp, Homo sapiens
aataatttgactttttaaagtaaaaaatcatttttcataaatattgtgttcctgattatggactatcttagtcttcattaatccaaatgttaattcagggatgtatataaagaactcagtaacttgagaagctattgcttgtatctgtagctggataaatatctcaatgaagcatataaagggaactgtataaaaattctactaccattatggtgcacactctctggaagtgggatacttttgtcttcaatctgtttgcaagtgagcggttgacaatgcatggacagactttgagtttatgtggttctttctttaggtataagaaaaagatgaatgatgattaaaaaaaatgcaagttcggaagacttctttattctacttggattttctaattggcctcagctggaagtagttctctttgtggttatcttgatcttctacctgatgacactgacaggaaacctgttcatcatcatcctgtcatacgtggactcccatctccacacaccaatgtacttcttcctttcaaacctctcatttctggatctctgctacaccaccagctctatccctcagttgctggtgaatctccggggcccggaaaagaccatctcgtatgctggttgcatggttcaactttactttgttcttgcactgggaatcacagagtgtgtcctactggtggtgatgtcatatgatcgttatgtagctgtgtgtagacctttgcattacactgtcctcatgcaccctcgtttctgccacttgttggttgcggcttcttgggtaattggttttactatctcagcacttcattcctcctttactttctgggtacccctttgtggacatcgcctagtggatcacttcttctgtgaagttccagcacttctgcgtttatcatgtgttgacacccatgcaaatgagctgaccctcatggtcatgagctccatttttgttctcatacctctcattctcattctcactacctatggtgccattgcccgggctgtactgagcatgcaatcaaccactgggcttcagaaagtgtttaggacatgtggagcccatcttatggttgtatctctctttttcattccagtcatgtgcatgtatctccagccaccatcagaaaattctcctgatcagggcaagttcattgccctcttttatactgttgtcacaccgagtcttaatcctctaatctacactctcagaaacaagcatgtaaaaggggcagcgaagagactattggggtgggagtgggggaagtga

SEQ ID NO: 4012 - protein, 312 aa, Homo sapiens
MMIKKNASSEDFFILLGFSNWPQLEVVLFVVILIFYLMTLTGNLFIIILSYVDSHLHTPMYFFLSNLSFLDLCYTTSSIPQLLVNLRGPEKTISYAGCMVQLYFVLALGITECVLLVVMSYDRYVAVCRPLHYTVLMHPRFCHLLVAASWVIGFTISALHSSFTFWVPLCGHRLVDHFFCEVPALLRLSCVDTHANELTLMVMSSIFVLIPLILILTTYGAIARAVLSMQSTTGLQKVFRTCGAHLMVVSLFFIPVMCMYLQPPSENSPDQGKFIALFYTVVTPSLNPLIYTLRNKHVKGAAKRLLGWEWGK

SEQ ID NO: 4013 - DNA, 386 bp, Homo sapiens
gtgctatggaggacctgcttactgctatgaggtgttactttatagaggtcctggagaagctgattgaggccacgtcaatgttgcaaggagacatgagactcacatcagagttctatggcttaacatgggggatggtgtgaaaagaaacagagatcgttggagaaatgtctgattataagatatttctaagcctggtgaagaaatatataagagaagcctggagaagaaccagtaataccagaaatcagggaggggccctgaagagaaaaggataacaaaaggatgaagacctgtccaagggacccagcagctaacttgaaagagctctcaatgggtaaagctggagcaatttcaacaacaaaataaataacatatcactggattat

SEQ ID NO: 4014 - protein, 44 aa, Homo sapiens
MEDLLTAMRCYFIEVLEKLIEATSMLQGDMRLTSEFYGLTWGMV

SEQ ID NO: 4015 - DNA, 464 bp, Homo sapiens
aagctgagtgaggccatgtctgttaccaggagacatgagactcacagcagatctctctggcttaacatgggagatggcggcattgaccaacatctgtgggactatatttgtggtgtaacaaagatccaagatagccagatttctaagaaagaaatatatgggggtttggagatgtttatccagtaatggcagcaggataaggaccatatttcccatcaaagaaattgcatagaagaaaaagacaaccccagagatgatcatctccagctgaggcttcccagggaacccaaggagcataagccaaccaaaatgttggaattcctggaaaatgtggcgttcttaatagtcataaaagtactaaatatatactgcaaaatgctaggtgtgtctctgagatttaggacaacttctgaaagtactgtcattaacggagaagctggaataaaaagaaaagtcactccaga

SEQ ID NO: 4016 - protein, 56 aa, Homo sapiens
MSVTRRHETHSRSLWLNMGDGGIDQHLWDYICGVTKIQDSQISKKEIYGGLEMFIQ

SEQ ID NO: 4017 - DNA, 365 bp, Homo sapiens
aggagacatgagactcacagcagatctctctggcttaacatgggagatggcgactttataaagtgctccagttcttatggtgttttctgaccaggatctgtaccaagcagatgaacgtgccaagatgtcttcgttctccctggctgcacatcctcctgtagtcttcatgccggccttcgtttgacctgtttttgggaagttctgccttttccttctattttaatctacactctgttgccaccattacatatccatgcatgtagagttgatggtagtatactaaaactttttagaagagaagatatgaaaacccaaatggagtgaatagctaaccagaagacatatattaaataagcaaaattccc

SEQ ID NO: 4018 - protein, 35 aa, Homo sapiens [sequence omitted]

SEQ ID NO: 4019 - DNA, 340 bp, Homo sapiens
tgggttggcagccgcttgagccactgcgaggaaagcaaagtctgggccatggagatgagcctagtcctgctgttcctgatccgcactgccctttttgcaccccagggagctgctgctggtaaatggtctccctctgttatccacggtgaagtgcagtggcatgatcatggttccctgcaacctcaaactcctggcctctagaggtccccctgcctcagtgtctggagtacctgggactacaggcaagtactcctgcgtccatctcaacctgggcatcgtgccaccaccttcaagaagagaaaaactaagtagtgctttgcaaaggggcagcagcatttct

SEQ ID NO: 4020 - protein, 59 aa, Homo sapiens
MIMVPCNLKLLASRGPPASVSGVPGTTGKYSCVHLNLGIVPPPSRREKLSSALQRGSSI

SEQ ID NO: 4021 - DNA, 1180 bp, Homo sapiens
aaagtcccacgcaccccgcgggactcatatttttcccagacgcggaggttggggtcatggcgccccgaagcctcctcctgctgctctcaggggccctggccctgaccgatacttgggcgggctcccactccttgaggtatttcagcaccgctgtgtcgcggcccggccgcggggagccccgctacatcgccgtggagtacgtagacgacacgcaattcctgcggttcgacagcgacgccgcgattccgaggatggagccgcgggagccgtgggtggagcaagaggggccgcagtattgggagtggaccacagggtacgccaaggccaacgcacagactgaccgagtggccctgaggaacctgctccgccgctacaaccagagcgaggctgggtctcacaccctccagggaatgaatggctgcgacatggggcccgacggacgcctcctccgcgggtatcaccagcacgcgtacgacggcaaggattacatctccctgaacgaggacctgcgctcctggaccgcggcggacaccgtggctcagatcacccagcgcttctatgaggcagaggaatatgcagaggagttcaggacctacctggagggcgagtgcctggagttgctccgcagatacttggagaatgggaaggagacgctacagcgcgcagatcctccaaaggcacacgttgcccaccaccccatctctgaccatgaggccaccctgaggtgctgggccctgggcttctaccctgcggagatcacgctgacctggcagcgggatggggaggaacagacccaggacacagagcttgtggagaccaggcctgcaggggatggaaccttccagaagtgggccgctgtggtggtgcctcctggagaggaacagagatacacatgccatgtgcagcacgaggggctgccccagcccctcatcctgagatgggagcagtctccccagcccaccatccccatcgtgggcatcgttgctggccttgttgtccttggagctgtggtcactggagctgtggtcgctgctgtgatgtggaggaagaagagctcagatagaaacagagggagctactctcaggctgcagtgtgagacagcttccttgtgtgggactgagaagcaagatatcaatgtagcagaattgcacttgtgcctcacgaacatacataaatttt

SEQ ID NO: 4022 - protein, 346 aa, Homo sapiens
MAPRSLLLLLSGALALTDTWAGSHSLRYFSTAVSRPGRGEPRYIAVEYVDDTQFLRFDSDAAIPRMEPREPWVEQEGPQYWEWTTGYAKANAQTDRVALRNLLRRYNQSEAGSHTLQGMNGCDMGPDGRLLRGYHQHAYDGKDYISLNEDLRSWTAADTVAQITQRFYEAEEYAEEFRTYLEGECLELLRRYLENGKETLQRADPPKAHVAHHPISDHEATLRCWALGFYPAEITLTWQRDGEEQTQDTELVETRPAGDGTFQKWAAVVVPPGEEQRYTCHVQHEGLPQPLILRWEQSPQPTIPIVGIVAGLVVLGAVVTGAVVAAVMWRKKSSDRNRGSYSQAAV

SEQ ID NO: 4023 - DNA, 1228 bp, Homo sapiens
aaagtcccacgcaccccgcgggactcatatttttcccagacgcggaggttggggtcatggcgccccgaagcctcctcctgctgctctcaggggccctggccctgaccgatacttgggcgggctcccactccttgaggtatttcagcaccgctgtgtcgcggcccggccgcggggagccccgctacatcgccgtggagtacgtagacgacacgcaattcctgcggttcgacagcgacgccgcgattccgaggatggagccgcgggagccgtgggtggagcaagaggggccgcagtattgggagtggaccacagggtacgccaaggccaacgcacagactgaccgagtggccctgaggaacctgctccgccgctacaaccagagcgaggctgggtctcacaccctccagggaatgaatggctgcgacatggggcccgacggacgcctcctccgcgggtatcaccagcacgcgtacgacggcaaggattacatctccctgaacgaggacctgcgctcctggaccgcggcggacaccgtggctcagatcacccagcgcttctatgaggcagaggaatatgcagaggagttcaggacctacctggagggcgagtgcctggagttgctccgcagatacttggagaatgggaaggagacgctacagcgcgcagatcctccaaaggcacacgttgcccaccaccccatctctgaccatgaggccaccctgaggtgctgggccctgggcttctaccctgcggagatcacgctgacctggcagcgggatggggaggaacagacccaggacacagagcttgtggagaccaggcctgcaggggatggaaccttccagaagtgggccgctgtggtggtgcctcctggagaggaacagagatacacatgccatgtgcagcacgaggggctgccccagcccctcatcctgagatgggagcagtctccccagcccaccatccccatcgtgggcatcgttgctggccttgttgtccttggagctgtggtcactggagctgtggtcgctgctgtgatgtggaggaagaagagctcagatagaaacagagggagctactctcaggctgcagtcactgacagtgcccagggctctggggtgtctctcacagctaataaagtgtgagacagcttccttgtgtgggactgagaagcaagatatcaatgtagcagaattgcacttgtgcctcacgaacatacataaatttt

SEQ ID NO: 4024 - protein, 362 aa, Homo sapiens [sequence omitted]

SEQ ID NO: 4025 - DNA, 1505 bp, Homo sapiens
aaagtcccacgcaccccgcgggactcatatttttcccagacgcggaggttggggtcatggcgccccgaagcctcctcctgctgctctcaggggccctggccctgaccgatacttgggcgggctcccactccttgaggtatttcagcaccgctgtgtcgcggcccggccgcggggagccccgctacatcgccgtggagtacgtagacgacacgcaattcctgcggttcgacagcgacgccgcgattccgaggatggagccgcgggagccgtgggtggagcaagaggggccgcagtattgggagtggaccacagggtacgccaaggccaacgcacagactgaccgagtggccctgaggaacctgctccgccgctacaaccagagcgaggctgggtctcacaccctccagggaatgaatggctgcgacatggggcccgacggacgcctcctccgcgggtatcaccagcacgcgtacgacggcaaggattacatctccctgaacgaggacctgcgctcctggaccgcggcggacaccgtggctcagatcacccagcgcttctatgaggcagaggaatatgcagaggagttcaggacctacctggagggcgagtgcctggagttgctccgcagatacttggagaatgggaaggagacgctacagcgcgcagatcctccaaaggcacacgttgcccaccaccccatctctgaccatgaggccaccctgaggtgctgggccctgggcttctaccctgcggagatcacgctgacctggcagcgggatggggaggaacagacccaggacacagagcttgtggagaccaggcctgcaggggatggaaccttccagaagtgggccgctgtggtggtgcctcctggagaggaacagagatacacatgccatgtgcagcacgaggggctgccccagcccctcatcctgagatgggagcagtctccccagcccaccatccccatcgtgggcatcgttgctggccttgttgtccttggagctgtggtcactggagctgtggtcgctgctgtgatgtggaggaagaagagctcagatagaaacagagggagctactctcaggctgcagcctactcagtggtcagcggaaacttgatgataacatggtggtcaagcttatttctcctgggggtgctcttccaaggatatttgggctgcctccggagtcacagtgtcttgggccgccggaaggtgggtgacatgtggatcttgttttttttgtggctgtggacatctttcaacactgccttcttggccttgcaaagccttcgctttggcttcggctttaggaggggcaggagcttccttcttcgttcttggcaccatcttatgaaaagggtccagattaagatttttgactgagtcattctaaagtaagttgcaagacccatgatactagaccactaaatacttcatcacacacctcctaagaataagaaccaacattatcacaccaaagaaaataaataattccataatatt

SEQ ID NO: 4026 - protein, 442 aa, Homo sapiens
MAPRSLLLLLSGALALTDTWAGSHSLRYFSTAVSRPGRGEPRYIAVEYVDDTQFLRFDSDAAIPRMEPREPWVEQEGPQYWEWTTGYAKANAQTDRVALRNLLRRYNQSEAGSHTLQGMNGCDMGPDGRLLRGYHQHAYDGKDYISLNEDLRSWTAADTVAQITQRFYEAEEYAEEFRTYLEGECLELLRRYLENGKETLQRADPPKAHVAHHPISDHEATLRCWALGFYPAEITLTWQRDGEEQTQDTELVETRPAGDGTFQKWAAVVVPPGEEQRYTCHVQHEGLPQPLILRWEQSPQPTIPIVGIVAGLVVLGAVVTGAVVAAVMWRKKSSDRNRGSYSQAAAYSVVSGNLMITWWSSLFLLGVLFQGYLGCLRSHSVLGRRKVGDMWILFFLWLWTSFNTAFLALQSLRFGFGFRRGRSFLLRSWHHLMKRVQIKIFD

SEQ ID NO: 4027 - DNA, 2636 bp, Homo sapiens
aaagtcccacgcaccccgcgggactcatatttttcccagacgcggaggttggggtcatggcgccccgaagcctcctcctgctgctctcaggggccctggccctgaccgatacttgggcgggctcccactccttgaggtatttcagcaccgctgtgtcgcggcccggccgcggggagccccgctacatcgccgtggagtacgtagacgacacgcaattcctgcggttcgacagcgacgccgcgattccgaggatggagccgcgggagccgtgggtggagcaagaggggccgcagtattgggagtggaccacagggtacgccaaggccaacgcacagactgaccgagtggccctgaggaacctgctccgccgctacaaccagagcgaggctgggtctcacaccctccagggaatgaatggctgcgacatggggcccgacggacgcctcctccgcgggtatcaccagcacgcgtacgacggcaaggattacatctccctgaacgaggacctgcgctcctggaccgcggcggacaccgtggctcagatcacccagcgcttctatgaggcagaggaatatgcagaggagttcaggacctacctggagggcgagtgcctggagttgctccgcagatacttggagaatgggaaggagacgctacagcgcgcagatcctccaaaggcacacgttgcccaccaccccatctctgaccatgaggccaccctgaggtgctgggccctgggcttctaccctgcggagatcacgctgacctggcagcgggatggggaggaacagacccaggacacagagcttgtggagaccaggcctgcaggggatggaaccttccagaagtgggccgctgtggtggtgcctcctggagaggaacagagatacacatgccatgtgcagcacgaggggctgccccagcccctcatcctgagatgggagcagtctccccagcccaccatccccatcgtgggcatcgttgctggccttgttgtccttggagctgtggtcactggagctgtggtcgctgctgtgatgtggaggaagaagagctcaggaaagttgactcatactggtgtccagtgaagaaacccaggcgcataagagggacagttggatctcaggtttgtgcttgatctggaaaaggaagagcagagaccactaggaggcaccactgcactgctcatgagcccaggaggtggatgccggggctgagctcagggtggagagatgtcattgctcatcctccaggttccaggtgaaaacccacctgcccagcccatctggttctccctggttcttcaattctagggaggactgtcttcttctcacctccccggacgatgcttcttgacacaggaaagaggatgtgctgctagggtcatcatgtcctggtttattgtgttgtcagtagaatgaaatcaaaatacatacttcataaataataaaataacccataataagtaaacatttacaatttactcacaccattgaggtttcctccaggtgtgagcacagctgcagacacaccttgtcgcttcagtcaggacacaggacagagtaaaatgggaagaaaccacagtcactgcagaaagggcccccatggaagaggcctggcagggaggccagctgccccagggccaccatatttagagatgacttcccctttctaggcaggactgggattttaaaattctttttgtattcatagttgttctgaaattgcaggatgatgagacccagcactggtgagttatactgtctctttcttccctattaaattctgtgccaaacagcaccttcatatatttatctcctcttcctggagagaataaaaacaatggaaaaattgaaccatacaaacatactttaaatatgtgctgtcagaagtagctactaaaggattaattccaccaaagtgagggaaggtttgaaaagaaaaacattgtatacccatattcaaagcagcattattcacgatagccaagacaacacacaccaacacatgaatgaagaaaatgtggtatatatcgacaacggaatatcattcagccttaagaaggaaacctggtcacaggctgcaacagggataaacctgaaggacactgctaagtaaaataatgtccaacgtcttgaaagaatcatacaaacaaaagagatatcaaacttaaattaatgagagttaataaaataaacaaaaacaaatgcaagtattaactccaagaagaaccaatgttgtacaggcagtgaaaagtagtccagttgacatatgagaggattagtcatggtaaaagaaacaagagatggctgaactaaacataatcactatataaatatactgggaagagtgaaagagaacaagtactcttaactgttgcatccaccattgcgctgtgcaacaatgggtgcatctgaaaaaaatcaagcaataataataaagaaatggtagttagagatacagaagtaaagtcaaaagaatcagctaaaaaacttgaaagtggttggcccctagaaaggcagaaattgagaagaggcagagaggactctcatttttctcaagagattctgcacaaatatttgactctttcaattgtgcacaattataaatttgattaaaataaaaacaaaagcttc

SEQ ID NO: 4028 - protein, 343 aa, Homo sapiens
MAPRSLLLLLSGALALTDTWAGSHSLRYFSTAVSRPGRGEPRYIAVEYVDDTQFLRFDSDAAIPRMEPREPWVEQEGPQYWEWTTGYAKANAQTDRVALRNLLRRYNQSEAGSHTLQGMNGCDMGPDGRLLRGYHQHAYDGKDYISLNEDLRSWTAADTVAQITQRFYEAEEYAEEFRTYLEGECLELLRRYLENGKETLQRADPPKAHVAHHPISDHEATLRCWALGFYPAEITLTWQRDGEEQTQDTELVETRPAGDGTFQKWAAVVVPPGEEQRYTCHVQHEGLPQPLILRWEQSPQPTIPIVGIVAGLVVLGAVVTGAVVAAVMWRKKSSGKLTHTGVQ

SEQ ID NO: 4029 - DNA, 1575 bp, Homo sapiens
cgcgggactcatatttttcccagacgcggaggttggggtcatggcgccccgaagcctcctcctgctgctctcaggggccctggccctgaccgatacttgggcgggtgagtgcggggtccagagagaaacggcctctgtggggaggagtgaggggcccgcccggtgggggcgcaggactcagggagccgcctccggaggagggtctggcgggtctcagcccctcctcgcccccaggctcccactccttgaggtatttcagcaccgctgtgtcgcggcccggccgcggggagccccgctacatcgccgtggagtacgtagacgacacgcaattcctgcggttcgacagcgacgccgcgattccgaggatggagccgcgggagccgtgggtggagcaagaggggccgcagtattgggagtggaccacagggtacgccaaggccaacgcacagactgaccgagtggccctgaggaacctgctccgccgctacaaccagagcgaggctggtgagtgaacccggccgggggcgcaggtcacgaccaccccccatccgccacggaccgcccgggtccctcagagtctccggatccgaaatctaccccgaggcagcgggacccgcccagaccctccacccgggagagtcccaggcgcctttacccaggttcattttcagtttaggccaaaatccccgcgggttgggcggggagggggcggggctagctgggcggggctgactgcggggaccggctagggtctcacaccctccagggaatgaatggctgcgacatggggcccgacggacgcctcctccgcgggtatcaccagcacgcgtacgacggcaaggattacatctccctgaacgaggacctgcgctcctggaccgcggcggacaccgtggctcagatcacccagcgcttctatgaggcagaggaatatgcagaggagttcaggacctacctggagggcgagtgcctggagttgctccgcagatacttggagaatgggaaggagacgctacagcgcgcagatcctccaaaggcacacgttgcccaccaccccatctctgaccatgaggccaccctgaggtgctgggccctgggcttctaccctgcggagatcacgctgacctggcagcgggatggggaggaacagacccaggacacagagcttgtggagaccaggcctgcaggggatggaaccttccagaagtgggccgctgtggtggtgcctcctggagaggaacagagatacacatgccatgtgcagcacgaggggctgccccagcccctcatcctgagatgggagcagtctccccagcccaccatccccatcgtgggcatcgttgctggccttgttgtccttggagctgtggtcactggagctgtggtcgctgctgtgatgtggaggaagaagagctcagatagaaacagagggagctactctcaggctgcagtgtgagacagcttccttgtgtgggactgagaagcaagatatcaatgtagcagaattgcacttgtgcctcacgaacatacataaattttaaaaataaagaataaaaatatatctttttatagata

SEQ ID NO: 4030 - protein, 228 aa, Homo sapiens
MNGCDMGPDGRLLRGYHQHAYDGKDYISLNEDLRSWTAADTVAQITQRFYEAEEYAEEFRTYLEGECLELLRRYLENGKETLQRADPPKAHVAHHPISDHEATLRCWALGFYPAEITLTWQRDGEEQTQDTELVETRPAGDGTFQKWAAVVVPPGEEQRYTCHVQHEGLPQPLILRWEQSPQPTIPIVGIVAGLVVLGAVVTGAVVAAVMWRKKSSDRNRGSYSQAAV

SEQ ID NO: 4031 - DNA, 486 bp, Homo sapiens
gggactcatatttttcccagacgcggagatcacgctgacctggcagcgggatggggaggaacagacccaggacacagagcttgtggagaccaggcctgcaggggatggaaccttccagaagtgggccgctgtggtggtgcctcctggagaggaacagagatacacatgccatgtgcagcacgaggggctgccccagcccctcatcctgagatgggagcagtctccccagcccaccatccccatcgtgggcatcgttgctggccttgttgtccttggagctgtggtcactggagctgtggtcgctgctgtgatgtggaggaagaagagctcagatagaaacagagggagctactctcaggctgcagtgtgagacagcttccttgtgtgggactgagaagcaagatatcaatgtagcagaattgcacttgtgcctcacgaacatacataaattttaaaaataaagaataaaaatatatctttttatag

SEQ ID NO: 4032 - protein, 56 aa, Homo sapiens
MPCAARGAAPAPHPEMGAVSPAHHPHRGHRCWPCCPWSCGHWSCGRCCDVEEEELR

SEQ ID NO: 4033 - DNA, 760 bp, Homo sapiens
gcccagaccctccacccgggagagtcccaggcgcctttacccagcacgcgtacgacggcaaggattacatctccctgaacgaggacctgcgctcctggaccgcggcggacaccgtggctcagatcacccagcgcttctatgaggcagaggaatatgcagaggagttcaggacctacctggagggcgagtgcctggagttgctccgcagatacttggagaatgggaaggagacgctacagcgcgcagatcctccaaaggcacacgttgcccaccaccccatctctgaccatgaggccaccctgaggtgctgggccctgggcttctaccctgcggagatcacgctgacctggcagcgggatggggaggaacagacccaggacacagagcttgtggagaccaggcctgcaggggatggaaccttccagaagtgggccgctgtggtggtgcctcctggagaggaacagagatacacatgccatgtgcagcacgaggggctgccccagcccctcatcctgagatgggagcagtctccccagcccaccatccccatcgtgggcatcgttgctggccttgttgtccttggagctgtggtcactggagctgtggtcgctgctgtgatgtggaggaagaagagctcagatagaaacagagggagctactctcaggctgcagtgtgagacagcttccttgtgtgggactgagaagcaagatatcaatgtagcagaattgcacttgtgcctcacgaacatacataaatttt

SEQ ID NO: 4034 - protein, 56 aa, Homo sapiens; identical to SEQ ID NO: 4032

SEQ ID NO: 4035 - DNA, 750 bp, Homo sapiens
cgcgtacgacggcaaggattacatctccctgaacgaggacctgcgctcctggaccgcggcggacaccgtggctcagatcacccagcgcttctatgaggcagaggaatatgcagaggagttcaggacctacctggagggcgagtgcctggagttgctccgcagatacttggagaatgggaaggagacgctacagcgcgcagatcctccaaaggcacacgttgcccaccaccccatctctgaccatgaggccaccctgaggtgctgggccctgggcttctaccctgcggagatcacgctgacctggcagcgggatggggaggaacagacccaggacacagagcttgtggagaccaggcctgcaggggatggaaccttccagaagtgggccgctgtggtggtgcctcctggagaggaacagagatacacatgccatgtgcagcacgaggggctgccccagcccctcatcctgagatgggagcagtctccccagcccaccatccccatcgtgggcatcgttgctggccttgttgtccttggagctgtggtcactggagctgtggtcgctgctgtgatgtggaggaagaagagctcagatagaaacagagggagctactctcaggctgcagtgtgagacagcttccttgtgtgggactgagaagcaagatatcaatgtagcagaattgcacttgtgcctcacgaacatacataaattttaaaaataaagaataaaaatatatctttttatagata

SEQ ID NO: 4036 - protein, 56 aa, Homo sapiens; identical to SEQ ID NO: 4032

SEQ ID NO: 4037 - DNA, 934 bp, Homo sapiens
gtgcctgaattttctgactcttctcagatcctccaaaggcacacgttgcccaccaccccatctctgaccatgaggccaccctgaggtgctgggccctgggcttctaccctgcggagatcacgctgacctggcagcgggatggggaggaacagacccaggacacagagcttgtggagaccaggcctgcaggggatggaaccttccagaagtgggccgctgtggtggtgcctcctggagaggaacagagatacacatgccatgtgcagcacgaggggctgccccagcccctcatcctgagatgggagcagtctccccagcccaccatccccatcgtgggcatcgttgctggccttgttgtccttggagctgtggtcactggagctgtggtcgctgctgtgatgtggaggaagaagagctcagatagaaacagagggagctactctcaggctgcaggtaagatgaaggaggctgatccctgagattgttgggatattgtggtcaggagcctatgagggagctcacccaccccacagttcctctagccacatctgtgggctctgaccaggtcctgtttttgttctaccccaatcactgacagtgcccagggctctggggtgtctctcacagctaataaaggtgacactccagggcaggggccctgatgtgagtggggtgttgggggggaacagaggggactcagctgtgctattgggtttctttgacttggatgtcttgagcatgaaatgggctatttagagtgttacctctcactgtgactgatacgaatttgttcatgaatattttctctatagtgtgagacagcttccttgtgtgggactgagaagcaagatatcaatgtagcagaattgcacttgtgcctcacgaacatacataaattttaaaaataaagaataaaaatatatctttttataga

SEQ ID NO: 4038 - protein, 56 aa, Homo sapiens; identical to SEQ ID NO: 4032

SEQ ID NO: 4039 - DNA, 1705 bp, Homo sapiens
gtgcctgaattttctgactcttctcagatcctccaaaggcacacgttgcccaccaccccatctctgaccatgaggccaccctgaggtgctgggccctgggcttctaccctgcggagatcacgctgacctggcagcgggatggggaggaacagacccaggacacagagcttgtggagaccaggcctgcaggggatggaaccttccagaagtgggccgctgtggtggtgcctcctggagaggaacagagatacacatgccatgtgcagcacgaggggctgccccagcccctcatcctgagatgggagcagtctccccagcccaccatccccatcgtgggcatcgttgctggccttgttgtccttggagctgtggtcactggagctgtggtcgctgctgtgatgtggaggaagaagagctcagatagaaacagagggagctactctcaggctgcaggtaagatgaaggaggctgatccctgagattgttgggatattgtggtcaggagcctatgagggagctcacccaccccacagttcctctagccacatctgtgggctctgaccaggtcctgtttttgttctaccccaatcactgacagtgcccagggctctggggtgtctctcacagctaataaaggtgacactccagggcaggggccctgatgtgagtggggtgttgggggggaacagaggggactcagctgtgctattgggtttctttgacttggatgtcttgagcatgaaatgggctatttagagtgttacctctcactgtgactgatacgaatttgttcatgaatattttctctatagtgtgagacagcttccttgtgtgggactgagaagcaagatatcaatgtagcagaattgcacttgtgcctcacgaacatacataaattttaaaaataaagaataaaaatatatctttttatagatacaggtagatatgtttttatagcatgcacgtaaatgtgtgtgtgtgtgtgtgtgtgtgaagagaaagagtgaatagagagattaagattcttttaatggtgaaaagatatacatatatttggaactagccagcttgactcagtttaggtgatcccaattttggtggcaacaaccaaagcatcgtagtcaggagccagtcgaacatatgccttcctctctccatcagactgaatcagagtgttgactttggccacatcaatgtcacaaacttcttcacagcctgtttgatctggtgcttgttggctttaacatccacagtgaacacaagtaggctgttgttttctatcttcttcacagcctactcagtggtcagcggaaacttgatgataacatggtggtcaagcttatttctcctgggggtgctcttccaaggatatttgggctgcctccggagtcacagtgtcttgggccgccggaaggtgggtgacatgtggatcttgttttttttgtggctgtggacatctttcaacactgccttcttggccttgcaaagccttcgctttggcttcggctttaggaggggcaggagcttccttcttcgttcttggcaccatcttatgaaaagggtccagattaagatttttgactgagtcattctaaagtaagttgcaagacccatgatactagaccactaaatacttcatcacacacctcctaagaataagaaccaacattatcacaccaaagaaaataaataattccataatatt

SEQ ID NO: 4040 - protein, 56 aa, Homo sapiens; identical to SEQ ID NO: 4032

SEQ ID NO: 4041 - DNA, 833 bp, Homo sapiens
gtgcctgaattttctgactcttctcagatcctccaaaggcacacgttgcccaccaccccatctctgaccatgaggccaccctgaggtgctgggccctgggcttctaccctgcggagatcacgctgacctggcagcgggatggggaggaacagacccaggacacagagcttgtggagaccaggcctgcaggggatggaaccttccagaagtgggccgctgtggtggtgcctcctggagaggaacagagatacacatgccatgtgcagcacgaggggctgccccagcccctcatcctgagatgggagcagtctccccagcccaccatccccatcgtgggcatcgttgctggccttgttgtccttggagctgtggtcactggagctgtggtcgctgctgtgatgtggaggaagaagagctcagcctactcagtggtcagcggaaacttgatgataacatggtggtcaagcttatttctcctgggggtgctcttccaaggatatttgggctgcctccggagtcacagtgtcttgggccgccggaaggtgggtgacatgtggatcttgttttttttgtggctgtggacatctttcaacactgccttcttggccttgcaaagccttcgctttggcttcggctttaggaggggcaggagcttccttcttcgttcttggcaccatcttatgaaaagggtccagattaagatttttgactgagtcattctaaagtaagttgcaagacccatgatactagaccactaaatacttcatcacacacctcctaagaataagaaccaacattatcacaccaaagaaaataaataattccataatatt

SEQ ID NO: 4042 - protein, 104 aa, Homo sapiens
MWRKKSSAYSVVSGNLMITWWSSLFLLGVLFQGYLGCLRSHSVLGRRKVGDMWILFFLWLWTSFNTAFLALQSLRFGFGFRRGRSFLLRSWHHLMKRVQIKIFD

SEQ ID NO: 4043 - DNA, 900 bp, Homo sapiens
gtgcctgaattttctgactcttctcagatcctccaaaggcacacgttgcccaccaccccatctctgaccatgaggccaccctgaggtgctgggccctgggcttctaccctgcggagatcacgctgacctggcagcgggatggggaggaacagacccaggacacagagcttgtggagaccaggcctgcaggggatggaaccttccagaagtgggccgctgtggtggtgcctcctggagaggaacagagatacacatgccatgtgcagcacgaggggctgccccagcccctcatcctgagatgggagcagtctccccagcccaccatccccatcgtgggcatcgttgctggccttgttgtccttggagctgtggtcactggagctgtggtcgctgctgtgatgtggaggaagaagagctcagatagaaacagagggagctactctcaggctgcaggtaagatgaaggaggctgatccctgagattgttgggatattgtggtcaggagcctatgagggagctcacccaccccacagttcctctagccacatctgtgggctctgaccaggtcctgtttttgttctaccccaatcactgacagtgcccagggctctggggtgtctctcacagctaataaaggtgacactccagggcaggggccctgatgtgagtggggtgttgggggggaacagaggggactcagctgtgctattgggtttctttgacttggatgtcttgagcatgaaatgggctatttagagtgttacctctcactgtgactgatacgaatttgttcatgaatattttctctatagtgtgagacagcttccttgtgtgggactgagaagcaagatatcaatgtagcagaattgcacttgtgcctcacgaacatacataaatttt

SEQ ID NO: 4044 - protein, 56 aa, Homo sapiens; identical to SEQ ID NO: 4032

SEQ ID NO: 4045 - DNA, 421 bp, Homo sapiens
cgctgacctggcagcgggatggggaggaacagacccaggacacagagcttgtggagaccaggcctgcaggggatggaaccttccagaagtgggccgctgtggtggtgcctcctggagaggaacagagatacacatgccatgtgcagcacgaggggctgccccagcccctcatcctgagatgggagcagtctccccagcccaccatccccatcgtgggcatcgttgctggccttgttgtccttggagctgtggtcactggagctgtggtcgctgctgtgatgtggaggaagaagagctcagatagaaacagagggagctactctcaggctgcagtgtgagacagcttccttgtgtgggactgagaagcaagatatcaatgtagcagaattgcacttgtgcctcacgaacatacataaatttt

SEQ ID NO: 4046 - protein, 56 aa, Homo sapiens; identical to SEQ ID NO: 4032

SEQ ID NO: 4047 - DNA, 205 bp, Homo sapiens
atggccctgcctcctttctggcctctcacaggacattttcttcccatagatagaaacagagggagctactctcaggctgcagtgtgagacagcttccttgtgtgggactgagaagcaagatatcaatgtagcagaattgcacttgtgcctcacgaacatacataaattttaaaaataaagaataaaaatatatctttttatagat

SEQ ID NO: 4048 - protein, 40 aa, Homo sapiens
IETEGATLRLQCETASLCGTEKQDINVAELHLCLTNIHKF

SEQ ID NO: 4049 - DNA, 495 bp, Homo sapiens
gccccagctgacctgatgaatatcaacatccaatgccctgtaatgaagtcatgtgtgcacatatcatcacttctgcatgcagtctcatgggaagatggtgccaagaaactgtgactccggaggcagcccaaatatccttggaagagcacccccaggagaaataagcttgaccaccatgttatcatcaagtttccgctgaccactgagtaggctgtgaagaagatagaaaacaacagcctacttgtgttcactgtggatgttaaagccaacaagcaccagatcaaacaggctgtgaagaagtttgtgacattgatgtggccaaagtcaacactctgattcagtctgatggagagaggaaggcatatgttcgactggctcctgactacgatgctttggttgttgccaccaaaattgggatcacctaaactgagtcaagctggctagttccaaatatatgtatatcttttcaccattaaaagaatcttaatctctcta

SEQ ID NO: 4050 - protein, 43 aa, Homo sapiens
MPCNEVMCAHIITSACSLMGRWCQETVTPEAAQISLEEHPQEK

SEQ ID NO: 4051 - DNA, 728 bp, Homo sapiens
caagcctcactcccatgcagagaagaagctctgactgtaactgcacctgtggagagaggattgcggcctgttggcagaagagtagtgtcttgggccccagctgacctgatgaatatcaacatccaatgccctgtaatgaagtcatgtgtgcacatatcatcacttctgcatgcagtctcatgggaagatggtgccaagaacgaagaaggaagctcctgcccctcctaaagccgaagccaaagcgaaggctttgcaaggccaagaaggcagtgttgaaagatgtccacagccacaaaaaaaacaagatccacatgtcacccaccttccggcggcccaagacactgtgactccggaggcagcccaaatatccttggaagagcacccccaggagaaataagcttgaccaccatgttatcatcaagtttccgctgaccactgagtaggctgtgaagaagatagaaaacaacagcctacttgtgttcactgtggatgttaaagccaacaagcaccagatcaaacaggctgtgaagaagtttgtgacattgatgtggccaaagtcaacactctgattcagtctgatggagagaggaaggcatatgttcgactggctcctgactacgatgctttggttgttgccaccaaaattgggatcacctaaactgagtcaagctggctagttccaaatatatgtatatcttttcaccattaaaagaatcttaatctctcta

SEQ ID NO: 4052 - protein, 75 aa, Homo sapiens
MQSHGKMVPRTKKEAPAPPKAEAKAKALQGQEGSVERCPQPQKKQDPHVTHLPAAQDTVTPEAAQISLEEHPQEK

SEQ ID NO: 4053 - DNA, 737 bp, Homo sapiens
actgcgaggaaagcaaagtctgggccatggagatgagcctagtcctgctgttcctgatccgcactgccctttttgcaccccagggagctgctgctggaggtgtgtgatgaagtatttagtggtctagtatcatgggtcttgcaacttactttagaatgactcagtcaaaaatcttaatctggacccttttcataagatggtgccaagaacgaagaaggaagctcctgcccctcctaaagccgaagccaaagcgaaggctttgcaaggccaagaaggcagtgttgaaagatgtccacagccacaaaaaaaacaagatccacatgtcacccaccttccggcggcccaagacactgtgactccggaggcagcccaaatatccttggaagagcacccccaggagaaataagcttgaccaccatgttatcatcaagtttccgctgaccactgagtaggctgtgaagaagatagaaaacaacagcctacttgtgttcactgtggatgttaaagccaacaagcaccagatcaaacaggctgtgaagaagtttgtgacattgatgtggccaaagtcaacactctgattcagtctgatggagagaggaaggcatatgttcgactggctcctgactacgatgctttggttgttgccaccaaaattgggatcacctaaactgagtcaagctggctagttccaaatatatgtatatcttttcaccattaaaagaatcttaatctctcta

SEQ ID NO: 4054 - protein, 74 aa, Homo sapiens
MGLATYFRMTQSKILIWTLFIRWCQERRRKLLPLLKPKPKRRLCKAKKAVLKDVHSHKKNKIHMSPTFRRPKTL

SEQ ID NO: 4055 - DNA, 649 bp, Homo sapiens
gccgcttgagccactgcgaggaaagcaaagtctgggccatggagatgagcctagtcctgctgttcctgatccgcactgccctttttgcaccccagggagctgctgctgatggtgccaagaacgaagaaggaagctcctgcccctcctaaagccgaagccaaagcgaaggctttgcaaggccaagaaggcagtgttgaaagatgtccacagccacaaaaaaaacaagatccacatgtcacccaccttccggcggcccaagacactgtgactccggaggcagcccaaatatccttggaagagcacccccaggagaaataagcttgaccaccatgttatcatcaagtttccgctgaccactgagtaggctgtgaagaagatagaaaacaacagcctacttgtgttcactgtggatgttaaagccaacaagcaccagatcaaacaggctgtgaagaagtttgtgacattgatgtggccaaagtcaacactctgattcagtctgatggagagaggaaggcatatgttcgactggctcctgactacgatgctttggttgttgccaccaaaattgggatcacctaaactgagtcaagctggctagttccaaatatatgtatatcttttcaccattaaaagaatcttaatctctcta

SEQ ID NO: 4056 - protein, 69 aa, Homo sapiens [sequence omitted]

SEQ ID NO: 4057 - DNA, 1926 bp, Homo sapiens
aggaaatttctggtgggccttcgcggctccgctgggttggcagccgcttgagccactgcgaggaaagcaaagtctgggccatggagatgagcctagtcctgctgttcctgatccgcactgccctttttgcaccccagggagctgctgctgacggcgcctccctctgtcgccaaagttggagtgcagtggcgcggtctcggctcactgcaagctccgcctcccggattcaagtgattcccctgccttagcctcctaagtagctgggattacaagtgcccaccaccacacccggctaatattttgtattttaatagagactgggtttcaccatgttgaccgggatggtctcaatctcctgacctcgtgatctgcctgcctaagcctcccgaagtgctgggattacaggcgtgagccaccacacctagctggaagaggagataaatatatgaaggtgctgtttggcacagaatttaatagggaagaaagagacagtataactcaccagtgctgggtctcatcatcctgcaatttcagaacaactatgaatacaaaaagaattttaaaatcccagtcctgcctagaaaggggaagtcatctctaaatatggtggccctggggcagctggcctccctgccaggcctcttccatgggggccctttctgcagtgactgtggtttcttcccattttactctgtcctgtgtcctgactgaagcgacaaggtgtgtctgcagctgtgctcacacctggaggaaacctcaatggtgacatgatgaccctagcagcacatcctctttcctgtgtcaagaagcatcgtccggggaggtgagaagaagacagtcctccctagaattgaagaaccagggagaaccagatgggctgggcaggtgggttttcacctggaacctggaggatgagcaatgacatctctccaccctgagctcagccccggcatccacctcctgggctcatgagcagtgcagtggtgcctcctagtggtctctgctcttccttttccagatcaagcacaaacctgagatccaactgtccctcttatgcgcctgggtttcttcactggacaccagtatgagtcaactttcctgtaaagcagaacaagcacgagattggaccatgttagaggaggaatggtgtcatctccacttctggagagatcactgtccccgtgtttgggggaaggaccaagcctcactcccatgcagagaagaagctctgactgtaactgcacctgtggagagaggattgcggcctgttggcagaagagtagtgtcttgggccccagctgacctgatgaatatcaacatccaatgccctgtaatgaagtcatgtgtgcacatatcatcacttctgcatgcagtctcatgggaagatggtgccaagaacgaagaaggaagctcctgcccctcctaaagccgaagccaaagcgaaggctttgcaaggccaagaaggcagtgttgaaagatgtccacagccacaaaaaaaacaagatccacatgtcacccaccttccggcggcccaagacactgtgactccggaggcagcccaaatatccttggaagagcacccccaggagaaataagcttgaccaccatgttatcatcaagtttccgctgaccactgagtaggctgtgaagaagatagaaaacaacagcctacttgtgttcactgtggatgttaaagccaacaagcaccagatcaaacaggctgtgaagaagtttgtgacattgatgtggccaaagtcaacactctgattcagtctgatggagagaggaaggcatatgttcgactggctcctgactacgatgctttggttgttgccaccaaaattgggatcacctaaactgagtcaagctggctagttccaaatatatgtatatcttttcaccattaaaagaatcttaatctctcta

SEQ ID NO: 4058 - protein, 113 aa, Homo sapiens
MSQLSCKAEQARDWTMLEEEWCHLHFWRDHCPRVWGKDQASLPCREEALTVTAPVERGLRPVGRRVVSWAPADLMNINIQCPVMKSCVHISSLLHAVSWEDGAKNEEGSSCPS

SEQ ID NO: 4059 - DNA, 606 bp, Homo sapiens
agcagtggcgcctaaagtctgtgaggagaaagtcgcctctgtgccccggagttcagaggtctaagatggtgccaagaacgaagaaggaagctcctgcccctcctaaagccgaagccaaagcgaaggctttgcaaggccaagaaggcagtgttgaaagatgtccacagccacaaaaaaaacaagatccacatgtcacccaccttccggcggcccaagacactgtgactccggaggcagcccaaatatccttggaagagcacccccaggagaaataagcttgaccaccatgttatcatcaagtttccgctgaccactgagtaggctgtgaagaagatagaaaacaacagcctacttgtgttcactgtggatgttaaagccaacaagcaccagatcaaacaggctgtgaagaagtttgtgacattgatgtggccaaagtcaacactctgattcagtctgatggagagaggaaggcatatgttcgactggctcctgactacgatgctttggttgttgccaccaaaattgggatcacctaaactgagtcaagctggctagttccaaatatatgtatatcttttcaccattaaaagaatcttaatctctcta

SEQ ID NO: 4060 - protein, 69 aa, Homo sapiens [sequence omitted]

SEQ ID NO: 4061 - DNA, 2834 bp, Homo sapiens
tgcgaggaaagcaaagtctgggccatggagatgagcctagtcctgctgttcctgatccgcactgccctttttgcaccccagggagctgctgctgagccccacagtctttgttacaacctcacggtgctgtcccaggatggatctgtgcagtcagggtttctcgctgagggacatctggatggtcagctcttcctgctctgtgacaggcagaaaggcagggcagggccccggggacagtgggcagaagcagtcctgggagctgagacctgggacacagagactgaagacttgacagagaatgggcaggagctcaggaggaccctggctcatatcaagggccagaaaggaggaagaggagataaatatatgaaggtgctgtttggcacagaatttaatagggaagaaagagacagtataactcaccagtgctgggtctcatcatcctgcaatttcagaacaactatgaatacaaaaagaattttaaaatcccagtcctgcctagaaaggggaagtcatctctaaatatggtggccctggggcagctggcctccctgccaggcctcttccatgggggccctttctgcagtgactgtggtttcttcccattttactctgtcctgtgtcctgactgaagcgacaaggtgtgtctgcagctgtgctcacacctggaggaaacctcaatggtgacatgatgaccctagcagcacatcctctttcctgtgtcaagaagcatcgtccggggaggtgagaagaagacagtcctccctagaattgaagaaccagggagaaccagatgggctgggcagatcaagcacaaacctgagatccaactgtccctcttatgcgcctgggtttcttcactggacaccagtatgagtcaactttcctgtaaagcagaacaagcacgagattggaccatgttagaggaggaatggtgtcatctccacttctggagagatcactgtccccgtgtttgggggaaggaccaagcctcactcccatgcagagaagaagctctgactgtaactgcacctgtggagagtggagagacaagaagtgtgagctatttataaagctgagcacctgactgccacgggagtgatagtgaccacacacagcaagacctgggacatggcagtgactgtgtccagaactgacagaactaatctatcatattagaaatcaagaaagtgtctgctctagggttggggagggtgatttatgaccaagtagaacccaatggtgtttcctggaggctggaaatgctattccttgatgtggctgctatttacctgagtgttcactttgtgaaaatccacggcccacttatggtttgtccacctttctccatgcatgttgtccttcattcaagtatacatttctgatgttttgaaacaattctctctaagctaatatagaatctccattactgaaagtccttagaaatgctgcattggaaaaaattagtccaattattaaaaatctatgaaataaatgctgtgactcagacattaagaggagaatctacaacaagagcagtaggcttgggagctaacgcaagaacagctttggaaatggctgttgagccaggaactaggaatcaaaacccaaaaaggcccatgcaaggtggagggtgtgaaatgatgccccagtagtgcatgaatgaatgagtcatgggcagtggctcatgggttgcttggtcagtcaggaacttgagcaaaataaagttggaaaactgggggatggaagagagaggtatgcacagacctcttgacatgggcagagcttcagaagatggtggttgcaggtttccccaaatagagaacatcaataaaaaggtagaaattttacaaagagaccagataaaaagtttggagctgaaaagtgcaataactgaaatgaaaaattcactagaggggctccagagcaaatttcaccatgcagaatggagaatcagcaagcttgaagataagacaattgaaattctctagttcagtagcagaaagaaaaaaaattatgaagaaaaataaacagaactttaaagatctgtgagacaacatcaagcacatgcactttgggagtcctcaaagaaaggagagagagaaaggagaagaatgactatttaaagaataactccaaaccttccaaatttgatgaaaaacattattcatccaacaaacttgacaaattttaagcagcaaaaaaaattaaatttaaagaggtccacaccaagagaacattataatcaacctgtcaaaagccaatgacaaacagagcatattgaaatgaataacagagaaggaacttttcaggttcaatggatcctcaataagattgcagcccagttttcttcagaaaccatagagttcagaaggcattggaatgttgacaaatttagaggtcagaaaaaaaaagactgtcatgcaggaattgtgtgtctggaaaaactctccttcagaaataatggattttatatatatataaatatatatatatacacacatatatatacatatatatacatatatatgactatacatagtactacatatatataactatatatagtactactatgaaattatatatatagtactatatatagtagtcatactataaaagctagtagtaatatgtatatttttggtgtttatatgtgtgtgtgtgtgtgtgtgtgtgtgcatatatatatagtactatatatagtagtcctataaaagctagtagtaacatgtatatttttggtgtttaattcttcctttgtttttcctatttggtttaaaagaaaatgcccattgactaatgaatgaataaacaacatgtagtgtatttct

SEQ ID NO: 4062 - protein, 165 aa, Homo sapiens
MEMSLVLLFLIRTALFAPQGAAAEPHSLCYNLTVLSQDGSVQSGFLAEGHLDGQLFLLCDRQKGRAGPRGQWAEAVLGAETWDTETEDLTENGQELRRTLAHIKGQKGGRGDKYMKVLFGTEFNREERDSITHQCWVSSSCNFRTTMNTKRILKSQSCLERGSHL

SEQ ID NO: 4063 - DNA, 758 bp, Homo sapiens
cccattttactctgtcctgtgtcctgactgaagcgacaaggtgtgtctgcagctgtgctcacacctggaggaaacctcaatggtgtgagtaaattgtaaatgtttacttattatgggttattttattatttatgaagtatgtattttgatttcattctactgacaacacaataaaccaggacatgatgaccctagcagcacatcctctttcctgtgtcaagaagcatcgtccggggaggtgagaagaagacagtcctccctagaattgaagaaccagggagaaccagatgggctgggcagatcaagcacaaacctgagatccaactgtccctcttatgcgcctgggtttcttcactggacaccagtatgagtcaactttcctgtaaagcagaacaagcacgagattggaccatgttagaggaggaatggtgtcatctccacttctggagagatcactgtccccgtgtttgggggaaggaccaagcctcactcccatgcagagaagaagctctgactgtaactgcacctgtggagaggtgaggacctgtcccctctacaccgatggccagagcctccagagtggggccaggcttttccctcagctgtgtcctgtcaggtttatctaggcctcaaagaatagaccctggacattgcctctggcaatgtgagctggacacacacccagatgtaaggtagccctgccaagtatcctggggttgccagtagttctgggtgctcagtgtctggagcggagggtg

SEQ ID NO: 4064 - protein, 66 aa, Homo sapiens
MVSSPLLERSLSPCLGEGPSLTPMQRRSSDCNCTCGEVRTCPLYTDGQSLQSGARLFPQLCPVRFI

SEQ ID NO: 4065 - DNA, 649 bp, Homo sapiens
acagtgggcagaagcagtcctgggagctgagacctgggacacagagactgaagacttgacagagaatgggcaggagctcaggaggaccctggctcatatcaagggccagaaaggagagcacgtgagcctgcaaggcccggatcaacgcccggttgggacaggagaccaccagggcagtgcacagctgggatttcagtctctggtgtcaactcctgggtctactggctccactgagggcagctacactctgcagccagatggccagaattcaactccctgcccaggtctcaccagcactttcccacttggtgcctcagtttcctcatctatgaaatggggaaactaacagcatttatttcttgtggttgggtggatgaaaagcgttagtatatatgaggggtttgcagctgtgccacattatttttgttatcatttgattatattttaatatattacatatgcggtcattgtattattattataaatgagatttatgagtgagtgtcctggttacggctccttctggggagcccaggaccagctttcctggcaccttgaggtcccctcaccctgtcacactctcatgcattacctcatatctactatgtcttcataattttatactatagaaatttaccctttaagtaga

SEQ ID NO: 4066 - protein, 43 aa, Homo sapiens
MRFMSECPGYGSFWGAQDQLSWHLEVPSPCHTLMHYLISTMSS

SEQ ID NO: 4067 - DNA, 468 bp, Homo sapiens
tgagccactgcgaggaaagcaaagtctgggccatggagatgagcctagtcctgctgttcctgatccgcactgccctttttgcaccccagggagctgctgctgagccccacagtctttgttacaactcctgggtctactggctccactgagggcagctacactctgcagccagatggccagaattcaactccctgcccaggtctcaccagcactttcccacttggtgcctcagtttcctcatctatgaaatggggaaactaacagcatttatttcttgtggttgggtggatgaaaagcgttagtatatatgaggggtttgcagctgtgccacattatttttgttatcatttgattatattttaatatattacatatgcggtcattgtattattattataaatgagatttatgagtgagtgtcctggttacggctccttctggggagcccaggaccagctttcctggcac

SEQ ID NO: 4068 - protein, 38 aa, Homo sapiens
MEMSLVLLFLIRTALFAPQGAAAEPHSLCYNSWVYWLH

SEQ ID NO: 4069 - DNA, 690 bp, Homo sapiens
gagccactgcgaggaaagcaaagtctgggccatggagatgagcctagtcctgctgttcctgatccgcactgccctttttgcaccccagggagctgctgctgagccccacagtctttgttacaacctcacggtgctgtcccaggatggatctgtgcagtcagggtttctcgctgagggacatctggatggtcagctcttcctgctctgtgacaggcagaaaggcagggcagggccccggggacagtgggcagaagcagtcctgggagctgagacctgggacacagagactgaagacttgacagagaatgggcaggagctcaggaggaccctggctcatatcaagggccagaaaggaggcagactacatgcaaaagctatggtgatatctgaaattctggaggtatcagaaaaacagtgaatgagatgcacagtggggccttagaaggcaatgtcaccatgatgtgctggcctccatcttctatccctggaatatctctctgacctggcatcaggatgaggcatctttgagccaggatgcccagcagtctaggggtgtcctgcccaatgggaatgggacctaccagacctgcatggccaccaggattccccgaggagaggagcagaggttcacctgctacatgggacacagagggaatcacagcactcaccctgtgccctctggtgagcctg

SEQ ID NO: 4070 - protein, 128 aa, Homo sapiens
MEMSLVLLFLIRTALFAPQGAAAEPHSLCYNLTVLSQDGSVQSGFLAEGHLDGQLFLLCDRQKGRAGPRGQWAEAVLGAETWDTETEDLTENGQELRRTLAHIKGQKGGRLHAKAMVISEILEVSEKQ

SEQ ID NO: 4071 - DNA, 583 bp, Homo sapiens
atgaaccacactgcccaaaccttcttcattcctgccaacagtggctgccctcccccgccccccaaccccagctatgagatgctcaaggaggagcatgaggtggctgtgctgggggcgccccacaaccctgctcccccaatgtccaccatgatccatatctgcagcgagacctccgtgtctgactatgttgtctggtccctgtccaacatcctcttcatgaacccccactgcctgggattcatagcattcacctactccctgaagtctagggacaggaagatggttggagacctgactggggcccaggcctatgcctccactgccaagtacctgaacatctgagccctgattgtgtgcatcatcatgaccattctgctcaccgtcatcatcctagtgttgatcttccaagtctgtcgatagatcaggaggcatcatccaggccaggagctctgcccatgacctgtattccacatactccaacttccattcctcgtcctggccccagagctgagttctgtatcagcgctttatcctcacacactcttctacaatggcattcaataaagtgcatgtgttcctggtt

SEQ ID NO: 4072 - protein, 113 aa, Homo sapiens [sequence omitted]

SEQ ID NO: 4073 - DNA, 2064 bp, Homo sapiens
caaggagcacaggtcctcgttcaggacgatgtaatccttgccatcgtaagcaagctggtgatacccgcggagtaggcgcccgtccgaccccacgtcgcagacagacatcctctagatgggtgtgagaccctggccccgcccccgcggccagccccgcccaccgagccccgccctcgccaggaccaacctgcggggattttggctgaaaatgaaaccgggtaacggctcctgggcctctcccgggtcaagggtctccaggtcccgctgcctcggcgtggatctcggacccagagactcggggagacccgggcggtccgtgggggatgtggaggggtagtgacctgcgcccccggccggtgtcactcacaggcctcactctggttgtagtagccgctcagggtccgcaggttcactcggtaaaactgtgctttggccttggcggtccctgtctcctcttcccaatattccggcccctcctgctccatccacggcgcccgcggctccatcctgggactcgtggcgtcgctgtcgagccgcacgcactgcgtgtcgtccacgtcgcccacggagaggaagcggggatccgcgcggccgggccgggacatggtggtgtggaaatacctcaaggagtggaagcctgggagcaaggagggggctgagaccctcccgaccctcctcccggcaccgcaaccgggttcctgcgcccccgccgggcaggcccctagctactccccacagacgccgtttccctcccgaccccgcactcacctgcccaggtctgggtcaggaccagggcccccgagagcagcagaagcagggttcggggcgccatgacaccatcctcggcgactgggaagaatcggagtcccggtgggtgcgtgggaactttagaaccgggaccgcggctacattgattggcttctctagaaacccgacactcaatgggagtgagaactggggcagcccggtgagtacccaggaagaaggacccgacacaggttgggagagggagaagagaaaccctgcaaagatggggaatgcccagcgctgggcctccccaatccatacaccgcctttggggcctgagatcctgagagccacgcctgaggccctgggacttcgccctgaccccgctacttctgtgccaagcgctctgtctcaatgtttccctgagtcttggcccaggagctgtctgagaaaccagggagaaaccctcggaatgggccccgtccctctctcttcactttgcatcacggaatccccgtcccagaactggactccctgcctcctactccttacctgtccccgtggactcttctagaagaaaaatcaccccagggagcttgttgccagagagtgagcttgccctgggaatggaggtgtagagacagggttttttgttgttgttgtttgtttgttttttaaatctggaaaagttgtgcctgagtgcatgagatagaatagagaccagtttgctttttgtttattaactacagtgggtagcagaatcttggtaactcctaatgatcaggaatctaatcggccaaaaatgtgactttggtcccttgacatataaatgtgtctaaaagcattacaacaggaatcacaaagctcctaagtttcactttcccagacaatgtatctgtgactcccgcttgtagtattttaaatttaccttcattccatagccctgagtttctgtgtgagtccaggacatctcctaatacaaggtagccactgtgttactatatgttgtaaccaggagccagtacggactttattcatctcacagtggcaagcactcaatgcagtcacaatgcccctcaccagtgctcatgcactgcctgtttttaggaagtatccacttctaagtgttgtgtatattttatatgaacacttagtattttttaaacctgattaacataaaaaaattagtttttaggcagacccacataaggtattaaaggccaactgcaaagatcaccctgcaaggctctgtagattgatgtattaaaatatataaaacaatgtgtttaaacctgagttctgctgctttcgaattct

SEQ ID NO: 4074 - protein, 111 aa, Homo sapiens [sequence omitted]

SEQ ID NO: 4075 - DNA, 2042 bp, Homo sapiens
caaggagcacaggtcctcgttcaggacgatgtaatccttgccatcgtaagcaagctggtgatacccgcggagtaggcgcccgtccgaccccacgtcgcagacagacatcctctagatgggtgtgagaccctggccccgcccccgcggccagccccgcccaccgagccccgccctcgccaggaccaacctgcggggattttggctgaaaatgaaaccgggtaacggctcctgggcctctcccgggtcaagggtctccaggtcccgctgcctcggcgtggatctcggacccagagactcggggagacccgggcggtccgtgggggatgtggaggggtagtgacctgcgcccccggccggtgtcactcacaggcctcactctggttgtagtagccgctcagggtccgcaggttcactcggtaaaactgtgctttggccttggcggtccctgtctcctcttcccaatattccggcccctcctgctccatccacggcgcccgcggctccatcctgggactcgtggcgtcgctgtcgagccgcacgcactgcgtgtcgtccacgtcgcccacggagaggaagcggggatccgcgcggccgggccgggacatggtggtgtggaaatacctcaaggagtggaagcctgggagcaaggagggggctgagaccctcccgaccctcctcccggcaccgcaaccgggttcctgcgcccccgccgggcaggcccctagctactccccacagacgccgtttccctcccgaccccgcactcacctgcccaggtctgggtcaggaccagggcccccgagagcagcagaagcagggttcggggcgccatgacaccatcctcggcgactgggaagaatcggagtcccggtgggtgcgtgggaactttagaaccgggaccgcggctacattgattggcttctctagaaacccgacactcaatgggagtgagaactggggcagcccggtgagtacccaggaagaaggacccgacacaggttgggagagggagaagagaaaccctgcaaagatggggaatgcccagcgctgggcctccccaatccatacaccgcctttggggcctgagatcctgagagccacgcctgaggccctgggacttcgccctgaccccgctacttctgtgccaagcgctctgtctcaatgtttccctgagtcttggcccaggagctgtctgagaaaccagggagaaaccctcggaatgggccccgtccctctctcttcactttgcatcacggaatccccgtcccagaactggactccctgcctcctactccttacctgtccccgtggactcttctagaagaaaaatcaccccagggagcttgttgccagagagtgagcttgccctgggaatggaggtgtagagacagggttttttgttgttgttgtttgtttgttttttaaatctggaaaagttgtgcctgagtgcatgagatagaatagagaccagtttgctttttgtttattaactacagtgggtagcagaatcttggtaactcctaatgatcaggaatctaatcggccaaaaatgtgactttggtcccttgacatataaatgtgtctaaaagcattacaacaggaatcacaaagctcctaagtttcactttcccagacaatgtatctgtgactcccgcttgtagtattttaaatttaccttcattccatagccctgagtttctgtgtgagtccaggacatctcctaatacaaggtagccactgtgttactatatgttgtaaccaggagccagtacggactttattcatctcacagtggcaagcactcaatgcagtcacaatgcccctcaccagtgctcatgcactgcctgtttttaggaagtatccacttctaagtgttgtgtatattttatatgaacacttagtattttttaaacctgattaacataaaaaaattagtttttaggcagacccacataaggtattaaaggccaactgcaaagatcaccctgcaaggctctgtagattgatgtattaaaatatataaaacaatgtgtttaaacctg

SEQ ID NO: 4076 - protein, 111 aa, Homo sapiens [sequence omitted]

SEQ ID NO: 4077 - DNA, 1629 bp, Homo sapiens
caggtttaaacacattgttttatatattttaatacatcaatctacagagccttgcagggtgatctttgcagttggcctttaataccttatgtgggtctgcctaaaaactaatttttttatgttaatcaggtttaaaaaatactaagtgttcatataaaatatacacaacacttagaagtggatacttcctaaaaacaggcagtgcatgagcactggtgaggggcattgtgactgcattgagtgcttgccactgtgagatgaataaagtccgtactggctcctggttacaacatatagtaacacagtggctaccttgtattaggagatgtcctggactcacacagaaactcagggctatggaatgaaggtaaatttaaaatactacaagcgggagtcacagatacattgtctgggaaagtgaaacttaggagctttgtgattcctgttgtaatgcttttagacacatttatatgtcaagggaccaaagtcacatttttggccgattagattcctgatcattaggagttaccaagattctgctacccactgtagttaataaacaaaaagcaaactggtctctattctatctcatgcactcaggcacaacttttccagatttaaaaaacaaacaaacaacaacaacaaaaaaccctgtctctacacctccattcccagggcaagctcactctctggcaacaagctccctggggtgatttttcttctagaagagtccacggggacagggtttctcttctccctctcccaacctgtgtcgggtccttcttcctgggtactcaccgggctgccccagttctcactcccattgagtgtcgggtttctagagaagccaatcaatgtagccgcggtcccggttctaaagttcccacgcacccaccgggactccgattcttcccagtcgccgaggatggtgtcatggcgccccgaaccctgcttctgctgctctcgggggccctggtcctgacccagacctgggcaggcttccactccttgaggtatttccacaccaccatgtcccggcccggccgcgcggatccccgcttcctctccgtgggcgacgtggacgacacgcagtgcgtgcggctcgacagcgacgccacgagtcccaggatggagccgcgggcgccgtggatggagcaggaggggccggaatattgggaagaggagacagggaccgccaaggccaaagcacagttttaccgagtgaacctgcggaccctgagcggctactacaaccagagtgaggcctgtgagtgacaccggccgggggcgcaggtcactacccctccacatcccccacggaccgcccgggtctccccgagtctctgggtccgagatccacgccgaggcagcgggacctggagacccttgacccgggagaggcccaggagccgttacccggtttcattttcagccaaaatccccgcaggttggtcctggcgagggcggggctcggtgggcggggctggccgcgggggcggggccagggtctcacacccatctagaggatgtctgtctgcgacgtggggtcggacgggcgcctactccgcgggtatcaccagcttgcttacgatggcaaggattacatcgtcctgaacgaggacctgtgct

SEQ ID NO: 4078 - protein, 113 aa, Homo sapiens
MAPRTLLLLLSGALVLTQTWAGFHSLRYFHTTMSRPGRADPRFLSVGDVDDTQCVRLDSDATSPRMEPRAPWMEQEGPEYWEEETGTAKAKAQFYRVNLRTLSGYYNQSEACE

SEQ ID NO: 4079 - DNA, 1467 bp, Homo sapiens
caggtttaaacacattgttttatatattttaatacatcaatctacagagccttgcagggtgatctttgcagttggcctttaataccttatgtgggtctgcctaaaaactaatttttttatgttaatcaggtttaaaaaatactaagtgttcatataaaatatacacaacacttagaagtggatacttcctaaaaacaggcagtgcatgagcactggtgaggggcattgtgactgcattgagtgcttgccactgtgagatgaataaagtccgtactggctcctggttacaacatatagtaacacagtggctaccttgtattaggagatgtcctggactcacacagaaactcagggctatggaatgaaggtaaatttaaaatactacaagcgggagtcacagatacattgtctgggaaagtgaaacttaggagctttgtgattcctgttgtaatgcttttagacacatttatatgtcaagggaccaaagtcacatttttggccgattagattcctgatcattaggagttaccaagattctgctacccactgtagttaataaacaaaaagcaaactggtctctattctatctcatgcactcaggcacaacttttccagatttaaaaaacaaacaaacaacaacaacaaaaaaccctgtctctacacctccattcccagggcaagctcactctctggcaacaagctccctggggtgatttttcttctagaagagtccacggggacagtcgccgaggatggtgtcatggcgccccgaaccctgcttctgctgctctcgggggccctggtcctgacccagacctgggcaggcttccactccttgaggtatttccacaccaccatgtcccggcccggccgcgcggatccccgcttcctctccgtgggcgacgtggacgacacgcagtgcgtgcggctcgacagcgacgccacgagtcccaggatggagccgcgggcgccgtggatggagcaggaggggccggaatattgggaagaggagacagggaccgccaaggccaaagcacagttttaccgagtgaacctgcggaccctgagcggctactacaaccagagtgaggcctgtgagtgacaccggccgggggcgcaggtcactacccctccacatcccccacggaccgcccgggtctccccgagtctctgggtccgagatccacgccgaggcagcgggacctggagacccttgacccgggagaggcccaggagccgttacccggtttcattttcagccaaaatccccgcaggttggtcctggcgagggcggggctcggtgggcggggctggccgcgggggcggggccagggtctcacacccatctagaggatgtctgtctgcgacgtggggtcggacgggcgcctactccgcgggtatcaccagcttgcttacgatggcaaggattacatcgtcctgaacgaggacctgtgctccttgacagcc

SEQ ID NO: 4080 - protein, 113 aa, Homo sapiens; identical to SEQ ID NO: 4078

SEQ ID NO: 4081 - DNA, 3360 bp, Homo sapiens
aggagatgtcctggactcacacagaaactcagggctatggaatgaagggcaagctcactctctggcaacaagctccctggggtgatttttcttctagaagagtccacggggacaggctgccccagttctcactcccattgagtgtcgggtttctagagaagccaatcaatgtagccgcggtcccggttctaaagttcccacgcacccaccgggactccgattcttcccagtcgccgaggatggtgtcatggcgccccgaaccctgcttctgctgctctcgggggccctggtcctgacccagacctgggcaggcttccactccttgaggtatttccacaccaccatgtcccggcccggccgcgcggatccccgcttcctctccgtgggcgacgtggacgacacgcagtgcgtgcggctcgacagcgacgccacgagtcccaggatggagccgcgggcgccgtggatggagcaggaggggccggaatattgggaagaggagacagggaccgccaaggccaaagcacagttttaccgagtgaacctgcggaccctgagcggctactacaaccagagtgaggcctgtgagtgacaccggccgggggcgcaggtcactacccctccacatcccccacggaccgcccgggtctccccgagtctctgggtccgagatccacgccgaggcagcgggacctggagacccttgacccgggagaggcccaggagccgttacccggtttcattttcagccaaaatccccgcaggggctgccagccacacagagtcatggacaggtctctacagacacaacttagtgccagcttggatgaaaccctctgaggaatgggtgccatctttcaggatgtggtgcatgtattgaatcaaagatgtctctatagtgctgtgtttacagaaggaagaatacgtgggtccaaaaaccaagaagtagaagcagggatgtttgaatagtatgtgtccagatacaagcaggtgagaagaggaggaggcagggctgctatcacacaaggagggcaggagatgtgtgtgtggaaataagagatccacttggagaccttatggttccccttgtcctgttgtaagtgtgagcagaatcatccagcaacccagcctgagagggtttcatattcaagagcccagaaccctcaggaaggaaggattgagtgatactcacaggtaatgtcccaaggctgtgctcctgtgctctgacatcctcagcaggattggtgcaaagccctgcttcccatgggctgttcccagccagtgactggtcacagcaggcattaaggcaagccattcctgggagacacgggactcctctgatggctaactgtagctggaagactcctccacggccttgctcaactctccttagattgcctgtgctctaggatgcgtcaaacaaactttctctccttctgtccagcacttggggtcacacttgcatcgtggtctgccgccttttctcagggatttctggctcacttcccatattcccttacgggtgtgtccccttataagatgtcgcagactttaagctcatcttggcatctgctccttgaaggacttggactaaaaattatttccatctgcatatcaataactcttattccaacctgtaaaatccttctctttatccaacttctgccacccccacagaatctattttacttgtgtgtgtagtatctctttgagttaacagatatttgttctattaagctactaaattttgaggtagtttgtgacacagcacttgataactattaaggctttcttaagtttccattattccatggatattatctacatatcttttaatcccttgcattttaataacattagctatacttgctgtttccaactctttcctcctatttttgaacattttaaattttgtctttctctgtccttccttccttctttcctcctttcctccctcagagctttctccctccctccatttttttcataaactccaagtgtttaggccaaaaggaagcattatttgaactttatgctaaaagtataatgccgtaatttataatataaaagtaaagaaaaggaagttgttaatggaatatgaaaaaatgcctagggtgattctatagccaagacagtaccttttaacatttaatttctgcctccaactgaatgttttcagaacacatgagcaacacaagctctttcccattcttggtacaagcacttgagaaatcaaattagccttatctagtatgattaatgtccatacatcatataatcccaccatctgcctcctgatcataccccctggggacattcttggctatgtgtccaggagacatgtacaccaatgtttatggcaaaaactggaaacaatcacatatacatcaatgggaattaacaaaatagtcgtataataataaaaagtaaaacttcagcagcaacagtgaatgaacagcaccctcccacatcagagataactctcctacacataacatgcatcagcatcacagaagaatgcacattgtgtgagttctctgtacggggaagttaaaaaaagcaggtcaaactgtgatttggatatatatatatatacttattgtaaaaatctttagagacaatgaaaaggaatagtaaatacaagactcaagatagaagttccttttggggaatagaattggacaacagccgagggtggcttcataggttttgttttttatgccaggaggggatgtccaggtagttaagttacttgatcataaatctttcttttttctttctttctttcttttcgagatggagtctccctcttgttgcccaggctggagtgcagtggcatgatctcagttcactgcaacctccgcctcccaggttcaagcaattctcctacctcagcctcctgagtagctggaattataggcatccaccacgacacccagccctgggggaagctggctgttgtgtcataaggaggcctgtggtccatgtgactaggaagtgagtcctcctgggaccagacaataagaagctaaagcctcttccaaaagccatgtgagagattcttgtgtcttgtgaatccccggccccatttgagccctcagatgattcagccctggaagacaactagactgcaacgttgtgagaggccctgagccagaagcattcagagaaacttctcctggattcctgaccatggataactgtgggagatgataaatatttgttgatttgagctgctaagttgtaggtgacttgttatgcagcagtagataactaatacagcttcacaagagaggatgaatcactgaactttttcatttgctctaaattcattataagatattaaacatgtcatttgctttt

SEQ ID NO: 4082 - protein, 113 aa, Homo sapiens; identical to SEQ ID NO: 4078

SEQ ID NO: 4083 - DNA, 1618 bp, Homo sapiens
ctacccactgtagttaataaacaaaaagcaaactggtctctattctatctcatgcactcaggcacaacttttccagatttaaaaaacaaacaaacaacaacaacaaaaaaccctgtctctacacctccattcccagggcaagctcactctctggcaacaagctccctggggtgatttttcttctagaagagtccacggggacaggtaaggagtaggaggcagggagtccagttctgggacggggattccgtgatgcaaagtgaagagagagggacggggcccattccgagggtttctccctggtttctcagacagctcctgggccaagactcagggaaacattgagacagagcgcttggcacagaagtagcggggtcagggcgaagtcccagggcctcaggcgtggctctcaggatctcaggccccaaaggcggtgtatggattggggaggcccagcgctgggcattccccatctttgcagggtttctcttctccctctcccaacctgtgtcgggtccttcttcctgggtactcaccgggctgccccagttctcactcccattgagtgtcgggtttctagagaagccaatcaatgtagccgcggtcccggttctaaagttcccacgcacccaccgggactccgattcttcccagtcgccgaggatggtgtcatggcgccccgaaccctgcttctgctgctctcgggggccctggtcctgacccagacctgggcaggcttccactccttgaggtatttccacaccaccatgtcccggcccggccgcgcggatccccgcttcctctccgtgggcgacgtggacgacacgcagtgcgtgcggctcgacagcgacgccacgagtcccaggatggagccgcgggcgccgtggatggagcaggaggggccggaatattgggaagaggagacagggaccgccaaggccaaagcacagttttaccgagtgaacctgcggaccctgagcggctactacaaccagagtgaggcctaagtgcagcttcattccctccctgttcgtgtggcctggacttaatgactcacttctaactgatagagtaatgctgacataatagtttgtgattctgggtgtagaacataagactcactgaagtttctactttggttctttctttctctggaatcatgagccctgggggaagctggctgttgtgtcataaggaggcctgtggtccatgtgactaggaagtgagtcctcctgggaccagacaataagaagctaaagcctcttccaaaagccatgtgagagattcttgtgtcttgtgaatccccggccccatttgagccctcagatgattcagccctggaagacaactagactgcaacgttgtgagaggccctgagccagaagcattcagagaaacttctcctggattcctgaccatggataactgtgggagatgataaatatttgttgatttgagctgctaagttgtaggtgacttgttatgcagcagtagataactaatacagcttcacaagagaggatgaatcactgaactttttcatttgctctaaattcattataagatattaaacatgtcatttgcttttaatatttaataaaaatttccatggctatat

SEQ ID NO: 4084 - protein, 189 aa, Homo sapiens
MDWGGPALGIPHLCRVSLLPLPTCVGSFFLGTHRAAPVLTPIECRVSREANQCSRGPGSKVPTHPPGLRFFPVAEDGVMAPRTLLLLLSGALVLTQTWAGFHSLRYFHTTMSRPGRADPRFLSVGDVDDTQCVRLDSDATSPRMEPRAPWMEQEGPEYWEEETGTAKAKAQFYRVNLRTLSGYYNQSEA

SEQ ID NO: 4085 - DNA, 3798 bp, Homo sapiens
agtcgccgaggatggtgtcatggcgccccgaaccctgcttctgctgctctcgggggccctggtcctgacccagacctgggcaggcttccactccttgaggtatttccacaccaccatgtcccggcccggccgcgcggatccccgcttcctctccgtgggcgacgtggacgacacgcagtgcgtgcggctcgacagcgacgccacgagtcccaggatggagccgcgggcgccgtggatggagcaggaggggccggaatattgggaagaggagacagggaccgccaaggccaaagcacagttttaccgagtgaacctgcggaccctgagcggctactacaaccagagtgaggcctgggctgccagccacacagagtcatggacaggtctctacagacacaacttagtgccagcttggatgaaaccctctgaggaatgggtgccatctttcaggatgtggtgcatgtattgaatcaaagatgtctctatagtgctgtgtttacagaaggaagaatacgtgggtccaaaaaccaagaagtagaagcaggtgtggctccatatctaaacccttatattcaccttcagggtgattttgcacttctcatctccaatatctgggctctgtaggggaggaggtcctggtttcccaaagggggcaccctggcaaggagacatttaaatgagagtccatggaaatatacattatggctgcccccagggatgtttgaatagtatgtgtccagatacaagcaggtgagaagaggaggaggcagggctgctatcacacaaggagggcaggagatgtgtgtgtggaaataagagatccacttggagaccttatggttccccttgtcctgttgtaagtgtgagcagaatcatccagcaacccagcctgagagggtttcatattcaagagcccagaaccctcaggaaggaaggattgagtgatactcacaggtaatgtcccaaggctgtgctcctgtgctctgacatcctcagcaggattggtgcaaagccctgcttcccatgggctgttcccagccagtgactggtcacagcaggcattaaggcaagccattcctgggagacacgggactcctctgatggctaactgtagctggaagactcctccacggccttgctcaactctccttagattgcctgtgctctaggatgcgtcaaacaaactttctctccttctgtccagcacttggggtcacacttgcatcgtggtctgccgccttttctcagggatttctggctcacttcccatattcccttacgggtgtgtccccttataagatgtcgcagactttaagctcatcttggcatctgctccttgaaggacttggactaaaaattatttccatctgcatatcaataactcttattccaacctgtaaaatccttctctttatccaacttctgccacccccacagaatctattttacttgtgtgtgtagtatctctttgagttaacagatatttgttctattaagctactaaattttgaggtagtttgtgacacagcacttgataactattaaggctttcttaagtttccattattccatggatattatctacatatcttttaatcccttgcattttaataacattagctatacttgctgtttccaactctttcctcctatttttgaacattttaaattttgtctttctctgtccttccttccttctttcctcctttcctccctcagagctttctccctccctccatttttttcataaactccaagtgtttaggccaaaaggaagcattatttgaactttatgctaaaagtataatgccgtaatttataatataaaagtaaagaaaaggaagttgttaatggaatatgaaaaaatgcctagggtgattctatagccaagacagtaccttttaacatttaatttctgcctccaactgaatgttttcagaacacatgagcaacacaagctctttcccattcttggtacaagcacttgagaaatcaaattagccttatctagtatgattaatgtccatacatcatataatcccaccatctgcctcctgatcataccccctggggacattcttggctatgtgtccaggagacatgtacaccaatgtttatggcaaaaactggaaacaatcacatatacatcaatgggaattaacaaaatagtcgtataataataaaaagtaaaacttcagcagcaacagtgaatgaacagcaccctcccacatcagagataactctcctacacataacatgcatcagcatcacagaagaatgcacattgtgtgagttctctgtacggggaagttaaaaaaagcaggtcaaactgtgatttggatatatatatatatacttattgtaaaaatctttagagacaatgaaaaggaatagtaaatacaagactcaagatagaagttccttttggggaatagaattggacaacagccgagggtggcttcataggttttgttttttatgccaggaggggatgtccaggtagttaagttacttgatcataaatctttcttttttctttctttctttcttttcgagatggagtctccctcttgttgcccaggctggagtgcagtggcatgatctcagttcactgcaacctccgcctcccaggttcaagcaattctcctacctcagcctcctgagtagctggaattataggcatccaccacgacacccaggtaatttttgtatttttagtagagacggggtttcaccatattgtccaggttggtctcaaactcctgacctcaggtgatccgccaacttcggccttccaaagtgctgggattacagacatgagccaccattcccggcccacaaatctttaaagtgtcatttttcaaaatgcaccttgtgtgccattcctgactgattatttggaaatgaaagagaaaagaaaataccaaagttcatctcaaggatccttagcaataactacacacgttaaaacaaagccacagccaattgtaaagagtcatgtgacagagaggaccaggatctcatgaaaaatagccttggctagaaagaggtcatttgaccctgggctaattggcaactctctacattgtctggcatacagtgttcaatctgatgtgcaaggcaattgtatcttgcaaagaatttgagaatttgatatgttgctcacattttaccacacatacaagtggattaaacttttacacagtaaaaaaaaaaagcattgttgagcaaaataaattaaatgaaaagacataaaggaataactagtgatgaaatagcaataagaatggaaaacatgaaagagatgcttgtacagcaatgatagcagcacaaaagaacagtgtttttcagaatcatacaggagtccaaatcacttctaccacatctaattaaaaaacacagtgaaagatgttaaactttcataggatgcccactgaatagccagttattgaaaaatcttgttcctagattggagtaaacaatttctgcctaccctagccaaacaaattattgtcatgatgctaagctagtgtatagacagaggtgtgagattcacatttttctaactgcaaagcaccctgattaggcaaatatttttgtagatgcttgagtaagaaaattggcattttgggcattcttaaaccgaattagaaacttctgaagagaaacaaacgtagttatgattgtaaaggcattattgtatggcaccaaagtcttgggacactttaatttagctactgtattttctcaactctgttgcaacttatcaaagagaatattaatattaaaggcatttac

SEQ ID NO: 4086 - protein, 149 aa, Homo sapiens
MAPRTLLLLLSGALVLTQTWAGFHSLRYFHTTMSRPGRADPRFLSVGDVDDTQCVRLDSDATSPRMEPRAPWMEQEGPEYWEEETGTAKAKAQFYRVNLRTLSGYYNQSEAWAASHTESWTGLYRHNLVPAWMKPSEEWVPSFRMWCMY

SEQ ID NO: 4087 - DNA, 1383 bp, Homo sapiens
atatagtaacatagtgtggtactttgtcttgaggagatgtcctggactcacacggaaacttagggctacggaatgaagacgccaaggatggtggtcatggcgccccgaaccctcttcctgctgctctcgggggccctgaccctgaccgagacctgggcgggctcccactccatgaggtatttcagcgccgccgtgtcccggcccggccgcggggagccccgcttcatcgccatgggctacgtggacgacacgcagttcgtgcggttcgacagcgactcggcgtgtccgaggatggagccgcgggcgccgtgggtggagcaggaggggccggagtattgggaagaggagacacggaacaccaaggcccacgcacagactgacagaatgaacctgcagaccctgcgcggctactacaaccagagcgaggccagttctcacaccctccagtggatgattggctgcgacctggggtccgacggacgcctcctccgcgggtatgaacagtatgcctacgatggcaaggattacctcgccctgaacgaggacctgcgctcctggaccgcagcggacactgcggctcagatctccaagcgcaagtgtgaggcggccaatgtggctgaacaaaggagagcctacctggagggcacgtgcgtggagtggctccacagatacctggagaacgggaaggagatgctgcagcgcgcggacccccccaagacacacgtgacccaccaccctgtctttgactatgaggccaccctgaggtgctgggccctgggcttctaccctgcggagatcatactgacctggcagcgggatggggaggaccagacccaggacgtggagctcgtggagaccaggcctgcaggggatggaaccttccagaagtgggcagctgtggtggtgccttctggagaggagcagagatacacgtgccatgtgcagcatgaggggctgccggagcccctcatgctgagatggaagcagtcttccctgcccaccatccccatcatgggtatcgttgctggcctggttgtccttgcagctgtagtcactggagctgcggtcgctgctgtgctgtggagaaagaagagctcagattgaaaaggagggagctactctcaggctgcaatgtgaaacagctgccctgtgtgggactgagtggcaagtccctttgtgacttcaagaaccctgactcctctttgtgcagagaccagcccacccctgtgcccaccatgaccctcttcctcatgctgaactgcattccttccccaatcacctttcctgttccagaaaaggggctgggatgtctccgtctctgtctcaaatttgtggtccactgagctataacttacttctgtattaaaattagaatctgagtat

SEQ ID NO: 4088 - protein, 343 aa, Homo sapiens
MKTPRMVVMAPRTLFLLLSGALTLTETWAGSHSMRYFSAAVSRPGRGEPRFIAMGYVDDTQFVRFDSDSACPRMEPRAPWVEQEGPEYWEEETRNTKAHAQTDRMNLQTLRGYYNQSEASSHTLQWMIGCDLGSDGRLLRGYEQYAYDGKDYLALNEDLRSWTAADTAAQISKRKCEAANVAEQRRAYLEGTCVEWLHRYLENGKEMLQRADPPKTHVTHHPVFDYEATLRCWALGFYPAEIILTWQRDGEDQTQDVELVETRPAGDGTFQKWAAVVVPSGEEQRYTCHVQHEGLPEPLMLRWKQSSLPTIPIMGIVAGLVVLAAVVTGAAVAAVLWRKKSSD

SEQ ID NO: 4089 - DNA, 1966 bp, Homo sapiens
atatagtaacatagtgtggtactttgtcttgaggagatgtcctggactcacacggaaacttagggctacggaatgaagacgccaaggatggtggtcatggcgccccgaaccctcttcctgctgctctcgggggccctgaccctgaccgagacctgggcgggctcccactccatgaggtatttcagcgccgccgtgtcccggcccggccgcggggagccccgcttcatcgccatgggctacgtggacgacacgcagttcgtgcggttcgacagcgactcggcgtgtccgaggatggagccgcgggcgccgtgggtggagcaggaggggccggagtattgggaagaggagacacggaacaccaaggcccacgcacagactgacagaatgaacctgcagaccctgcgcggctactacaaccagagcgaggccagtgagtaactccggcccagggagcagatcacgacccccacctccatgccccacggacggcccgggtactcccgagtctccgggtctgggatccaccccgaggccgcgggacccgcccagaccctctacctgggagaaccccaaggcgcctttaccaaaatccccgcgggtgggtccgggcgagggcgaggctcggtgggcggggctgaccgagggggtggggccaggttctcacaccctccagtggatgattggctgcgacctggggtccgacggacgcctcctccgcgggtatgaacagtatgcctacgatggcaaggattacctcgccctgaacgaggacctgcgctcctggaccgcagcggacactgcggctcagatctccaagcgcaagtgtgaggcggccaatgtggctgaacaaaggagagcctacctggagggcacgtgcgtggagtggctccacagatacctggagaacgggaaggagatgctgcagcgcgcggacccccccaagacacacgtgacccaccaccctgtctttgactatgaggccaccctgaggtgctgggccctgggcttctaccctgcggagatcatactgacctggcagcgggatggggaggaccagacccaggacgtggagctcgtggagaccaggcctgcaggggatggaaccttccagaagtgggcagctgtggtggtgccttctggagaggagcagagatacacgtgccatgtgcagcatgaggggctgccggagcccctcatgctgagatggaagcagtcttccctgcccaccatccccatcatgggtatcgttgctggcctggttgtccttgcagctgtagtcactggagctgcggtcgctgctgtgctgtggagaaagaagagctcagattgaaaaggagggagctactctcaggctgcaagtaagtatgaaggaggctgatccctgagatccttgggatcttgtgtttgggagcccatgggggagctcacccaccccacaattcctcctctggccacatctcctgtggtctctgaccaggtgctgtttttgttctactctaggcagtgacagtgcccagggctctaatgtgtctctcacggcttgtaaatgtgacaccccggggggcctgatgtgtgtgggttgttgaggggaacaggggacatagctgtgctatgaggtttctttgacttcaatgtattgagcatgtgatgggctgtttaaagtgtcacccctcactgtgactgatatgaatttgttcatgaatatttttctgtagtgtgaaacagctgccctgtgtgggactgagtggcaagtccctttgtgacttcaagaaccctgactcctctttgtgcagagaccagcccacccctgtgcccaccatgaccctcttcctcatgctgaactgcattccttccccaatcacctttcctgttccagaaaaggggctgggatgtctccgtctctgtctcaaatttgtggtccactgagctataacttacttctgtattaaaattagaatctgagtat

SEQ ID NO: 4090 - protein, 217 aa, Homo sapiens
MIGCDLGSDGRLLRGYEQYAYDGKDYLALNEDLRSWTAADTAAQISKRKCEAANVAEQRRAYLEGTCVEWLHRYLENGKEMLQRADPPKTHVTHHPVFDYEATLRCWALGFYPAEIILTWQRDGEDQTQDVELVETRPAGDGTFQKWAAVVVPSGEEQRYTCHVQHEGLPEPLMLRWKQSSLPTIPIMGIVAGLVVLAAVVTGAAVAAVLWRKKSSD

SEQ ID NO: 4091 - DNA, 1834 bp, Homo sapiens
cccattaggtgacaggtttttagagaagccaatcagcgtcgccgcggtcctggttctaaagtcctcgctcacccacccggactcattctccccagacgccaaggatggtggtcatggcgccccgaaccctcttcctgctgctctcgggggccctgaccctgaccgagacctgggcgggctcccactccatgaggtatttcagcgccgccgtgtcccggcccggccgcggggagccccgcttcatcgccatgggctacgtggacgacacgcagttcgtgcggttcgacagcgactcggcgtgtccgaggatggagccgcgggcgccgtgggtggagcaggaggggccggagtattgggaagaggagacacggaacaccaaggcccacgcacagactgacagaatgaacctgcagaccctgcgcggctactacaaccagagcgaggccagttctcacaccctccagtggatgattggctgcgacctggggtccgacggacgcctcctccgcgggtatgaacagtatgcctacgatggcaaggattacctcgccctgaacgaggacctgcgctcctggaccgcagcggacactgcggctcagatctccaagcgcaagtgtgaggcggccaatgtggctgaacaaaggagagcctacctggagggcacgtgcgtggagtggctccacagatacctggagaacgggaaggagatgctgcagcgcgcggacccccccaagacacacgtgacccaccaccctgtctttgactatgaggccaccctgaggtgctgggccctgggcttctaccctgcggagatcatactgacctggcagcgggatggggaggaccagacccaggacgtggagctcgtggagaccaggcctgcaggggatggaaccttccagaagtgggcagctgtggtggtgccttctggagaggagcagagatacacgtgccatgtgcagcatgaggggctgccggagcccctcatgctgagatggaagcagtcttccctgcccaccatccccatcatgggtatcgttgctggcctggttgtccttgcagctgtagtcactggagctgcggtcgctgctgtgctgtggagaaagaagagctcagattgaaaaggagggagctactctcaggctgcaagtaagtatgaaggaggctgatccctgagatccttgggatcttgtgtttgggagcccatgggggagctcacccaccccacaattcctcctctggccacatctcctgtggtctctgaccaggtgctgtttttgttctactctaggcagtgacagtgcccagggctctaatgtgtctctcacggcttgtaaatgtgacaccccggggggcctgatgtgtgtgggttgttgaggggaacaggggacatagctgtgctatgaggtttctttgacttcaatgtattgagcatgtgatgggctgtttaaagtgtcacccctcactgtgactgatatgaatttgttcatgaatatttttctgtagtgtgaaacagctgccctgtgtgggactgagtggcaagtccctttgtgacttcaagaaccctgactcctctttgtgcagagaccagcccacccctgtgcccaccatgaccctcttcctcatgctgaactgcattccttccccaatcacctttcctgttccagaaaaggggctgggatgtctccgtctctgtctcaaatttgtggtccactgagctataacttacttctgtattaaaattagaatctgagtataaatttactttttcaaattatttccaagagagattgatgggttaattaaaggagaagattcctgaaatttgagagac

SEQ ID NO: 4092 - protein, 338 aa, Homo sapiens; identical to SEQ ID NO: 478

SEQ ID NO: 4093 - DNA, 1544 bp, Homo sapiens
attctccccagacgccaaggatggtggtcatggcgccccgaaccctcttcctgctgctctcgggggccctgaccctgaccgagacctgggcgggctcccactccatgaggtatttcagcgccgccgtgtcccggcccggccgcggggagccccgcttcatcgccatgggctacgtggacgacacgcagttcgtgcggttcgacagcgactcggcgtgtccgaggatggagccgcgggcgccgtgggtggagcaggaggggccggagtattgggaagaggagacacggaacaccaaggcccacgcacagactgacagaatgaacctgcagaccctgcgcggctactacaaccagagcgaggccagttctcacaccctccagtggatgattggctgcgacctggggtccgacggacgcctcctccgcgggtatgaacagtatgcctacgatggcaaggattacctcgccctgaacgaggacctgcgctcctggaccgcagcggacactgcggctcagatctccaagcgcaagtgtgaggcggccaatgtggctgaacaaaggagagcctacctggagggcacgtgcgtggagtggctccacagatacctggagaacgggaaggagatgctgcagcgcgcggacccccccaagacacacgtgacccaccaccctgtctttgactatgaggccaccctgaggtgctgggccctgggcttctaccctgcggagatcatactgacctggcagcgggatggggaggaccagacccaggacgtggagctcgtggagaccaggcctgcaggggatggaaccttccagaagtgggcagctgtggtggtgccttctggagaggagcagagatacacgtgccatgtgcagcatgaggggctgccggagcccctcatgctgagatggagtaaggagggagatggaggcatcatgtctgttagggaaagcaggagcctctctgaagacctttaacagggtcggtggtgagggctgggggtcagagaccctcaccttcacctcctttcccagagcagtcttccctgcccaccatccccatcatgggtatcgttgctggcctggttgtccttgcagctgtagtcactggagctgcggtcgctgctgtgctgtggagaaagaagagctcagattgaaaaggagggagctactctcaggctgcaatgtgaaacagctgccctgtgtgggactgagtggcaagtccctttgtgacttcaagaaccctgactcctctttgtgcagagaccagcccacccctgtgcccaccatgaccctcttcctcatgctgaactgcattccttccccaatcacctttcctgttccagaaaaggggctgggatgtctccgtctctgtctcaaatttgtggtccactgagctataacttacttctgtattaaaattagaatctgagtataaatttactttttcaaattatttccaagagagattgatgggttaattaaaggagaagattcctgaaatttgagagacaaaataaatggaagacatgagaactttcc

SEQ ID NO: 4094 - protein, 319 aa, Homo sapiens
MVVMAPRTLFLLLSGALTLTETWAGSHSMRYFSAAVSRPGRGEPRFIAMGYVDDTQFVRFDSDSACPRMEPRAPWVEQEGPEYWEEETRNTKAHAQTDRMNLQTLRGYYNQSEASSHTLQWMIGCDLGSDGRLLRGYEQYAYDGKDYLALNEDLRSWTAADTAAQISKRKCEAANVAEQRRAYLEGTCVEWLHRYLENGKEMLQRADPPKTHVTHHPVFDYEATLRCWALGFYPAEIILTWQRDGEDQTQDVELVETRPAGDGTFQKWAAVVVPSGEEQRYTCHVQHEGLPEPLMLRWSKEGDGGIMSVRESRSLSEDL

SEQ ID NO: 4095 - DNA, 875 bp, Homo sapiens
attctccccagacgccaaggatggtggtcatggcgccccgaaccctcttcctgctgctctcgggggccctgaccctgaccgagacctgggcgggctcccactccatgaggtatttcagcgccgccgtgtcccggcccggccgcggggagccccgcttcatcgccatgggctacgtggacgacacgcagttcgtgcggttcgacagcgactcggcgtgtccgaggatggagccgcgggcgccgtgggtggagcaggaggggccggagtattgggaagaggagacacggaacaccaaggcccacgcacagactgacagaatgaacctgcagaccctgcgcggctactacaaccagagcgaggccagttctcacaccctccagtggatgattggctgcgacctggggtccgacggacgcctcctccgcgggtatgaacagtatgcctacgatggcaaggattacctcgccctgaacgaggacctgcgctcctggaccgcagcggacactgcggctcagatctccaagcgcaagtgtgaggcggccaatgtggctgaacaaaggagagcctacctggagggcacgtgcgtggagtggctccacagatacctggagaacgggaaggagatgctgcagcgcgcggacccccccaagacacacgtgacccaccaccctgtctttgactatgaggccaccctgaggtgctgggccctgggcttctaccctgcggagatcatactgacctggcagcgggatggggaggaccagacccaggacgtggagctcgtggagaccaggcctgcaggggatggaaccttccagaagtgggcagctgtggtggtgccttctggagaggaacagagatacccgtgccatgtg

SEQ ID NO: 4096 - protein, 284 aa, Homo sapiens
MVVMAPRTLFLLLSGALTLTETWAGSHSMRYFSAAVSRPGRGEPRFIAMGYVDDTQFVRFDSDSACPRMEPRAPWVEQEGPEYWEEETRNTKAHAQTDRMNLQTLRGYYNQSEASSHTLQWMIGCDLGSDGRLLRGYEQYAYDGKDYLALNEDLRSWTAADTAAQISKRKCEAANVAEQRRAYLEGTCVEWLHRYLENGKEMLQRADPPKTHVTHHPVFDYEATLRCWALGFYPAEIILTWQRDGEDQTQDVELVETRPAGDGTFQKWAAVVVPSGEEQRYPCH

SEQ ID NO: 4097 - DNA, 1411 bp, Homo sapiens
acgccaaggatggtggtcatggcgccccgaaccctcttcctgctgctctcgggggccctgaccctgaccgagacctgggcgggctcccactccatgaggtatttcagcgccgccgtgtcccggcccggccgcggggagccccgcttcatcgccatgggctacgtggacgacacgcagttcgtgcggttcgacagcgactcggcgtgtccgaggatggagccgcgggcgccgtgggtggagcaggaggggccggagtattgggaagaggagacacggaacaccaaggcccacgcacagactgacagaatgaacctgcagaccctgcgcggctactacaaccagagcgaggccagttctcacaccctccagtggatgattggctgcgacctggggtccgacggacgcctcctccgcgggtatgaacagtatgcctacgatggcaaggattacctcgccctgaacgaggacctgcgctcctggaccgcagcggacactgcggctcagatctccaagcgcaagtgtgaggcggccaatgtggctgaacaaaggagagcctacctggagggcacgtgcgtggagtggctccacagatacctggagaacgggaaggagatgctgcagcgcgcggacccccccaagacacacgtgacccaccaccctgtctttgactatgaggccaccctgaggtgctgggccctgggcttctaccctgcggagatcatactgacctggcagcgggatggggaggaccagacccaggacgtggagctcgtggagaccaggcctgcaggggatggaaccttccagaagtgggcagctgtggtggtgccttctggagaggagcagagatacacgtgccatgtgcagcatgaggggctgccggagcccctcatgctgagatggaagcagtcttccctgcccaccatccccatcatgggtatcgttgctggcctggttgtccttgcagctgtagtcactggagctgcggtcgctgctgtgctgtggagaaagaagagctcagattgaaaaggagggagctactctcaggctgcaatgtgaaacagctgccctgtgtgggactgagtggcaagtccctttgtgacttcaagaaccctgactcctctttgtgcagagaccagcccacccctgtgcccaccatgaccctcttcctcatgctgaactgcattccttccccaatcacctttcctgttccagaaaaggggctgggatgtctccgtctctgtctcaaatttgtggtccactgagctataacttacttctgtattaaaattagaatctgagtataaatttactttttcaaattatttccaagagagattgatgggttaattaaaggagaagattcctgaaatttgagagacaaaataaatggaagacatgagaactttcc

SEQ ID NO: 4098 - protein, 338 aa, Homo sapiens; identical to SEQ ID NO: 478

SEQ ID NO: 4099 - DNA, 850 bp, Homo sapiens
atggtggtcatggcgccccgaaccctcttcctgctgctctcgggggccctgaccctgaccgagacctgggcgggctcccactccatgaggtatttcagcgccgccgtgtcccggcccggccgcggggagccccgcttcatcgccatgggctacgtggacgacacgcagttcgtgcggttcgacagcgactcggcgtgtccgaggatggagccgcgggcgccgtgggtggagcaggaggggccggagtattgggaagaggagacacggaacaccaaggcccacgcacagactgacagaatgaacctgcagaccctgcgcggctactacaaccagagcgaggccaagcagtcttccctgcccaccatccccatcatgggtatcgttgctggcctggttgtccttgcagctgtagtcactggagctgcggtcgctgctgtgctgtggagaaagaagagctcagattgaaaaggagggagctactctcaggctgcaatgtgaaacagctgccctgtgtgggactgagtggcaagtccctttgtgacttcaagaaccctgactcctctttgtgcagagaccagcccacccctgtgcccaccatgaccctcttcctcatgctgaactgcattccttccccaatcacctttcctgttccagaaaaggggctgggatgtctccgtctctgtctcaaatttgtggtccactgagctataacttacttctgtattaaaattagaatctgagtataaatttactttttcaaattatttccaagagagattgatgggttaattaaaggagaagattcctgaaatttgagagacaaaataaatggaagacatgagaactttcc

SEQ ID NO: 4100 - protein, 154 aa, Homo sapiens
MVVMAPRTLFLLLSGALTLTETWAGSHSMRYFSAAVSRPGRGEPRFIAMGYVDDTQFVRFDSDSACPRMEPRAPWVEQEGPEYWEEETRNTKAHAQTDRMNLQTLRGYYNQSEAKQSSLPTIPIMGIVAGLVVLAAVVTGAAVAAVLWRKKSSD

SEQ ID NO: 4101 - DNA, 904 bp, Homo sapiens
atggtggtcatggcgccccgaaccctcttcctgctgctctcgggggccctgaccctgaccgagacctgggcgggctcccactccatgaggtatttcagcgccgccgtgtcccggcccggccgcggggagccccgcttcatcgccatgggctacgtggacgacacgcagttcgtgcggttcgacagcgactcggcgtgtccgaggatggagccgcgggcgccgtgggtggagcaggaggggccggagtattgggaagaggagacacggaacaccaaggcccacgcacagactgacagaatgaacctgcagaccctgcgcggctactacaaccagagcgaggccaacccccccaagacacacgtgacccaccaccctgtctttgactatgaggccaccctgaggtgctgggccctgggcttctaccctgcggagatcatactgacctggcagcgggatggggaggaccagacccaggacgtggagctcgtggagaccaggcctgcaggggatggaaccttccagaagtgggcagctgtggtggtgccttctggagaggagcagagatacacgtgccatgtgcagcatgaggggctgccggagcccctcatgctgagatggaagcagtcttccctgcccaccatccccatcatgggtatcgttgctggcctggttgtccttgcagctgtagtcactggagctgcggtcgctgctgtgctgtggagaaagaagagctcagattgaaaaggagggagctactctcaggctgcaagcagtgacagtgcccagggctctaatgtgtctctcacggcttgtaaattgtgaaacagctgccctgtgtgggactgagtggcaagtccctttgtgacttcaagaaccctgactcctctttgtgcagagaccagcc

SEQ ID NO: 4102 - protein, 246 aa, Homo sapiens
MVVMAPRTLFLLLSGALTLTETWAGSHSMRYFSAAVSRPGRGEPRFIAMGYVDDTQFVRFDSDSACPRMEPRAPWVEQEGPEYWEEETRNTKAHAQTDRMNLQTLRGYYNQSEANPPKTHVTHHPVFDYEATLRCWALGFYPAEIILTWQRDGEDQTQDVELVETRPAGDGTFQKWAAVVVPSGEEQRYTCHVQHEGLPEPLMLRWKQSSLPTIPIMGIVAGLVVLAAVVTGAAVAAVLWRKKSSD

SEQ ID NO: 4103 - DNA, 1020 bp, Homo sapiens
atggtggtcatggcgccccgaaccctcttcctgctgctctcgggggccctgaccctgaccgagacctgggcgggctcccactccatgaggtatttcagcgccgccgtgtcccggcccggccgcggggagccccgcttcatcgccatgggctacgtggacgacacgcagttcgtgcggttcgacagcgactcggcgtgtccgaggatggagccgcgggcgccgtgggtggagcaggaggggccggagtattgggaagaggagacacggaacaccaaggcccacgcacagactgacagaatgaacctgcagaccctgcgcggctactacaaccagagcgaggccaacccccccaagacacacgtgacccaccaccctgtctttgactatgaggccaccctgaggtgctgggccctgggcttctaccctgcggagatcatactgacctggcagcgggatggggaggaccagacccaggacgtggagctcgtggagaccaggcctgcaggggatggaaccttccagaagtgggcagctgtggtggtgccttctggagaggagcagagatacacgtgccatgtgcagcatgaggggctgccggagcccctcatgctgagatggaagcagtcttccctgcccaccatccccatcatgggtatcgttgctggcctggttgtccttgcagctgtagtcactggagctgcggtcgctgctgtgctgtggagaaagaagagctcagattgaaaaggagggagctactctcaggctgcaatgtgaaacagctgccctgtgtgggactgagtggcaagtccctttgtgacttcaagaaccctgactcctctttgtgcagagaccagcccacccctgtgcccaccatgaccctcttcctcatgctgaactgcattccttccccaatcacctttcctgttccagaaaaggggctgggatgtctccgtctctgtctcaaatttgtggtccactgagctataacttacttctgtattaaaattagaatctgagtat

SEQ ID NO: 4104 - protein, 246 aa, Homo sapiens; identical to SEQ ID NO: 4102

SEQ ID NO: 4105 - DNA, 1126 bp, Homo sapiens
atggtggtcatggcgccccgaaccctcttcctgctgctctcgggggccctgaccctgaccgagacctgggcgggctcccactccatgaggtatttcagcgccgccgtgtcccggcccggccgcggggagccccgcttcatcgccatgggctacgtggacgacacgcagttcgtgcggttcgacagcgactcggcgtgtccgaggatggagccgcgggcgccgtgggtggagcaggaggggccggagtattgggaagaggagacacggaacaccaaggcccacgcacagactgacagaatgaacctgcagaccctgcgcggctactacaaccagagcgaggccaacccccccaagacacacgtgacccaccaccctgtctttgactatgaggccaccctgaggtgctgggccctgggcttctaccctgcggagatcatactgacctggcagcgggatggggaggaccagacccaggacgtggagctcgtggagaccaggcctgcaggggatggaaccttccagaagtgggcagctgtggtggtgccttctggagaggagcagagatacacgtgccatgtgcagcatgaggggctgccggagcccctcatgctgagatggaagcagtcttccctgcccaccatccccatcatgggtatcgttgctggcctggttgtccttgcagctgtagtcactggagctgcggtcgctgctgtgctgtggagaaagaagagctcagattgaaaaggagggagctactctcaggctgcaatgtgaaacagctgccctgtgtgggactgagtggcaagtccctttgtgacttcaagaaccctgactcctctttgtgcagagaccagcccacccctgtgcccaccatgaccctcttcctcatgctgaactgcattccttccccaatcacctttcctgttccagaaaaggggctgggatgtctccgtctctgtctcaaatttgtggtccactgagctataacttacttctgtattaaaattagaatctgagtataaatttactttttcaaattatttccaagagagattgatgggttaattaaaggagaagattcctgaaatttgagagacaaaataaatggaagacatgagaactttcc

SEQ ID NO: 4106 - protein, 246 aa, Homo sapiens; identical to SEQ ID NO: 4102

SEQ ID NO: 4107 - DNA, 1072 bp, Homo sapiens
ggggtggggccaggttctcacaccctccagtggatgattggctgcgacctggggtccgacggacgcctcctccgcgggtatgaacagtatgcctacgatggcaaggattacctcgccctgaacgaggacctgcgctcctggaccgcagcggacactgcggctcagatctccaagcgcaagtgtgaggcggccaatgtggctgaacaaaggagagcctacctggagggcacgtgcgtggagtggctccacagatacctggagaacgggaaggagatgctgcagcgcgcggacccccccaagacacacgtgacccaccaccctgtctttgactatgaggccaccctgaggtgctgggccctgggcttctaccctgcggagatcatactgacctggcagcgggatggggaggaccagacccaggacgtggagctcgtggagaccaggcctgcaggggatggaaccttccagaagtgggcagctgtggtggtgccttctggagaggagcagagatacacgtgccatgtgcagcatgaggggctgccggagcccctcatgctgagatggaagcagtcttccctgcccaccatccccatcatgggtatcgttgctggcctggttgtccttgcagctgtagtcactggagctgcggtcgctgctgtgctgtggagaaagaagagctcagattgaaaaggagggagctactctcaggctgcaatgtgaaacagctgccctgtgtgggactgagtggcaagtccctttgtgacttcaagaaccctgactcctctttgtgcagagaccagcccacccctgtgcccaccatgaccctcttcctcatgctgaactgcattccttccccaatcacctttcctgttccagaaaaggggctgggatgtctccgtctctgtctcaaatttgtggtccactgagctataacttacttctgtattaaaattagaatctgagtataaatttactttttcaaattatttccaagagagattgatgggttaattaaaggagaagattcctgaaatttgagagacaaaataaatggaagacatgagaactttcc

SEQ ID NO: 4108 - protein, 217 aa, Homo sapiens; identical to SEQ ID NO: 4090

SEQ ID NO: 4109 - DNA, 2296 bp, Homo sapiens
ccttgatactcacgaagcggacacagttctcattcccactaggtgtcgggtttctagagaagccaatcggtgccgccgcggtcccggttctaaagtccccacgcacccaccgggactcagattctccccagacgccgaggatggtgctcatggcgccccgaaccctcctcctgctgctctcaggggccctggccctgaccctgacccagacctgggcgccgacgacgcgagtccgagagaggagccgcgggcgccgtggatggagcgggaggggccagagtattgggaccggaacacacagatctgcaaggcccaggcacagactgaacgagagaacctgcggatcgcgctccgctactacaaccagagcgagggcggttctcacaccatgcaggtgatgtatggctgcgacgtggggcccgacgggcgcttcctccgcgggtatgaacagcacgcctacgacggcaaggattacatcgccctgaacgaggacctgcgctcctggaccgcggcggacatggcagctcagatcaccaagcgcaagtgggaggcggcccgtcgggcggagcagctgagagcctacctggagggcgagttcgtggagtggctccgcagatacctggagaacgggaaggagacgctgcagcgcgcgggtaccaggggccacagggcgcctcccggatcgcctgtagatctccggggctggcctcccacaagaaagggagacaaatgggaccaacactataatatcgccctccctctggtcttgagggagaagaatcctcctgggtttccagagagtgactctgagggtccgccctgctctctgacacaattaagggatgaaatctgtgaggaaatgaagggaagacaatccctggaatactgatgagtggttccctttgacactggcagcagccttgggccccgtgacttttcctctcaggccttgttctctgcttcacactcaatgtgcgtgggggtctgagtccagctcttctgagtccctcagcctccactcaggtcaggaccagaagtcgctgttccctcttcagggactagaattttccacggaataggagattatcccaggtgcctgtgtccaggctgttgtctgggttctgtgctcccttccccaccccaggcatcctgtccattctcaagatggccacatgcgtgctggaggagtgtcccatgacagatgcaaaatgcctgaattttctgactcttcccgtcagaccccccccaagacacatatgacccaccaccccatctctgaccatgaggccaccctgaggtgctgggccctgggcttctaccctgcggagatcacactgacctggcagcgggatggggaggaccagacccaggacacggagctcgtggagaccaggcctgcaggggatggaaccttccagaagtgggcggctgtggtggtgccttctggagaggagcagagatacacctgccatgtgcagcatgagggtctgcccgagcccctcaccctgagatgggagccatcttcccagcccaacgtccccatcgtgggcatcgttgctggcctggttctacttgtagctgtggtcactggagctgtggtcgctgctgtaatgtggaggaagaagagctcagatagaaaaggagggagctactctcaggctgcaagcagcaacagtgcccagggctctgatgtgtctctcacggcttgaaaggtgagaccttggggggcctgatgtgtgggggatgttgggggggaacagtggacacagctgtgctatggggttctttgaatttgatgttttgagcatgcgatgggctgccaaagtgtcatccattactgggacagatatgaatttgttcatgaatattttttctatagtgtgagacagctgccttgtgtgggactgagaggcaagagttgttcctgccttccctttgtgacttgaagaaccctgactttctttctacaaaggcacctgaatgtgtctgtgttcctgtaggcataatgtgtggaggaggggagaccaacccaccctcatgtccaccatgaccctcttccccacgctgatctgtgttccctccccaatcatctttcctgttccagagaggaggggctgagatgtctccatctttttctcaactttatgtgcactgagctgtaacttcttacttccctcttaaaattagaatctgagtaaacatttactttttcaaattcttgccatgagaggttgatgacttaattaaaggagaagattcctaaaatttgagagacaaaataaatggaacacatgag

SEQ ID NO: 4110 - protein, 209 aa, Homo sapiens
MEREGPEYWDRNTQICKAQAQTERENLRIALRYYNQSEGGSHTMQVMYGCDVGPDGRFLRGYEQHAYDGKDYIALNEDLRSWTAADMAAQITKRKWEAARRAEQLRAYLEGEFVEWLRRYLENGKETLQRAGTRGHRAPPGSPVDLRGWPPTRKGDKWDQHYNIALPLVLREKNPPGFPESDSEGPPCSLTQLRDEICEEMKGRQSLEY

SEQ ID NO: 4111 - DNA, 1518 bp, Homo sapiens
atggtgctcatggcgccccgaaccctcctcctgctgctctcaggggccctggccctgaccctgacccagacctgggcgctcccactccatgaggtatttctacaccaccatgtcccggcccggccgcggggagccccgcttcatctccgtcggctacgtggacgatacgcagttcgtgcggttcgacagcgacgacgcgagtccgagagaggagccgcgggcgccgtggatggagcgggaggggccagagtattgggaccggaacacacagatctgcaaggcccaggcacagactgaacgagagaacctgcggatcgcgctccgctactacaaccagagcgagggcggttctcacaccatgcaggtgatgtatggctgcgacgtggggcccgacgggcgcttcctccgcgggtatgaacagcacgcctacgacggcaaggattacatcgccctgaacgaggacctgcgctcctggaccgcggcggacatggcagctcagatcaccaagcgcaagtgggaggcggcccgtcgggcggagcagctgagagcctacctggagggcgagttcgtggagtggctccgcagatacctggagaacgggaaggagacgctgcagcgcgcggaccccccccaagacacatatgacccaccaccccatctctgaccatgaggccaccctgaggtgctgggccctgggcttctaccctgcggagatcacactgacctggcagcgggatggggaggaccagacccaggacacggagctcgtggagaccaggcctgcaggggatggaaccttccagaagtgggcggctgtggtggtgccttctggagaggagcagagatacacctgccatgtgcagcatgagggtctgcccgagcccctcaccctgagatgggagccatcttcccagcccaacgtccccatcgtgggcatcgttgctggcctggttctacttgtagctgtggtcactggagctgtggtcgctgctgtaatgtggaggaagaagagctcagatagaaaaggagggagctactctcaggctgcaagcagcaacagtgcccagggctctgatgtgtctctcacggcttgaaagtgtgagacagctgccttgtgtgggactgagaggcaagagttgttcctgccttccctttgtgacttgaagaaccctgactttctttctacaaaggcacctgaatgtgtctgtgttcctgtaggcataatgtgtggaggaggggagaccaacccaccctcatgtccaccatgaccctcttccccacgctgatctgtgttccctccccaatcatctttcctgttccagagaggaggggctgagatgtctccatctttttctcaactttatgtgcactgagctgtaacttcttacttccctcttaaaattagaatctgagtaaacatttactttttcaaattcttgccatgagaggttgatgacttaattaaaggagaagattcctaaaatttgagagacaaaataaatggaacacatgagaacc

SEQ ID NO: 4112 - protein, 191 aa, Homo sapiens
MRYFYTTMSRPGRGEPRFISVGYVDDTQFVRFDSDDASPREEPRAPWMEREGPEYWDRNTQICKAQAQTERENLRIALRYYNQSEGGSHTMQVMYGCDVGPDGRFLRGYEQHAYDGKDYIALNEDLRSWTAADMAAQITKRKWEAARRAEQLRAYLEGEFVEWLRRYLENGKETLQRADPPQDTYDPPPHL

SEQ ID NO: 4113 - DNA, 322 bp, Homo sapiens
gagaacctgcggatcgcgctccgctactacaaccagagcgagggcggttctcacaccatgcaggtgatgtatggctgcgacgtggggcccgacgggcgcttcctccgcgggtatgaacagcacgcctacgacggcaaggattacatcgccctgaacgaggacctgcgctcctggaccgcggcggacatggcagctcagatcaccaagcgcaagtgggaggcggcccgtcgggcggagcagctgagagcctacctggagggcgagttcgtggagtggctccgcagatacctggagaacgggaaggagacgctgcagcgcgcgg

SEQ ID NO: 4114 - protein, 87 aa, Homo sapiens
MQVMYGCDVGPDGRFLRGYEQHAYDGKDYIALNEDLRSWTAADMAAQITKRKWEAARRAEQLRAYLEGEFVEWLRRYLENGKETLQR

SEQ ID NO: 4115 - DNA, 907 bp, Homo sapiens
cccccccaagacacatatgacccaccaccccatctctgaccatgaggccaccctgaggtgctgggccctgggcttctaccctgcggagatcacactgacctggcagcgggatggggaggaccagacccaggacacggagctcgtggagaccaggcctgcaggggatggaaccttccagaagtgggcggctgtggtggtgccttctggagaggagcagagatacacctgccatgtgcagcatgagggtctgcccgagcccctcaccctgagatgggagccatcttcccagcccaacgtccccatcgtgggcatcgttgctggcctggttctacttgtagctgtggtcactggagctgtggtcgctgctgtaatgtggaggaagaagagctcagatagaaaaggagggagctactctcaggctgcaagcagtgacagtgcccagggctctgatgtgtccctcacagcttgtaaagtgtgagacagctgccttgtgtgggactgagaggcaagagttgttcctgcccttccctttgtgacttgaagaaccctgactttgtttctgcaaaggcacctgcatgtgtctgtgttcgtgtaggcataatgtgaggaggtggggagaccaccccacccccatgtccaccatgaccctcttcccacgctgacctgtgctccctccccaatcatctttcctgttccagagaggtggggctgaggtgtctccatctctgtctcaacttcatggtgcactgagctgtaacttcttccttccctattaaaattagaaccttagtataaatttactttctcaaattcttgccatgagaggttgatgagttaattaaaggagaagattcctaaaatttgagagacaaaataaatggaagacatgagaaccttccagagtcca

SEQ ID NO: 4116 - protein, 153 aa, Homo sapiens
MTHHPISDHEATLRCWALGFYPAEITLTWQRDGEDQTQDTELVETRPAGDGTFQKWAAVVVPSGEEQRYTCHVQHEGLPEPLTLRWEPSSQPNVPIVGIVAGLVLLVAVVTGAVVAAVMWRKKSSDRKGGSYSQAASSDSAQGSDVSLTACKV

SEQ ID NO: 4117 - DNA, 3616 bp, Homo sapiens
ctttggctggctagggaggggatgcaatgatataaacatttatcccctgatacctcatgttaaaatctgatgcccactgtgggacgtggggcctaatggccaccatttgggtcatggtgaccaatcttttatgaatagagagatactgccctctcttgggaatgaatgaattgttgctttattattttccaagagagctagttgttaaaaagaccctggcaacttcctactctctctgttcctctgttaccatgtgttctctgcatataccagctcacctttgtcttctgccatgagtggaagcagcctgaggccctcactaaatgcgcaaacatttccagacatcagaatcttgagccacatgaaccttgtttatataaattagtcagtctcagacatttctttatagcaacacaaaatggaaaaagataacactcgcatcacaggtatgtgtctctggcagctagccaccgttcttaagatatccaggatccactcagccaagagtcttctcatcagtactctaaagacacttatcactcaagagagtctaaggtttttaggagaaaccagggacaaagtctaaatgtttttgtgataactcagattgcccacttttctttgaccacatatcttttacaggaaaaaggattgtaacagtaaagaggtattggcatattatcagagtctcatccattcattcaaaattaggccagtttatcatcctcttgtatgaatatgtctcccagaatgaaatcactcagctttgctgacaacactcaatcttaccaggttccaaaaacaagaatggtctcagggacatacagcttcactcttttaggcatccagtataattgacctaagtgacaatatcttctcttgctcacaccacctttgaggagttaagctaatattgaatttttctcattatataaccctttgatttattcacttgccctcagccactattcctccctctgtccctttatatcagttgtttccaggtttgggagtgacattaggtttgtctgctgggctggcctagactgcaggcagcaatagtattctagcatgtcttccctcagtctagtcttgatcatagagggtaggttatataggtaaggaactagtgggggctatcaagaccaccaggctatataactctacttactgttaatcctaacttttccagatgaaatgaatacttgagaattcttacataaaggtataaaaatatagttatggtttttggcttagggataattcctgtttctggcacttttatttacatccctattcctggtactatggcataacatatgaaaaaataaatttgaggtgaagtgtagtctttattccagcatcctctcctcttcagaagaattgtatgtatcgtcataacagcatcgtcctgatccatcaggtaaaagagaggatgctacctagtggagttattcttgcagccccactcatgttgacagcgagcacattcatgaagatataaaagccagtccttcatgtttatattgcccaacaattagattggcagtttttagacaaacaatgtttcaattgaccatttcaattttctatcaaattttcccctgaggaggacatgtccctctgcattgttggccatttgaggctgtaaagtgtgttttcttgtgtaaagaagtgtgactcggcagtccaaattggtgcaatctcttcttttctggttcttgtatagcccttgaagcattgacatctacccctggttgagcatagcccaatccagagtcagtgattttcctgtcaagatccattggcagctcctttggggttgctggcatcattctggcttgccaggtattatgatcaaagccttcccactagagaatctgtcacatctccatctgctgcctctgtctgttttcttgaccaacagtgaaaaaagagattatgagaaataagataaattaccaaaattgtgaacaaaagagagattatcactaatgacccttaggaagttaaaaaacattataagtgaatactctgaaaaacctgaagccaataagttagaccacttggataaaaaggaccaattcgtgcagagatagaaattgccaaaactgacccaaattaactggaaaacctgaagagaactgtgaactaagtcagaaattgaaaaaccttctcaaaaagaaatgccaaagcccagatatcttcactggtgaattctatcaaatattttgaaagctctttcagacaagaagagaggagggaagactttccagcccatttacagaactggcattaccctcatatcaaagtcacagcaagactcacaggaaaagagtgccatacaccagtgtcaccaataaacataaatgaaaacatccttaacaaacattggcagataatacaaagccacataaaaaaggattacactccatgaccaatgggattcatcccaggaacatatggttggattaacatttgaaaatcagttcatggaatgcactgtattaatggaaaaaaagacataattatctcaaaagatgcaggagaaacagttgacaaaaatgttaacatcactcatgttcataagtttcaacaaaataggaatggaggagaccttcttcactctgataaagggcgtctataaaaaacccacagctaaaatcaaacttaatgaagaaagactgaagactgaatgcttttctcctaagatggggatcaatgcaaggatgtccaatcccaccacttttatttaatattatactggagattgtagccagtgcaataaggcagaaaattaaaaattaaaggcatccagataaaaaggaaaacatacaattctattcacagataacatgaccctgtctgtagaattcacaagcagataaaaactggctagcactaataaatgaatccagaagggcccataggatatcaaatcaatataaaaattaattattaacatatttctctatagaagcaatgaaaatctcaactttcctatcacagtagttaccagaagagcgaaataggaataaatttaggaagacagcagtgtttgttcactgaaaataaaaaaacattcctcagagaaattaaaggtctaaataaatggagagatgcgagttggaaagctcgataatactgttaagatggcagttctcccccagtagatctataggttcaacacaatccctatcaaaatcccagcagggattttatagaaaattgacaaaataggccgggcgcggtggctcatgccggtaatcccagcactttgggaggctgaggcgggcggatcatgagatcaggagatccagaccatcctggctaacacggtgaaaccccgtctctactaaaaatacaaaaaattagccgggcgtggtggcaggctcctcgggaggctgaggcagaaaaatggcatgaacccggtaggcagaagttgcagtgagcggagatcgtgccactgcactccagcctgggtgacagagcgagactccgtctcaaaaaaaaaaaaaaaaaaaaagaaaagaaaaaaagaaaagaaaattgacaaaataatcctaaaaatgtatatgaaaatgcagaggatgcagaagggccaacacaaatttgg

SEQ ID NO: 4118 - protein, 71 aa, Homo sapiens [sequence omitted]

SEQ ID NO: 4119 - DNA, 2368 bp, Homo sapiens
ccgtgcgctgcagcgtctccttcccgttctccaggtatctgcggagccactccacgcacgtgccatccaggtaggctctcaactgctccgcctcatgggccgcctcccacttgcgcttggtgatctgagccgccatgtccgccgcggtccaagagcgcaggtcctcgttcagggcgatgtaatccttgccgtcgtaggcgtcctgccggtacccgcggaggaagcgcccgtccgaccccacgtcgcagccatacattatctggatggtgtgagaacctggccccgaccccgcgcagaaaccacagctccagtgactacagctccaaggagaaccaggccagcaacgatacccacgatggggatggtgggctgagaagactgctctgggaaaaaaggggaagaaggcaccaccacagctgcccacttctggaaggttccatcccctgcaggcctggtctctagaagctccatgtcccgagtctggtcctctccatcctgctgccaggatctggaaacccaggaggattcctctccctcaggaccagagagaggacgacattctagtgttggtcccattttccttctctctttgtgggaagccagcccaggagatctacaggcgatcagggaggcgtcttgtgttccctggtacccgtgagctgcagcgtctccttcccgttctccaggtgtctgcgagcctctccacgcacgtgccctccagtggtcctgctcctgtgagtcagagtgtgtcatttcctcacctaaaacactccagtggctccacctcggtcttgtgaagcttctagaatgtcaggcacaggcagcagatggagatgtgacagattctctagtgggaaggctttgatcataatacctggcaagccagaatgatgccagcaaccccaaaggagctgccaatggatcttgacaggaaaatcactgactctggattgggctatgctcaaccaggggtagatgtcaatgcttcaagggctatacaagaaccagaaaagaagagattgcaccaatttggactgccgagtcacacttctttacacaagaaaacacactttacagcctcaaatggccaacaatgcagagggacatgtcctcctcaggggaaaatttgatagaaaattgaaatggtcaattgaaacattgtttgtctaaaaactgccaatctaattgttgggcaatataaacatgaaggactggcttttatatcttcatgaatgtgctcgctgtcaacatgagtggggctgcaagaataactccactaggtagcatcctctcttttacctgatggatcaggacgatgctgttatgacgatacatacaattcttctgaagaggagaggatgctggaataaagactacacttcacctcaaatttattttttcatatgttatgccatagtaccaggaatagggatgtaaataaaagtgccagaaacaggaattatccctaagccaaaaaccataactatatttttatacctttatgtaagaattctcaagtattcatttcatctggaaaagttaggattaacagtaagtagagttatatagcctggtggtcttgatagcccccactagttccttacctatataacctaccctctatgatcaagactagactgagggaagacatgctagaatactattgctgcctgcagtctaggccagcccagcagacaaacctaatgtcactcccaaacctggaaacaactgatataaagggacagagggaggaatagtggctgagggcaagtgaataaatcaaagggttatataatgagaaaaattcaatattagcttaactcctcaaaggtggtgtgagcaagagaagatattgtcacttaggtcaattatactggatgcctaaaagagtgaagctgtatgtccctgagaccattcttgtttttggaacctggtaagattgagtgttgtcagcaaagctgagtgatttcattctgggagacatattcatacaagaggatgataaactggcctaattttgaatgaatggatgagactctgataatatgccaatacctctttactgttacaatcctttttcctgtaaaagatatgtggtcaaagaaaagtgggcaatctgagttatcacaaaaacatttagactttgtccctggtttctcctaaaaaccttagactctcttgagtgataagtgtctttagagtactgatgagaagactcttggctgagtggatcctggatatcttaagaacggtggctagctgccagagacacatacctgtgatgcgagtgttatctttttccattttgtgttgctataaagaaatgtctgagactgactaatttatataaacaaggttcatgtggctc

SEQ ID NO: 4120 - protein, 92 aa, Homo sapiens
MGRLPLALGDLSRHVRRGPRAQVLVQGDVILAVVGVLPVPAEEAPVRPHVAAIHYLDGVRTWPRPRAETTAPVTTAPRRTRPATIPTMGMVG

SEQ ID NO: 4121 - DNA, 2624 bp, Homo sapiens
caagtcgcagccatacattatctggagggtgttagaccctggccccgcccccgcggtcagccccgcccaccgagccccgcccccgccccgaccaacccgcggggattttggcctaaacggaaaatgaaacctggtaaaggcgcctgggcctctcccgggtcgaggatctggcgggtcccgcagcctcggggtggatcttggagccggagactcgcgggggggacccgggacgtccgtgggggatgaggaggggtcgtgaccttcgccccaggccggggtcattcaccggcctagctctggtggtagtagcggcgcggcatgggcaggttcactcttgtcagtctgtgcgcgggcctgatgttccgtgtgctccggtcccaatactccggtccctcctgctccaaccacggcgactgcggctacatcctcggagtcgccgcgtcgctgtcgaaccgcacgaactgcgtgtcgtccacgtagcccactgcgatgtaccggggctccccgcgacccggccgggacacggcggtgctgaaataccttatggagtgggtacctgggggcgaggaggggctgagacccgtccgaccctcctccttgcgctgctccccgggtcctgcgccccagtgcgcgggcccctacctcctccccgcagaggccatttccctccggatcccgcactcacccgcccaggtctcggtcagggccagggcccccaagagcagcaggaggagggttcgggacgccatgaccccatcctcggcgtctggggagaatctgagtcccaatgggttcgcggggacttctggaacagggaccccagcgacgccgattggcttcgctagaaacccgacaccaaatgggggtgagaactgagtccacatcctgagtgtccaggaagaaggaccctacataagttgggagagggagaagagaaactgcggagatggggaatccccaaccctgggcctccccaatcaatacatcgccttcggggcctgaaaccctgagagccacgcctggggccataggacttcgccctgaccccgctcctcctgtgccaagcgctctgtctcaatgtctccctgagtcttggcccaagagctgtctgagaaaccagggagaaaccctcgtcatgggccccgtccctcttcatttttcatcccggaatccccgtcccagaactggactccctgcctcccactccttacctatttccctgaactcttctagaaaaaaactcaccccagggagcttggtgacagagagggagctcgccgccagagagggagctcgccgccagagagggagctcgatgccagagagggagctcgccctgggaatggaggcgtagagacaggtttttgttttttttttctttaaatccggaaaagttgtgcctgagtacatgagacagcatagagacaagttttctctttgtttattaactacagtgggtagcagaatcttggcaacccctaaatgatcaggtatctaatcggtaaaaaaatgtaactttggccccttgatacataaatgtgtctgaaagcattacaacaggactcacaaagctactaagtttgactttcgcagacaatgtatctgtgactcccgcttgttttttacatttaccttcattccacagccctgagttactgggtgagtccaagacatctcctcaatataaagtagcacactgcgttactatatgttgcaaccgggagccagtacagactttattcacctcacagttgcaagtgttcaatgcagtcacaatgcccctcagcagtgctcatgtgctgcctgtttttaggaagtattcacgtctaagtggtgtgtatatcttataggaacacttagtatttttaaaacctgattaattaaaaaaaattagtttctaggcagtcccaaatatagtattaaaggccaactgcaaagaaggaacactaagtgttttttaaaccttattaacataaaaaacattagtttttaggcagtcctacattaggtattaaaggccaactgcaaagaacactgagcgaggctctgtagatggatgtaataaaaatctataaaacaatgtgtttaaacctaagaattctactgctttccaattccttccctctgctccttttcctaacctcctgcttctccagcccttccctctgtccctttcatccctcaggccctcctctccccttagtccccaccaccctgtcacttctaaattgtggctctagcattgtcccattacctgctacgtgactgttctctccacagtggtcctgctcctgtgagtcagagtgtgtcatttcctcacctaaaacactccagtggctccacctcggtcttgtgaagcttctagaatgtcaggcacgtgagcatatgagggcatacctggttcatcttaggcactaaatttttgttgactgaatgaatgaaatatgaatgtattaaattgcatcacagaaagttataaaatgtaaaacactgaaaaattaagaaatattttattttatgtaactagtgtgcatatcaattcattccgagtctgttgagcctgtgtatgaattttataagattgcataacaaattatcacaaacattgactttaaacaacaccc

SEQ ID NO: 4122 - protein, 200 aa, Homo sapiens
MRRGRDLRPRPGSFTGLALVVVAARHGQVHSCQSVRGPDVPCAPVPILRSLLLQPRRLRLHPRSRRVAVEPHELRVVHVAHCDVPGLPATRPGHGGAEIPYGVGTWGRGGAETRPTLLLALLPGSCAPVRGPLPPPRRGHFPPDPALTRPGLGQGQGPQEQQEEGSGRHDPILGVWGESESQWVRGDFWNRDPSDADWLR

SEQ ID NO: 4123 - DNA, 320 bp, Homo sapiens
gtctccctgagtcttggcccaagagctgtctgagaaaccagggagaaaccctcgtcatgggccccgtccctcttcatttttcatcccggaatccccgtcccagaactggactccctgcctcccactccttacctatttccctgaactcttctagaaaaaaactcaccccagggagcttggtgacagagagggagctcgccgccagagagggagctcgccgccagagagggagctcgatgcagtgggtagcagaatcttggcaacccctaaatgatcagtggtcctgctcctgtgagtcagagtgtgtcatttcctcacct

SEQ ID NO: 4124 - protein, 87 aa, Homo sapiens
MGPVPLHFSSRNPRPRTGLPASHSLPISLNSSRKKLTPGSLVTERELAAREGARRQRGSSMQWVAESWQPLNDQWSCSCESECVISS

SEQ ID NO: 4125 - DNA, 2516 bp, Homo sapiens
aggatgtggactcagttctcacccccatttggtgtcgggtttctagcgaagccaatcggcgtcgctggggtccctgttccagaagtccccgcgaacccattgggactcagattctccccagacgccgaggatggggtcatggcgtcccgaaccctcctcctgctgctcttgggggccctggccctgaccgagacctgggcgggtgagtgcgggatccggagggaaatggcctctgcggggaggaggtaggggcccgcgcactggggcgcaggacccggggagcagcgcaaggaggagggtcggacgggtctcagcccctcctcgcccccaggtacccactccataaggtatttcagcaccgccgtgtcccggccgggtcgcggggagccccggtacatcgcagtgggctacgtggacgacacgcagttcgtgcggttcgacagcgacgcggcgactccgaggatgtagccgcagtcgccgtggttggagcaggagggaccggagtattgggaccggagcacacggaacatcaggcccgcgcacagactgacaagagtgaacctgcccatgccgcgccgctactaccaccagagctaggccggtgaatgaccccggcctggggcgaaggtcacgacccctcctcatcccccacggacgtcccgggtcccccccgcgagtctccggctccaagatccaccccgaggctgcgggacccgccagatcctcgacccgggagaggcccaggcgcctttaccaggtttcattttccgtttaggccaaaatccccgcgggttggtcggggcgggggcggggctcggtgggcggggctgaccgcgggggcggggccagggtctaacaccctccagataatgtatggctgcgacttggggctggaagggcgcctcctccgcgggtatgaacagcacgccaacgatggcaaggattacatagcccggaactaggacctgcgctcctggaccgcggcggacatggcggctcagatcaccaagcgcaagtgggaggcagaagaatttgcagagcagatcagggcctacctggagggcacgtgcgtggagaggctcgcagacacctggagaacgggaaggagacgctgcagctcacgggtaccagggaacacaagacgcctccctgatcgcctgtagatctcctgggctggcttcccacaaagagagaaggaaaatgggaccaacactagaatgtcgtcctctctctggtcctgagggagaggaatcctcctgggtttccagatcctgtacaagagagtgactctgagggtctgccctgctctctgatacaattaagggatgaaatctctgaggaaatgaagggaagacaatccctggaatactgatgaggggttccctttgacaccagcagcagccttgggccccgttacttttcccctcaggccttgttctctgctttacactcaatgtgtgtgggggtctgagtccagctcttctgagtccctcagcctccactcaggtcaggaccagaagtcactgttccctcctcagggactggaattttccacggaattcggagattatcccagatacctgtgtccaggttggtgtctgggttctgtgctcccttccccaccccaggtgtcctgtccattctcaggatggccacatgcgtgctgctggagtgtctcatgagagatgcaaagtgcctgaattttctgacacttcctgttagacctctcccccagacacatatgatccaccattccgtctctgactataaggccaccctgaggtgctgggccctgggcttctaccctgtggagatcacactggcctggcagcaggatggagaggaccagactcgggacatggagcttctagagaccaggcctgcaggggatggaaccttccagaagtgggcagctgtggtggtgccttctggagaggaacagagatacccgtgccatgtgcagcatgaggggttgcccaagcccctcaccctgagatgggagcagtcttctcagcccaccatccccatcgtgggtatcgttgctggcctggttctccttggagctgtagtcactggagctgtggtttctgctgtgatgtgcaggaagaagaactcagatagagtgagctactctgaagctgcaagcagcgaccatgcgcagggttctgatgtgtctctcacggcttgtaaagtgtgagacagctgccttgtgtgggactgagaggcaagatttgttcacgccttccctttgtgacttcaaaaaccctgactctctttctgcaaaggcacctgaatgtgcctgtgttcctgtaggcataatatgaggaggtggggagaccaacccacccccatgtccaccatgaccctcttccctcatgctgacctgtgttccgtctccaataattaatcattcctgctccatagaggtgaggctgagatgtctccatctctgtctcaactttatgtgcactgagctgtaacttcttacttccctattaaaattagaatctgagtat

SEQ ID NO: 4126 - protein, 182 aa, Homo sapiens
MATCVLLECLMRDAKCLNFLTLPVRPLPQTHMIHHSVSDYKATLRCWALGFYPVEITLAWQQDGEDQTRDMELLETRPAGDGTFQKWAAVVVPSGEEQRYPCHVQHEGLPKPLTLRWEQSSQPTIPIVGIVAGLVLLGAVVTGAVVSAVMCRKKNSDRVSYSEAASSDHAQGSDVSLTACKV

SEQ ID NO: 4127 - DNA, 2630 bp, Homo sapiens
aggatgtggactcagttctcacccccatttggtgtcgggtttctagcgaagccaatcggcgtcgctggggtccctgttccagaagtccccgcgaacccattgggactcagattctccccagacgccgaggatggggtcatggcgtcccgaaccctcctcctgctgctcttgggggccctggccctgaccgagacctgggcgggtgagtgcgggatccggagggaaatggcctctgcggggaggaggtaggggcccgcgcactggggcgcaggacccggggagcagcgcaaggaggagggtcggacgggtctcagcccctcctcgcccccaggtacccactccataaggtatttcagcaccgccgtgtcccggccgggtcgcggggagccccggtacatcgcagtgggctacgtggacgacacgcagttcgtgcggttcgacagcgacgcggcgactccgaggatgtagccgcagtcgccgtggttggagcaggagggaccggagtattgggaccggagcacacggaacatcaggcccgcgcacagactgacaagagtgaacctgcccatgccgcgccgctactaccaccagagctaggccggtgaatgaccccggcctggggcgaaggtcacgacccctcctcatcccccacggacgtcccgggtcccccccgcgagtctccggctccaagatccaccccgaggctgcgggacccgccagatcctcgacccgggagaggcccaggcgcctttaccaggtttcattttccgtttaggccaaaatccccgcgggttggtcggggcgggggcggggctcggtgggcggggctgaccgcgggggcggggccagggtctaacaccctccagataatgtatggctgcgacttggggctggaagggcgcctcctccgcgggtatgaacagcacgccaacgatggcaaggattacatagcccggaactaggacctgcgctcctggaccgcggcggacatggcggctcagatcaccaagcgcaagtgggaggcagaagaatttgcagagcagatcagggcctacctggagggcacgtgcgtggagaggctcgcagacacctggagaacgggaaggagacgctgcagctcacgggtaccagggaacacaagacgcctccctgatcgcctgtagatctcctgggctggcttcccacaaagagagaaggaaaatgggaccaacactagaatgtcgtcctctctctggtcctgagggagaggaatcctcctgggtttccagatcctgtacaagagagtgactctgagggtctgccctgctctctgatacaattaagggatgaaatctctgaggaaatgaagggaagacaatccctggaatactgatgaggggttccctttgacaccagcagcagccttgggccccgttacttttcccctcaggccttgttctctgctttacactcaatgtgtgtgggggtctgagtccagctcttctgagtccctcagcctccactcaggtcaggaccagaagtcactgttccctcctcagggactggaattttccacggaattcggagattatcccagatacctgtgtccaggttggtgtctgggttctgtgctcccttccccaccccaggtgtcctgtccattctcaggatggccacatgcgtgctgctggagtgtctcatgagagatgcaaagtgcctgaattttctgacacttcctgttagacctctcccccagacacatatgatccaccattccgtctctgactataaggccaccctgaggtgctgggccctgggcttctaccctgtggagatcacactggcctggcagcaggatggagaggaccagactcgggacatggagcttctagagaccaggcctgcaggggatggaaccttccagaagtgggcagctgtggtggtgccttctggagaggaacagagatacccgtgccatgtgcagcatgaggggttgcccaagcccctcaccctgagatgggagcagtcttctcagcccaccatccccatcgtgggtatcgttgctggcctggttctccttggagctgtagtcactggagctgtggtttctgctgtgatgtgcaggaagaagaactcagatagagtgagctactctgaagctgcaagcagcgaccatgcgcagggttctgatgtgtctctcacggcttgtaaagtgtgagacagctgccttgtgtgggactgagaggcaagatttgttcacgccttccctttgtgacttcaaaaaccctgactctctttctgcaaaggcacctgaatgtgcctgtgttcctgtaggcataatatgaggaggtggggagaccaacccacccccatgtccaccatgaccctcttccctcatgctgacctgtgttccgtctccaataattaatcattcctgctccatagaggtgaggctgagatgtctccatctctgtctcaactttatgtgcactgagctgtaacttcttacttccctattaaaattagaatctgagtataaatttactttttcaaattcttgccatgagaggttgatgggttaattaaaggagaagattcctaaaatttgagagacaaaataaatggaagacatgagaaccttccagagtcca

SEQ ID NO: 4128 - protein, 182 aa, Homo sapiens; identical to SEQ ID NO: 4126

SEQ ID NO: 4129 - DNA, 2532 bp, Homo sapiens
cgcttcgcacaggagcagaggggtcagggcgaagtcccagggccccaggcgtggctctcagagtctcaggccccgaaggcggtgtatggattggggagtcccagccttggggattccccaactccgcagtttcttttctccctctcccaacctacgtagggtccttcatcctggatactcacgacgcggacccagttctcactcccattgggtgtcgggtttccagagaagccaatcagtgtcgtcgcggtcgctgttctaaagcccgcacgcacccaccgggactcagattctccccagacgccgaggatggccgtcatggcgccccgaaccctcctcctgctactctcgggggccctggccctgacccagacctgggcgggctcccactccatgaggtatttcttcacatccgtgtcccggcccggccgcggggagccccgcttcatcgccgtgggctacgtggacgacacgcagttcgtgcggttcgacagcgacgccgcgagccagaggatggagccgcgggcgccgtggatagagcaggaggggccggagtattgggaccaggagacacggaatgtgaaggcccagtcacagactgaccgagtggacctggggaccctgcgcggctactacaaccagagcgaggccggttctcacaccatccagataatgtatggctgcgacgtggggtcggacgggcgcttcctccgcgggtaccggcaggacgcctacgacggcaaggattacatcgccctgaacgaggacctgcgctcttggaccgcggcggacatggcggctcagatcaccaagcgcaagtgggaggcggcccatgaggcggagcagttgagagcctacctggatggcacacccccccaagacacatatgacccaccaccccatctctgaccatgaggccaccctgaggtgctgggccctgggcttctaccctgcggagatcacactgacctggcagcgggatggggaggaccagacccaggacacggagctcgtggagaccaggcctgcaggggatggaaccttccagaagtgggcggctgtggtggtgccttctggagaggagcagagatacacctgccatgtgcagcatgagggtctgcccaagcccctcaccctgagatggggtaaggagggagatgggggtgtcatgtctcttagggaaagcaggagcctctctggagacctttagcagggtcagggcccctcaccttcccctcttttcccagagctgtcttcccagcccaccatccccatcgtgggcatcattgctggcctggttctccttggagctgtgatcactggagctgtggtcgctgccgtgatgtggaggaggaagagctcaggtggagaaggggtgaagggtggggtctgagatttcttgtctcactgagggttccaagccccagctagaaatgtgccctgtctcattactgggaagcaccgtccacaatcatgggcctacccagtctgggccctgtgtgccagcacttactcttttgtaaagcacctgttaaaatgaaggacagatttatcaccttgattacggcggtgatgggacctgatcccagcagtcacaagtcacaggggaaggtccctgaggacagacctcaggagggctattggtccaggacccacacctgctttcttcatgtttcctgatcccgccctgggtctgcagtcacacatttctggaaacttctctggggtccaagactaggaggttcctctaggaccttaaggccctggctcctttctggtatctcacaggacattttcttctcacagatagaaaaggagggagttacactcaggctgcaagtaagtatgaaggaggctgatgcctgaggtccttgggatattgtgtttgggagcccatgggggagcccacccacctcacaattcctcctctagccacatcttctgtgggatctgaccaggttctgtttttgttctaccccaggcagtgacagtgcccagggctctgatgtgtccctcacagcttgtaaaggtgagagcttggaggacctaatgtgtgttgggtgttgggcggaacagtggacacagctgtgctatggggtttctttgcattggatgtattgagcatgcgatgggctgtttaaggtgtgacccctcactgtgatggatatgaatttgttcatgaatatttttttctatagtgtgagacagctgccttgtgtgggactgagaggcaagagttgttcctgcccttccctttgtgacttgaagaaccctgactttgtttctgcaaaggcacctgcatgtgtctgtgttcgtgtaggcataatgtgaggaggtggggagaccaccccacccccatgtccaccatgaccctcttcccacgctgacctgtgctccctccccaatcatctttcctgttccagagaggtggggctgaggtgtctccatctctgtctcaacttcatggtgcactgagctgtaacttcttccttccctattaaaattagaaccttagtataaatttactttctc

SEQ ID NO: 4130 - protein, 199 aa, Homo sapiens
MAVMAPRTLLLLLSGALALTQTWAGSHSMRYFFTSVSRPGRGEPRFIAVGYVDDTQFVRFDSDAASQRMEPRAPWIEQEGPEYWDQETRNVKAQSQTDRVDLGTLRGYYNQSEAGSHTIQIMYGCDVGSDGRFLRGYRQDAYDGKDYIALNEDLRSWTAADMAAQITKRKWEAAHEAEQLRAYLDGTPPQDTYDPPPHL

SEQ ID NO: 4131 - DNA, 2581 bp, Homo sapiens
cgcttcgcacaggagcagaggggtcagggcgaagtcccagggccccaggcgtggctctcagagtctcaggccccgaaggcggtgtatggattggggagtcccagccttggggattccccaactccgcagtttcttttctccctctcccaacctacgtagggtccttcatcctggatactcacgacgcggacccagttctcactcccattgggtgtcgggtttccagagaagccaatcagtgtcgtcgcggtcgctgttctaaagcccgcacgcacccaccgggactcagattctccccagacgccgaggatggccgtcatggcgccccgaaccctcctcctgctactctcgggggccctggccctgacccagacctgggcgggctcccactccatgaggtatttcttcacatccgtgtcccggcccggccgcggggagccccgcttcatcgccgtgggctacgtggacgacacgcagttcgtgcggttcgacagcgacgccgcgagccagaggatggagccgcgggcgccgtggatagagcaggaggggccggagtattgggaccaggagacacggaatgtgaaggcccagtcacagactgaccgagtggacctggggaccctgcgcggctactacaaccagagcgaggccggttctcacaccatccagataatgtatggctgcgacgtggggtcggacgggcgcttcctccgcgggtaccggcaggacgcctacgacggcaaggattacatcgccctgaacgaggacctgcgctcttggaccgcggcggacatggcggctcagatcaccaagcgcaagtgggaggcggcccatgaggcggagcagttgagagcctacctggatggcacacccccccaagacacatatgacccaccaccccatctctgaccatgaggccaccctgaggtgctgggccctgggcttctaccctgcggagatcacactgacctggcagcgggatggggaggaccagacccaggacacggagctcgtggagaccaggcctgcaggggatggaaccttccagaagtgggcggctgtggtggtgccttctggagaggagcagagatacacctgccatgtgcagcatgagggtctgcccaagcccctcaccctgagatggggtaaggagggagatgggggtgtcatgtctcttagggaaagcaggagcctctctggagacctttagcagggtcagggcccctcaccttcccctcttttcccagagctgtcttcccagcccaccatccccatcgtgggcatcattgctggcctggttctccttggagctgtgatcactggagctgtggtcgctgccgtgatgtggaggaggaagagctcaggtggagaaggggtgaagggtggggtctgagatttcttgtctcactgagggttccaagccccagctagaaatgtgccctgtctcattactgggaagcaccgtccacaatcatgggcctacccagtctgggccctgtgtgccagcacttactcttttgtaaagcacctgttaaaatgaaggacagatttatcaccttgattacggcggtgatgggacctgatcccagcagtcacaagtcacaggggaaggtccctgaggacagacctcaggagggctattggtccaggacccacacctgctttcttcatgtttcctgatcccgccctgggtctgcagtcacacatttctggaaacttctctggggtccaagactaggaggttcctctaggaccttaaggccctggctcctttctggtatctcacaggacattttcttctcacagatagaaaaggagggagttacactcaggctgcaagtaagtatgaaggaggctgatgcctgaggtccttgggatattgtgtttgggagcccatgggggagcccacccacctcacaattcctcctctagccacatcttctgtgggatctgaccaggttctgtttttgttctaccccaggcagtgacagtgcccagggctctgatgtgtccctcacagcttgtaaaggtgagagcttggaggacctaatgtgtgttgggtgttgggcggaacagtggacacagctgtgctatggggtttctttgcattggatgtattgagcatgcgatgggctgtttaaggtgtgacccctcactgtgatggatatgaatttgttcatgaatatttttttctatagtgtgagacagctgccttgtgtgggactgagaggcaagagttgttcctgcccttccctttgtgacttgaagaaccctgactttgtttctgcaaaggcacctgcatgtgtctgtgttcgtgtaggcataatgtgaggaggtggggagaccaccccacccccatgtccaccatgaccctcttcccacgctgacctgtgctccctccccaatcatctttcctgttccagagaggtggggctgaggtgtctccatctctgtctcaacttcatggtgcactgagctgtaacttcttccttccctattaaaattagaaccttagtataaatttactttctcaaattcttgccatgagaggttgatgagttaattaaaggagaagattcct

SEQ ID NO: 4132 - protein, 199 aa, Homo sapiens; identical to SEQ ID NO: 4130

SEQ ID NO: 4133 - DNA, 2632 bp, Homo sapiens
cgcttcgcacaggagcagaggggtcagggcgaagtcccagggccccaggcgtggctctcagagtctcaggccccgaaggcggtgtatggattggggagtcccagccttggggattccccaactccgcagtttcttttctccctctcccaacctacgtagggtccttcatcctggatactcacgacgcggacccagttctcactcccattgggtgtcgggtttccagagaagccaatcagtgtcgtcgcggtcgctgttctaaagcccgcacgcacccaccgggactcagattctccccagacgccgaggatggccgtcatggcgccccgaaccctcctcctgctactctcgggggccctggccctgacccagacctgggcgggctcccactccatgaggtatttcttcacatccgtgtcccggcccggccgcggggagccccgcttcatcgccgtgggctacgtggacgacacgcagttcgtgcggttcgacagcgacgccgcgagccagaggatggagccgcgggcgccgtggatagagcaggaggggccggagtattgggaccaggagacacggaatgtgaaggcccagtcacagactgaccgagtggacctggggaccctgcgcggctactacaaccagagcgaggccggttctcacaccatccagataatgtatggctgcgacgtggggtcggacgggcgcttcctccgcgggtaccggcaggacgcctacgacggcaaggattacatcgccctgaacgaggacctgcgctcttggaccgcggcggacatggcggctcagatcaccaagcgcaagtgggaggcggcccatgaggcggagcagttgagagcctacctggatggcacacccccccaagacacatatgacccaccaccccatctctgaccatgaggccaccctgaggtgctgggccctgggcttctaccctgcggagatcacactgacctggcagcgggatggggaggaccagacccaggacacggagctcgtggagaccaggcctgcaggggatggaaccttccagaagtgggcggctgtggtggtgccttctggagaggagcagagatacacctgccatgtgcagcatgagggtctgcccaagcccctcaccctgagatggggtaaggagggagatgggggtgtcatgtctcttagggaaagcaggagcctctctggagacctttagcagggtcagggcccctcaccttcccctcttttcccagagctgtcttcccagcccaccatccccatcgtgggcatcattgctggcctggttctccttggagctgtgatcactggagctgtggtcgctgccgtgatgtggaggaggaagagctcaggtggagaaggggtgaagggtggggtctgagatttcttgtctcactgagggttccaagccccagctagaaatgtgccctgtctcattactgggaagcaccgtccacaatcatgggcctacccagtctgggccctgtgtgccagcacttactcttttgtaaagcacctgttaaaatgaaggacagatttatcaccttgattacggcggtgatgggacctgatcccagcagtcacaagtcacaggggaaggtccctgaggacagacctcaggagggctattggtccaggacccacacctgctttcttcatgtttcctgatcccgccctgggtctgcagtcacacatttctggaaacttctctggggtccaagactaggaggttcctctaggaccttaaggccctggctcctttctggtatctcacaggacattttcttctcacagatagaaaaggagggagttacactcaggctgcaagtaagtatgaaggaggctgatgcctgaggtccttgggatattgtgtttgggagcccatgggggagcccacccacctcacaattcctcctctagccacatcttctgtgggatctgaccaggttctgtttttgttctaccccaggcagtgacagtgcccagggctctgatgtgtccctcacagcttgtaaaggtgagagcttggaggacctaatgtgtgttgggtgttgggcggaacagtggacacagctgtgctatggggtttctttgcattggatgtattgagcatgcgatgggctgtttaaggtgtgacccctcactgtgatggatatgaatttgttcatgaatatttttttctatagtgtgagacagctgccttgtgtgggactgagaggcaagagttgttcctgcccttccctttgtgacttgaagaaccctgactttgtttctgcaaaggcacctgcatgtgtctgtgttcgtgtaggcataatgtgaggaggtggggagaccaccccacccccatgtccaccatgaccctcttcccacgctgacctgtgctccctccccaatcatctttcctgttccagagaggtggggctgaggtgtctccatctctgtctcaacttcatggtgcactgagctgtaacttcttccttccctattaaaattagaaccttagtataaatttactttctcaaattcttgccatgagaggttgatgagttaattaaaggagaagattcctaaaatttgagagacaaaataaatggaagacatgagaaccttccagagtcca

SEQ ID NO: 4134 - protein, 199 aa, Homo sapiens; identical to SEQ ID NO: 4130

SEQ ID NO: 4135 - DNA, 2271 bp, Homo sapiens
tggatactcacgacgcggacccagttctcactcccattgggtgtcgggtttccagagaagccaatcagtgtcgtcgcggtcgctgttctaaagcccgcacgcacccaccgggactcagattctccccagacgccgaggatggccgtcatggcgccccgaaccctcctcctgctactctcgggggccctggccctgacccagacctgggcgggctcccactccatgaggtatttcttcacatccgtgtcccggcccggccgcggggagccccgcttcatcgccgtgggctacgtggacgacacgcagttcgtgcggttcgacagcgacgccgcgagccagaggatggagccgcgggcgccgtggatagagcaggaggggccggagtattgggaccaggagacacggaatgtgaaggcccagtcacagactgaccgagtggacctggggaccctgcgcggctactacaaccagagcgaggccggttctcacaccatccagataatgtatggctgcgacgtggggtcggacgggcgcttcctccgcgggtaccggcaggacgcctacgacggcaaggattacatcgccctgaacgaggacctgcgctcttggaccgcggcggacatggcggctcagatcaccaagcgcaagtgggaggcggcccatgaggcggagcagttgagagcctacctggatggcacgtgcgtggagtggctccgcagatacctggagaacgggaaggagacgctgcagcgcacgggccaccctgaggtgctgggccctgggcttctaccctgcggagatcacactgacctggcagcgggatggggaggaccagacccaggacacggagctcgtggagaccaggcctgcaggggatggaaccttccagaagtgggcggctgtggtggtgccttctggagaggagcagagatacacctgccatgtgcagcatgagggtctgcccaagcccctcaccctgagatgggagctgtcttcccagcccaccatccccatcgtgggcatcattgctggcctggttctccttggagctgtgatcactggagctgtggtcgctgccgtgatgtggaggaggaagagctcaggtggagaaggggtgaagggtggggtctgagatttcttgtctcactgagggttccaagccccagctagaaatgtgccctgtctcattactgggaagcaccgtccacaatcatgggcctacccagtctgggccctgtgtgccagcacttactcttttgtaaagcacctgttaaaatgaaggacagatttatcaccttgattacggcggtgatgggacctgatcccagcagtcacaagtcacaggggaaggtccctgaggacagacctcaggagggctattggtccaggacccacacctgctttcttcatgtttcctgatcccgccctgggtctgcagtcacacatttctggaaacttctctggggtccaagactaggaggttcctctaggaccttaaggccctggctcctttctggtatctcacaggacattttcttctcacagatagaaaaggagggagttacactcaggctgcaagtaagtatgaaggaggctgatgcctgaggtccttgggatattgtgtttgggagcccatgggggagcccacccacctcacaattcctcctctagccacatcttctgtgggatctgaccaggttctgtttttgttctaccccaggcagtgacagtgcccagggctctgatgtgtccctcacagcttgtaaaggtgagagcttggaggacctaatgtgtgttgggtgttgggcggaacagtggacacagctgtgctatggggtttctttgcattggatgtattgagcatgcgatgggctgtttaaggtgtgacccctcactgtgatggatatgaatttgttcatgaatatttttttctatagtgtgagacagctgccttgtgtgggactgagaggcaagagttgttcctgcccttccctttgtgacttgaagaaccctgactttgtttctgcaaaggcacctgcatgtgtctgtgttcgtgtaggcataatgtgaggaggtggggagaccaccccacccccatgtccaccatgaccctcttcccacgctgacctgtgctccctccccaatcatctttcctgttccagagaggtggggctgaggtgtctccatctctgtctcaacttcatggtgcactgagctgtaacttcttccttccctattaaaattagaaccttagtataaatttactttctc

SEQ ID NO: 4136 - protein, 271 aa, Homo sapiens
MAVMAPRTLLLLLSGALALTQTWAGSHSMRYFFTSVSRPGRGEPRFIAVGYVDDTQFVRFDSDAASQRMEPRAPWIEQEGPEYWDQETRNVKAQSQTDRVDLGTLRGYYNQSEAGSHTIQIMYGCDVGSDGRFLRGYRQDAYDGKDYIALNEDLRSWTAADMAAQITKRKWEAAHEAEQLRAYLDGTCVEWLRRYLENGKETLQRTGHPEVLGPGLLPCGDHTDLAAGWGGPDPGHGARGDQACRGWNLPEVGGCGGAFWRGAEIHLPCAA

SEQ ID NO: 4137 - DNA, 2469 bp, Homo sapiens
tggatactcacgacgcggacccagttctcactcccattgggtgtcgggtttccagagaagccaatcagtgtcgtcgcggtcgctgttctaaagcccgcacgcacccaccgggactcagattctccccagacgccgaggatggccgtcatggcgccccgaaccctcctcctgctactctcgggggccctggccctgacccagacctgggcgggctcccactccatgaggtatttcttcacatccgtgtcccggcccggccgcggggagccccgcttcatcgccgtgggctacgtggacgacacgcagttcgtgcggttcgacagcgacgccgcgagccagaggatggagccgcgggcgccgtggatagagcaggaggggccggagtattgggaccaggagacacggaatgtgaaggcccagtcacagactgaccgagtggacctggggaccctgcgcggctactacaaccagagcgaggccggttctcacaccatccagataatgtatggctgcgacgtggggtcggacgggcgcttcctccgcgggtaccggcaggacgcctacgacggcaaggattacatcgccctgaacgaggacctgcgctcttggaccgcggcggacatggcggctcagatcaccaagcgcaagtgggaggcggcccatgaggcggagcagttgagagcctacctggatggcacgtgcgtggagtggctccgcagatacctggagaacgggaaggagacgctgcagcgcacggacccccccaagacacatatgacccaccaccccatctctgaccatgaggccaccctgaggtgctgggccctgggcttctaccctgcggagatcacactgacctggcagcgggatggggaggaccagacccaggacacggagctcgtggagaccaggcctgcaggggatggaaccttccagaagtgggcggctgtggtggtgccttctggagaggagcagagatacacctgccatgtgcagcatgagggtctgcccaagcccctcaccctgagatggggtaaggagggagatgggggtgtcatgtctcttagggaaagcaggagcctctctggagacctttagcagggtcagggcccctcaccttcccctcttttcccagagctgtcttcccagcccaccatccccatcgtgggcatcattgctggcctggttctccttggagctgtgatcactggagctgtggtcgctgccgtgatgtggaggaggaagagctcaggtggagaaggggtgaagggtggggtctgagatttcttgtctcactgagggttccaagccccagctagaaatgtgccctgtctcattactgggaagcaccgtccacaatcatgggcctacccagtctgggccctgtgtgccagcacttactcttttgtaaagcacctgttaaaatgaaggacagatttatcaccttgattacggcggtgatgggacctgatcccagcagtcacaagtcacaggggaaggtccctgaggacagacctcaggagggctattggtccaggacccacacctgctttcttcatgtttcctgatcccgccctgggtctgcagtcacacatttctggaaacttctctggggtccaagactaggaggttcctctaggaccttaaggccctggctcctttctggtatctcacaggacattttcttctcacagatagaaaaggagggagttacactcaggctgcaagtaagtatgaaggaggctgatgcctgaggtccttgggatattgtgtttgggagcccatgggggagcccacccacctcacaattcctcctctagccacatcttctgtgggatctgaccaggttctgtttttgttctaccccaggcagtgacagtgcccagggctctgatgtgtccctcacagcttgtaaaggtgagagcttggaggacctaatgtgtgttgggtgttgggcggaacagtggacacagctgtgctatggggtttctttgcattggatgtattgagcatgcgatgggctgtttaaggtgtgacccctcactgtgatggatatgaatttgttcatgaatatttttttctatagtgtgagacagctgccttgtgtgggactgagaggcaagagttgttcctgcccttccctttgtgacttgaagaaccctgactttgtttctgcaaaggcacctgcatgtgtctgtgttcgtgtaggcataatgtgaggaggtggggagaccaccccacccccatgtccaccatgaccctcttcccacgctgacctgtgctccctccccaatcatctttcctgttccagagaggtggggctgaggtgtctccatctctgtctcaacttcatggtgcactgagctgtaacttcttccttccctattaaaattagaaccttagtataaatttactttctcaaattcttgccatgagaggttgatgagttaattaaaggagaagattcct

SEQ ID NO: 4138 - protein, 319 aa, Homo sapiens
MAVMAPRTLLLLLSGALALTQTWAGSHSMRYFFTSVSRPGRGEPRFIAVGYVDDTQFVRFDSDAASQRMEPRAPWIEQEGPEYWDQETRNVKAQSQTDRVDLGTLRGYYNQSEAGSHTIQIMYGCDVGSDGRFLRGYRQDAYDGKDYIALNEDLRSWTAADMAAQITKRKWEAAHEAEQLRAYLDGTCVEWLRRYLENGKETLQRTDPPKTHMTHHPISDHEATLRCWALGFYPAEITLTWQRDGEDQTQDTELVETRPAGDGTFQKWAAVVVPSGEEQRYTCHVQHEGLPKPLTLRWGKEGDGGVMSLRESRSLSGDL

SEQ ID NO: 4139 - DNA, 1614 bp, Homo sapiens
tggatactcacgacgcggacccagttctcactcccattgggtgtcgggtttccagagaagccaatcagtgtcgtcgcggtcgctgttctaaagcccgcacgcacccaccgggactcagattctccccagacgccgaggatggccgtcatggcgccccgaaccctcctcctgctactctcgggggccctggccctgacccagacctgggcgggctcccactccatgaggtatttcttcacatccgtgtcccggcccggccgcggggagccccgcttcatcgccgtgggctacgtggacgacacgcagttcgtgcggttcgacagcgacgccgcgagccagaggatggagccgcgggcgccgtggatagagcaggaggggccggagtattgggaccaggagacacggaatgtgaaggcccagtcacagactgaccgagtggacctggggaccctgcgcggctactacaaccagagcgaggccggttctcacaccatccagataatgtatggctgcgacgtggggtcggacgggcgcttcctccgcgggtaccggcaggacgcctacgacggcaaggattacatcgccctgaacgaggacctgcgctcttggaccgcggcggacatggcggctcagatcaccaagcgcaagtgggaggcggcccatgaggcggagcagttgagagcctacctggatggcacgtgcgtggagtggctccgcagatacctggagaacgggaaggagacgctgcagcgcacggacccccccaagacacatatgacccaccaccccatctctgaccatgaggccaccctgaggtgctgggccctgggcttctaccctgcggagatcacactgacctggcagcgggatggggaggaccagacccaggacacggagctcgtggagaccaggcctgcaggggatggaaccttccagaagtgggcggctgtggtggtgccttctggagaggagcagagatacacctgccatgtgcagcatgagggtctgcccaagcccctcaccctgagatgggagctgtcttcccagcccaccatccccatcgtgggcatcattgctggcctggttctccttggagctgtgatcactggagctgtggtcgctgccgtgatgtggaggaggaagagctcagatagaaaaggagggagttacactcaggctgcaagcagtgacagtgcccagggctctgatgtgtccctcacagcttgtaaagtgtgagacagctgccttgtgtgggactgagaggcaagagttgttcctgcccttccctttgtgacttgaagaaccctgactttgtttctgcaaaggcacctgcatgtgtctgtgttcgtgtaggcataatgtgaggaggtggggagaccaccccacccccatgtccaccatgaccctcttcccacgctgacctgtgctccctccccaatcatctttcctgttccagagaggtggggctgaggtgtctccatctctgtctcaacttcatggtgcactgagctgtaacttcttccttccctattaaaattagaaccttagtataaatttactttctcaaattcttgccatgagaggttgatgagttaattaaaggagaagattcct

SEQ ID NO: 4140 - protein, 365 aa, Homo sapiens; identical to SEQ ID NO: 483

SEQ ID NO: 4141 - DNA, 2320 bp, Homo sapiens
tggatactcacgacgcggacccagttctcactcccattgggtgtcgggtttccagagaagccaatcagtgtcgtcgcggtcgctgttctaaagcccgcacgcacccaccgggactcagattctccccagacgccgaggatggccgtcatggcgccccgaaccctcctcctgctactctcgggggccctggccctgacccagacctgggcgggctcccactccatgaggtatttcttcacatccgtgtcccggcccggccgcggggagccccgcttcatcgccgtgggctacgtggacgacacgcagttcgtgcggttcgacagcgacgccgcgagccagaggatggagccgcgggcgccgtggatagagcaggaggggccggagtattgggaccaggagacacggaatgtgaaggcccagtcacagactgaccgagtggacctggggaccctgcgcggctactacaaccagagcgaggccggttctcacaccatccagataatgtatggctgcgacgtggggtcggacgggcgcttcctccgcgggtaccggcaggacgcctacgacggcaaggattacatcgccctgaacgaggacctgcgctcttggaccgcggcggacatggcggctcagatcaccaagcgcaagtgggaggcggcccatgaggcggagcagttgagagcctacctggatggcacgtgcgtggagtggctccgcagatacctggagaacgggaaggagacgctgcagcgcacgggccaccctgaggtgctgggccctgggcttctaccctgcggagatcacactgacctggcagcgggatggggaggaccagacccaggacacggagctcgtggagaccaggcctgcaggggatggaaccttccagaagtgggcggctgtggtggtgccttctggagaggagcagagatacacctgccatgtgcagcatgagggtctgcccaagcccctcaccctgagatgggagctgtcttcccagcccaccatccccatcgtgggcatcattgctggcctggttctccttggagctgtgatcactggagctgtggtcgctgccgtgatgtggaggaggaagagctcaggtggagaaggggtgaagggtggggtctgagatttcttgtctcactgagggttccaagccccagctagaaatgtgccctgtctcattactgggaagcaccgtccacaatcatgggcctacccagtctgggccctgtgtgccagcacttactcttttgtaaagcacctgttaaaatgaaggacagatttatcaccttgattacggcggtgatgggacctgatcccagcagtcacaagtcacaggggaaggtccctgaggacagacctcaggagggctattggtccaggacccacacctgctttcttcatgtttcctgatcccgccctgggtctgcagtcacacatttctggaaacttctctggggtccaagactaggaggttcctctaggaccttaaggccctggctcctttctggtatctcacaggacattttcttctcacagatagaaaaggagggagttacactcaggctgcaagtaagtatgaaggaggctgatgcctgaggtccttgggatattgtgtttgggagcccatgggggagcccacccacctcacaattcctcctctagccacatcttctgtgggatctgaccaggttctgtttttgttctaccccaggcagtgacagtgcccagggctctgatgtgtccctcacagcttgtaaaggtgagagcttggaggacctaatgtgtgttgggtgttgggcggaacagtggacacagctgtgctatggggtttctttgcattggatgtattgagcatgcgatgggctgtttaaggtgtgacccctcactgtgatggatatgaatttgttcatgaatatttttttctatagtgtgagacagctgccttgtgtgggactgagaggcaagagttgttcctgcccttccctttgtgacttgaagaaccctgactttgtttctgcaaaggcacctgcatgtgtctgtgttcgtgtaggcataatgtgaggaggtggggagaccaccccacccccatgtccaccatgaccctcttcccacgctgacctgtgctccctccccaatcatctttcctgttccagagaggtggggctgaggtgtctccatctctgtctcaacttcatggtgcactgagctgtaacttcttccttccctattaaaattagaaccttagtataaatttactttctcaaattcttgccatgagaggttgatgagttaattaaaggagaagattcct

SEQ ID NO: 4142 - protein, 271 aa, Homo sapiens; identical to SEQ ID NO: 4136

SEQ ID NO: 4143 - DNA, 2520 bp, Homo sapiens
tggatactcacgacgcggacccagttctcactcccattgggtgtcgggtttccagagaagccaatcagtgtcgtcgcggtcgctgttctaaagcccgcacgcacccaccgggactcagattctccccagacgccgaggatggccgtcatggcgccccgaaccctcctcctgctactctcgggggccctggccctgacccagacctgggcgggctcccactccatgaggtatttcttcacatccgtgtcccggcccggccgcggggagccccgcttcatcgccgtgggctacgtggacgacacgcagttcgtgcggttcgacagcgacgccgcgagccagaggatggagccgcgggcgccgtggatagagcaggaggggccggagtattgggaccaggagacacggaatgtgaaggcccagtcacagactgaccgagtggacctggggaccctgcgcggctactacaaccagagcgaggccggttctcacaccatccagataatgtatggctgcgacgtggggtcggacgggcgcttcctccgcgggtaccggcaggacgcctacgacggcaaggattacatcgccctgaacgaggacctgcgctcttggaccgcggcggacatggcggctcagatcaccaagcgcaagtgggaggcggcccatgaggcggagcagttgagagcctacctggatggcacgtgcgtggagtggctccgcagatacctggagaacgggaaggagacgctgcagcgcacggacccccccaagacacatatgacccaccaccccatctctgaccatgaggccaccctgaggtgctgggccctgggcttctaccctgcggagatcacactgacctggcagcgggatggggaggaccagacccaggacacggagctcgtggagaccaggcctgcaggggatggaaccttccagaagtgggcggctgtggtggtgccttctggagaggagcagagatacacctgccatgtgcagcatgagggtctgcccaagcccctcaccctgagatggggtaaggagggagatgggggtgtcatgtctcttagggaaagcaggagcctctctggagacctttagcagggtcagggcccctcaccttcccctcttttcccagagctgtcttcccagcccaccatccccatcgtgggcatcattgctggcctggttctccttggagctgtgatcactggagctgtggtcgctgccgtgatgtggaggaggaagagctcaggtggagaaggggtgaagggtggggtctgagatttcttgtctcactgagggttccaagccccagctagaaatgtgccctgtctcattactgggaagcaccgtccacaatcatgggcctacccagtctgggccctgtgtgccagcacttactcttttgtaaagcacctgttaaaatgaaggacagatttatcaccttgattacggcggtgatgggacctgatcccagcagtcacaagtcacaggggaaggtccctgaggacagacctcaggagggctattggtccaggacccacacctgctttcttcatgtttcctgatcccgccctgggtctgcagtcacacatttctggaaacttctctggggtccaagactaggaggttcctctaggaccttaaggccctggctcctttctggtatctcacaggacattttcttctcacagatagaaaaggagggagttacactcaggctgcaagtaagtatgaaggaggctgatgcctgaggtccttgggatattgtgtttgggagcccatgggggagcccacccacctcacaattcctcctctagccacatcttctgtgggatctgaccaggttctgtttttgttctaccccaggcagtgacagtgcccagggctctgatgtgtccctcacagcttgtaaaggtgagagcttggaggacctaatgtgtgttgggtgttgggcggaacagtggacacagctgtgctatggggtttctttgcattggatgtattgagcatgcgatgggctgtttaaggtgtgacccctcactgtgatggatatgaatttgttcatgaatatttttttctatagtgtgagacagctgccttgtgtgggactgagaggcaagagttgttcctgcccttccctttgtgacttgaagaaccctgactttgtttctgcaaaggcacctgcatgtgtctgtgttcgtgtaggcataatgtgaggaggtggggagaccaccccacccccatgtccaccatgaccctcttcccacgctgacctgtgctccctccccaatcatctttcctgttccagagaggtggggctgaggtgtctccatctctgtctcaacttcatggtgcactgagctgtaacttcttccttccctattaaaattagaaccttagtataaatttactttctcaaattcttgccatgagaggttgatgagttaattaaaggagaagattcctaaaatttgagagacaaaataaatggaagacatgagaaccttccagagtcca

SEQ ID NO: 4144 - protein, 319 aa, Homo sapiens; identical to SEQ ID NO: 4138

SEQ ID NO: 4145 - DNA, 1665 bp, Homo sapiens
tggatactcacgacgcggacccagttctcactcccattgggtgtcgggtttccagagaagccaatcagtgtcgtcgcggtcgctgttctaaagcccgcacgcacccaccgggactcagattctccccagacgccgaggatggccgtcatggcgccccgaaccctcctcctgctactctcgggggccctggccctgacccagacctgggcgggctcccactccatgaggtatttcttcacatccgtgtcccggcccggccgcggggagccccgcttcatcgccgtgggctacgtggacgacacgcagttcgtgcggttcgacagcgacgccgcgagccagaggatggagccgcgggcgccgtggatagagcaggaggggccggagtattgggaccaggagacacggaatgtgaaggcccagtcacagactgaccgagtggacctggggaccctgcgcggctactacaaccagagcgaggccggttctcacaccatccagataatgtatggctgcgacgtggggtcggacgggcgcttcctccgcgggtaccggcaggacgcctacgacggcaaggattacatcgccctgaacgaggacctgcgctcttggaccgcggcggacatggcggctcagatcaccaagcgcaagtgggaggcggcccatgaggcggagcagttgagagcctacctggatggcacgtgcgtggagtggctccgcagatacctggagaacgggaaggagacgctgcagcgcacggacccccccaagacacatatgacccaccaccccatctctgaccatgaggccaccctgaggtgctgggccctgggcttctaccctgcggagatcacactgacctggcagcgggatggggaggaccagacccaggacacggagctcgtggagaccaggcctgcaggggatggaaccttccagaagtgggcggctgtggtggtgccttctggagaggagcagagatacacctgccatgtgcagcatgagggtctgcccaagcccctcaccctgagatgggagctgtcttcccagcccaccatccccatcgtgggcatcattgctggcctggttctccttggagctgtgatcactggagctgtggtcgctgccgtgatgtggaggaggaagagctcagatagaaaaggagggagttacactcaggctgcaagcagtgacagtgcccagggctctgatgtgtccctcacagcttgtaaagtgtgagacagctgccttgtgtgggactgagaggcaagagttgttcctgcccttccctttgtgacttgaagaaccctgactttgtttctgcaaaggcacctgcatgtgtctgtgttcgtgtaggcataatgtgaggaggtggggagaccaccccacccccatgtccaccatgaccctcttcccacgctgacctgtgctccctccccaatcatctttcctgttccagagaggtggggctgaggtgtctccatctctgtctcaacttcatggtgcactgagctgtaacttcttccttccctattaaaattagaaccttagtataaatttactttctcaaattcttgccatgagaggttgatgagttaattaaaggagaagattcctaaaatttgagagacaaaataaatggaagacatgagaaccttccagagtcca

SEQ ID NO: 4146 - protein, 365 aa, Homo sapiens; identical to SEQ ID NO: 483

SEQ ID NO: 4147 - DNA, 2371 bp, Homo sapiens
tggatactcacgacgcggacccagttctcactcccattgggtgtcgggtttccagagaagccaatcagtgtcgtcgcggtcgctgttctaaagcccgcacgcacccaccgggactcagattctccccagacgccgaggatggccgtcatggcgccccgaaccctcctcctgctactctcgggggccctggccctgacccagacctgggcgggctcccactccatgaggtatttcttcacatccgtgtcccggcccggccgcggggagccccgcttcatcgccgtgggctacgtggacgacacgcagttcgtgcggttcgacagcgacgccgcgagccagaggatggagccgcgggcgccgtggatagagcaggaggggccggagtattgggaccaggagacacggaatgtgaaggcccagtcacagactgaccgagtggacctggggaccctgcgcggctactacaaccagagcgaggccggttctcacaccatccagataatgtatggctgcgacgtggggtcggacgggcgcttcctccgcgggtaccggcaggacgcctacgacggcaaggattacatcgccctgaacgaggacctgcgctcttggaccgcggcggacatggcggctcagatcaccaagcgcaagtgggaggcggcccatgaggcggagcagttgagagcctacctggatggcacgtgcgtggagtggctccgcagatacctggagaacgggaaggagacgctgcagcgcacgggccaccctgaggtgctgggccctgggcttctaccctgcggagatcacactgacctggcagcgggatggggaggaccagacccaggacacggagctcgtggagaccaggcctgcaggggatggaaccttccagaagtgggcggctgtggtggtgccttctggagaggagcagagatacacctgccatgtgcagcatgagggtctgcccaagcccctcaccctgagatgggagctgtcttcccagcccaccatccccatcgtgggcatcattgctggcctggttctccttggagctgtgatcactggagctgtggtcgctgccgtgatgtggaggaggaagagctcaggtggagaaggggtgaagggtggggtctgagatttcttgtctcactgagggttccaagccccagctagaaatgtgccctgtctcattactgggaagcaccgtccacaatcatgggcctacccagtctgggccctgtgtgccagcacttactcttttgtaaagcacctgttaaaatgaaggacagatttatcaccttgattacggcggtgatgggacctgatcccagcagtcacaagtcacaggggaaggtccctgaggacagacctcaggagggctattggtccaggacccacacctgctttcttcatgtttcctgatcccgccctgggtctgcagtcacacatttctggaaacttctctggggtccaagactaggaggttcctctaggaccttaaggccctggctcctttctggtatctcacaggacattttcttctcacagatagaaaaggagggagttacactcaggctgcaagtaagtatgaaggaggctgatgcctgaggtccttgggatattgtgtttgggagcccatgggggagcccacccacctcacaattcctcctctagccacatcttctgtgggatctgaccaggttctgtttttgttctaccccaggcagtgacagtgcccagggctctgatgtgtccctcacagcttgtaaaggtgagagcttggaggacctaatgtgtgttgggtgttgggcggaacagtggacacagctgtgctatggggtttctttgcattggatgtattgagcatgcgatgggctgtttaaggtgtgacccctcactgtgatggatatgaatttgttcatgaatatttttttctatagtgtgagacagctgccttgtgtgggactgagaggcaagagttgttcctgcccttccctttgtgacttgaagaaccctgactttgtttctgcaaaggcacctgcatgtgtctgtgttcgtgtaggcataatgtgaggaggtggggagaccaccccacccccatgtccaccatgaccctcttcccacgctgacctgtgctccctccccaatcatctttcctgttccagagaggtggggctgaggtgtctccatctctgtctcaacttcatggtgcactgagctgtaacttcttccttccctattaaaattagaaccttagtataaatttactttctcaaattcttgccatgagaggttgatgagttaattaaaggagaagattcctaaaatttgagagacaaaataaatggaagacatgagaaccttccagagtcca

SEQ ID NO: 4148 - protein, 271 aa, Homo sapiens; identical to SEQ ID NO: 4136

SEQ ID NO: 4149 - DNA, 1567 bp, Homo sapiens
tggatactcacgacgcggacccagttctcactcccattgggtgtcgggtttccagagaagccaatcagtgtcgtcgcggtcgctgttctaaagcccgcacgcacccaccgggactcagattctccccagacgccgaggatggccgtcatggcgccccgaaccctcctcctgctactctcgggggccctggccctgacccagacctgggcgggctcccactccatgaggtatttcttcacatccgtgtcccggcccggccgcggggagccccgcttcatcgccgtgggctacgtggacgacacgcagttcgtgcggttcgacagcgacgccgcgagccagaggatggagccgcgggcgccgtggatagagcaggaggggccggagtattgggaccaggagacacggaatgtgaaggcccagtcacagactgaccgagtggacctggggaccctgcgcggctactacaaccagagcgaggccggttctcacaccatccagataatgtatggctgcgacgtggggtcggacgggcgcttcctccgcgggtaccggcaggacgcctacgacggcaaggattacatcgccctgaacgaggacctgcgctcttggaccgcggcggacatggcggctcagatcaccaagcgcaagtgggaggcggcccatgaggcggagcagttgagagcctacctggatggcacgtgcgtggagtggctccgcagatacctggagaacgggaaggagacgctgcagcgcacggacccccccaagacacatatgacccaccaccccatctctgaccatgaggccaccctgaggtgctgggccctgggcttctaccctgcggagatcacactgacctggcagcgggatggggaggaccagacccaggacacggagctcgtggagaccaggcctgcaggggatggaaccttccagaagtgggcggctgtggtggtgccttctggagaggagcagagatacacctgccatgtgcagcatgagggtctgcccaagcccctcaccctgagatgggagctgtcttcccagcccaccatccccatcgtgggcatcattgctggcctggttctccttggagctgtgatcactggagctgtggtcgctgccgtgatgtggaggaggaagagctcagatagaaaaggagggagcaagagttgttcctgcccttccctttgtgacttgaagaaccctgactttgtttctgcaaaggcacctgcatgtgtctgtgttcgtgtaggcataatgtgaggaggtggggagaccaccccacccccatgtccaccatgaccctcttcccacgctgacctgtgctccctccccaatcatctttcctgttccagagaggtggggctgaggtgtctccatctctgtctcaacttcatggtgcactgagctgtaacttcttccttccctattaaaattagaaccttagtataaatttactttctcaaattcttgccatgagaggttgatgagttaattaaaggagaagattcctaaaatttgagagacaaaataaatggaagacatgagaaccttccagagtcca

SEQ ID NO: 4150 - protein, 375 aa, Homo sapiens
MAVMAPRTLLLLLSGALALTQTWAGSHSMRYFFTSVSRPGRGEPRFIAVGYVDDTQFVRFDSDAASQRMEPRAPWIEQEGPEYWDQETRNVKAQSQTDRVDLGTLRGYYNQSEAGSHTIQIMYGCDVGSDGRFLRGYRQDAYDGKDYIALNEDLRSWTAADMAAQITKRKWEAAHEAEQLRAYLDGTCVEWLRRYLENGKETLQRTDPPKTHMTHHPISDHEATLRCWALGFYPAEITLTWQRDGEDQTQDTELVETRPAGDGTFQKWAAVVVPSGEEQRYTCHVQHEGLPKPLTLRWELSSQPTIPIVGIIAGLVLLGAVITGAVVAAVMWRRKSSDRKGGSKSCSCPSLCDLKNPDFVSAKAPACVCVRVGIM

SEQ ID NO: 4151 - DNA, 2420 bp, Homo sapiens
tggatactcacgacgcggacccagttctcactcccattgggtgtcgggtttccagagaagccaatcagtgtcgtcgcggtcgctgttctaaagcccgcacgcacccaccgggactcagattctccccagacgccgaggatggccgtcatggcgccccgaaccctcctcctgctactctcgggggccctggccctgacccagacctgggcgggctcccactccatgaggtatttcttcacatccgtgtcccggcccggccgcggggagccccgcttcatcgccgtgggctacgtggacgacacgcagttcgtgcggttcgacagcgacgccgcgagccagaggatggagccgcgggcgccgtggatagagcaggaggggccggagtattgggaccaggagacacggaatgtgaaggcccagtcacagactgaccgagtggacctggggaccctgcgcggctactacaaccagagcgaggccggttctcacaccatccagataatgtatggctgcgacgtggggtcggacgggcgcttcctccgcgggtaccggcaggacgcctacgacggcaaggattacatcgccctgaacgaggacctgcgctcttggaccgcggcggacatggcggctcagatcaccaagcgcaagtgggaggcggcccatgaggcggagcagttgagagcctacctggatggcacgtgcgtggagtggctccgcagatacctggagaacgggaaggagacgctgcagcgcacggacccccccaagacacatatgacccaccaccccatctctgaccatgaggccaccctgaggtgctgggccctgggcttctaccctgcggagatcacactgacctggcagcgggatggggaggaccagacccaggacacggagctcgtggagaccaggcctgcaggggatggaaccttccagaagtgggcggctgtggtggtgccttctggagaggagcagagatacacctgccatgtgcagcatgagggtctgcccaagcccctcaccctgagatggggtaaggagggagatgggggtgtcatgtctcttagggaaagcaggagcctctctggagacctttagcagggtcagggcccctcaccttcccctcttttcccagagctgtcttcccagcccaccatccccatcgtgggcatcattgctggcctggttctccttggagctgtgatcactggagctgtggtcgctgccgtgatgtggaggaggaagagctcaggtggagaaggggtgaagggtggggtctgagatttcttgtctcactgagggttccaagccccagctagaaatgtgccctgtctcattactgggaagcaccgtccacaatcatgggcctacccagtctgggccctgtgtgccagcacttactcttttgtaaagcacctgttaaaatgaaggacagatttatcaccttgattacggcggtgatgggacctgatcccagcagtcacaagtcacaggggaaggtccctgaggacagacctcaggagggctattggtccaggacccacacctgctttcttcatgtttcctgatcccgccctgggtctgcagtcacacatttctggaaacttctctggggtccaagactaggaggttcctctaggaccttaaggccctggctcctttctggtatctcacaggacattttcttctcacagatagaaaaggagggagttacactcaggctgcaagtaagtatgaaggaggctgatgcctgaggtccttgggatattgtgtttgggagcccatgggggagcccacccacctcacaattcctcctctagccacatcttctgtgggatctgaccaggttctgtttttgttctaccccaggcagtgacagtgcccagggctctgatgtgtccctcacagcttgtaaaggtgagagcttggaggacctaatgtgtgttgggtgttgggcggaacagtggacacagctgtgctatggggtttctttgcattggatgtattgagcatgcgatgggctgtttaaggtgtgacccctcactgtgatggatatgaatttgttcatgaatatttttttctatagtgtgagacagctgccttgtgtgggactgagaggcaagagttgttcctgcccttccctttgtgacttgaagaaccctgactttgtttctgcaaaggcacctgcatgtgtctgtgttcgtgtaggcataatgtgaggaggtggggagaccaccccacccccatgtccaccatgaccctcttcccacgctgacctgtgctccctccccaatcatctttcctgttccagagaggtggggctgaggtgtctccatctctgtctcaacttcatggtgcactgagctgtaacttcttccttccctattaaaattagaaccttagtataaatttactttctc

SEQ ID NO: 4152 - protein, 319 aa, Homo sapiens; identical to SEQ ID NO: 4138

SEQ ID NO: 4153 - DNA, 1565 bp, Homo sapiens
tggatactcacgacgcggacccagttctcactcccattgggtgtcgggtttccagagaagccaatcagtgtcgtcgcggtcgctgttctaaagcccgcacgcacccaccgggactcagattctccccagacgccgaggatggccgtcatggcgccccgaaccctcctcctgctactctcgggggccctggccctgacccagacctgggcgggctcccactccatgaggtatttcttcacatccgtgtcccggcccggccgcggggagccccgcttcatcgccgtgggctacgtggacgacacgcagttcgtgcggttcgacagcgacgccgcgagccagaggatggagccgcgggcgccgtggatagagcaggaggggccggagtattgggaccaggagacacggaatgtgaaggcccagtcacagactgaccgagtggacctggggaccctgcgcggctactacaaccagagcgaggccggttctcacaccatccagataatgtatggctgcgacgtggggtcggacgggcgcttcctccgcgggtaccggcaggacgcctacgacggcaaggattacatcgccctgaacgaggacctgcgctcttggaccgcggcggacatggcggctcagatcaccaagcgcaagtgggaggcggcccatgaggcggagcagttgagagcctacctggatggcacgtgcgtggagtggctccgcagatacctggagaacgggaaggagacgctgcagcgcacggacccccccaagacacatatgacccaccaccccatctctgaccatgaggccaccctgaggtgctgggccctgggcttctaccctgcggagatcacactgacctggcagcgggatggggaggaccagacccaggacacggagctcgtggagaccaggcctgcaggggatggaaccttccagaagtgggcggctgtggtggtgccttctggagaggagcagagatacacctgccatgtgcagcatgagggtctgcccaagcccctcaccctgagatgggagctgtcttcccagcccaccatccccatcgtgggcatcattgctggcctggttctccttggagctgtgatcactggagctgtggtcgctgccgtgatgtggaggaggaagagctcagatagaaaaggagggagttacactcaggctgcaagcagtgacagtgcccagggctctgatgtgtccctcacagcttgtaaagtgtgagacagctgccttgtgtgggactgagaggcaagagttgttcctgcccttccctttgtgacttgaagaaccctgactttgtttctgcaaaggcacctgcatgtgtctgtgttcgtgtaggcataatgtgaggaggtggggagaccaccccacccccatgtccaccatgaccctcttcccacgctgacctgtgctccctccccaatcatctttcctgttccagagaggtggggctgaggtgtctccatctctgtctcaacttcatggtgcactgagctgtaacttcttccttccctattaaaattagaaccttagtataaatttactttctc

SEQ ID NO: 4154 - protein, 365 aa, Homo sapiens; identical to SEQ ID NO: 483

SEQ ID NO: 4155 - DNA, 2762 bp, Homo sapiens
aatcagtgtcgtcgcggtcgctgttctaaagcccgcacgcacccaccgggactcagattctccccagacgccgaggatggccgtcatggcgccccgaaccctcctcctgctactctcgggggccctggccctgacccagacctgggcgggctcccactccatgaggtatttcttcacatccgtgtcccggcccggccgcggggagccccgcttcatcgccgtgggctacgtggacgacacgcagttcgtgcggttcgacagcgacgccgcgagccagaggatggagccgcgggcgccgtggatagagcaggaggggccggagtattgggaccaggagacacggaatgtgaaggcccagtcacagactgaccgagtggacctggggaccctgcgcggctactacaaccagagcgaggccggttctcacaccatccagataatgtatggctgcgacgtggggtcggacgggcgctggctccgcagatacctggagaacgggaaggagacgctgcagcgcacgggtaccaggggccacggggcgcctccctgatcgcctgtagatctcccgggctggcctcccacaaggaggggagacaattgggaccaacactagaatatcaccctccctctggtcctgagggagaggaatcctcctgggttccagatcctgtaccagagagtgactctgaggttccgccctgctctctgacacaattaagggataaaatctctgaaggagtgacgggaagacgatccctcgaatactgatgagtggttccctttgacaccggcagcagccttgggcccgtgacttttcctctcaggccttgttctctgcttcacactcaatgtgtgtgggggtctgagtccagcacttctgagtccctcagcctccactcaggtcaggaccagaagtcgctgttcccttctcagggaatagaagattatcccaggtgcctgtgtccaggctggtgtctgggttctgtgctctcttccccatcccgggtgtcctgtccattctcaagatggccacatgcgtgctggtggagtgtcccatgacagatgcaaaatgcctgaattttctgactcttcccgtcagacccccccaagacacatatgacccaccaccccatctctgaccatgaggccaccctgaggtgctgggccctgggcttctaccctgcggagatcacactgacctggcagcgggatggggaggaccagacccaggacacggagctcgtggagaccaggcctgcaggggatggaaccttccagaagtgggcggctgtggtggtgccttctggagaggagcagagatacacctgccatgtgcagcatgagggtctgcccaagcccctcaccctgagatggggtaaggagggagatgggggtgtcatgtctcttagggaaagcaggagcctctctggagacctttagcagggtcagggcccctcaccttcccctcttttcccagagctgtcttcccagcccaccatccccatcgtgggcatcattgctggcctggttctccttggagctgtgatcactggagctgtggtcgctgccgtgatgtggaggaggaagagctcaggtggagaaggggtgaagggtggggtctgagatttcttgtctcactgagggttccaagccccagctagaaatgtgccctgtctcattactgggaagcaccgtccacaatcatgggcctacccagtctgggccctgtgtgccagcacttactcttttgtaaagcacctgttaaaatgaaggacagatttatcaccttgattacggcggtgatgggacctgatcccagcagtcacaagtcacaggggaaggtccctgaggacagacctcaggagggctattggtccaggacccacacctgctttcttcatgtttcctgatcccgccctgggtctgcagtcacacatttctggaaacttctctggggtccaagactaggaggttcctctaggaccttaaggccctggctcctttctggtatctcacaggacattttcttctcacagatagaaaaggagggagttacactcaggctgcaagtaagtatgaaggaggctgatgcctgaggtccttgggatattgtgtttgggagcccatgggggagcccacccacctcacaattcctcctctagccacatcttctgtgggatctgaccaggttctgtttttgttctaccccaggcagtgacagtgcccagggctctgatgtgtccctcacagcttgtaaaggtgagagcttggaggacctaatgtgtgttgggtgttgggcggaacagtggacacagctgtgctatggggtttctttgcattggatgtattgagcatgcgatgggctgtttaaggtgtgacccctcactgtgatggatatgaatttgttcatgaatatttttttctatagtgtgagacagctgccttgtgtgggactgagaggcaagagttgttcctgcccttccctttgtgacttgaagaaccctgactttgtttctgcaaaggcacctgcatgtgtctgtgttcgtgtaggcataatgtgaggaggtggggagaccaccccacccccatgtccaccatgaccctcttcccacgctgacctgtgctccctccccaatcatctttcctgttccagagaggtggggctgaggtgtctccatctctgtctcaacttcatggtgcactgagctgtaacttcttccttccctattaaaattagaaccttagtataaatttactttctc

SEQ ID NO: 4156 - protein, 157 aa, Homo sapiens
MAVMAPRTLLLLLSGALALTQTWAGSHSMRYFFTSVSRPGRGEPRFIAVGYVDDTQFVRFDSDAASQRMEPRAPWIEQEGPEYWDQETRNVKAQSQTDRVDLGTLRGYYNQSEAGSHTIQIMYGCDVGSDGRWLRRYLENGKETLQRTGTRGHGAPP

SEQ ID NO: 4157 - DNA, 2233 bp, Homo sapiens
aatcagtgtcgtcgcggtcgctgttctaaagcccgcacgcacccaccgggactcagattctccccagacgccgaggatggccgtcatggcgccccgaaccctcctcctgctactctcgggggccctggccctgacccagacctgggcgggctcccactccatgaggtatttcttcacatccgtgtcccggcccggccgcggggagccccgcttcatcgccgtgggctacgtggacgacacgcagttcgtgcggttcgacagcgacgccgcgagccagaggatggagccgcgggcgccgtggatagagcaggaggggccggagtattgggaccaggagacacggaatgtgaaggcccagtcacagactgaccgagtggacctggggaccctgcgcggctactacaaccagagcgaggccggttctcacaccatccagataatgtatggctgcgacgtggggtcggacgggcgcttcctccgcgggtaccggcaggacgcctacgacggcaaggattacatcgccctgaacgaggacctgcgctcttggaccgcggcggacatggcggctcagatcaccaagcacacatatgacccaccaccccatctctgaccatgaggccaccctgaggtgctgggccctgggcttctaccctgcggagatcacactgacctggcagcgggatggggaggaccagacccaggacacggagctcgtggagaccaggcctgcaggggatggaaccttccagaagtgggcggctgtggtggtgccttctggagaggagcagagatacacctgccatgtgcagcatgagggtctgcccaagcccctcaccctgagatggggtaaggagggagatgggggtgtcatgtctcttagggaaagcaggagcctctctggagacctttagcagggtcagggcccctcaccttcccctcttttcccagagctgtcttcccagcccaccatccccatcgtgggcatcattgctggcctggttctccttggagctgtgatcactggagctgtggtcgctgccgtgatgtggaggaggaagagctcaggtggagaaggggtgaagggtggggtctgagatttcttgtctcactgagggttccaagccccagctagaaatgtgccctgtctcattactgggaagcaccgtccacaatcatgggcctacccagtctgggccctgtgtgccagcacttactcttttgtaaagcacctgttaaaatgaaggacagatttatcaccttgattacggcggtgatgggacctgatcccagcagtcacaagtcacaggggaaggtccctgaggacagacctcaggagggctattggtccaggacccacacctgctttcttcatgtttcctgatcccgccctgggtctgcagtcacacatttctggaaacttctctggggtccaagactaggaggttcctctaggaccttaaggccctggctcctttctggtatctcacaggacattttcttctcacagatagaaaaggagggagttacactcaggctgcaagtaagtatgaaggaggctgatgcctgaggtccttgggatattgtgtttgggagcccatgggggagcccacccacctcacaattcctcctctagccacatcttctgtgggatctgaccaggttctgtttttgttctaccccaggcagtgacagtgcccagggctctgatgtgtccctcacagcttgtaaaggtgagagcttggaggacctaatgtgtgttgggtgttgggcggaacagtggacacagctgtgctatggggtttctttgcattggatgtattgagcatgcgatgggctgtttaaggtgtgacccctcactgtgatggatatgaatttgttcatgaatatttttttctatagtgtgagacagctgccttgtgtgggactgagaggcaagagttgttcctgcccttccctttgtgacttgaagaaccctgactttgtttctgcaaaggcacctgcatgtgtctgtgttcgtgtaggcataatgtgaggaggtggggagaccaccccacccccatgtccaccatgaccctcttcccacgctgacctgtgctccctccccaatcatctttcctgttccagagaggtggggctgaggtgtctccatctctgtctcaacttcatggtgcactgagctgtaacttcttccttccctattaaaattagaaccttagtataaatttactttctc

SEQ ID NO: 4158 - protein, 177 aa, Homo sapiens
MAVMAPRTLLLLLSGALALTQTWAGSHSMRYFFTSVSRPGRGEPRFIAVGYVDDTQFVRFDSDAASQRMEPRAPWIEQEGPEYWDQETRNVKAQSQTDRVDLGTLRGYYNQSEAGSHTIQIMYGCDVGSDGRFLRGYRQDAYDGKDYIALNEDLRSWTAADMAAQITKHTYDPPPHL

SEQ ID NO: 4159 - DNA, 2811 bp, Homo sapiens
aatcagtgtcgtcgcggtcgctgttctaaagcccgcacgcacccaccgggactcagattctccccagacgccgaggatggccgtcatggcgccccgaaccctcctcctgctactctcgggggccctggccctgacccagacctgggcgggctcccactccatgaggtatttcttcacatccgtgtcccggcccggccgcggggagccccgcttcatcgccgtgggctacgtggacgacacgcagttcgtgcggttcgacagcgacgccgcgagccagaggatggagccgcgggcgccgtggatagagcaggaggggccggagtattgggaccaggagacacggaatgtgaaggcccagtcacagactgaccgagtggacctggggaccctgcgcggctactacaaccagagcgaggccggttctcacaccatccagataatgtatggctgcgacgtggggtcggacgggcgctggctccgcagatacctggagaacgggaaggagacgctgcagcgcacgggtaccaggggccacggggcgcctccctgatcgcctgtagatctcccgggctggcctcccacaaggaggggagacaattgggaccaacactagaatatcaccctccctctggtcctgagggagaggaatcctcctgggttccagatcctgtaccagagagtgactctgaggttccgccctgctctctgacacaattaagggataaaatctctgaaggagtgacgggaagacgatccctcgaatactgatgagtggttccctttgacaccggcagcagccttgggcccgtgacttttcctctcaggccttgttctctgcttcacactcaatgtgtgtgggggtctgagtccagcacttctgagtccctcagcctccactcaggtcaggaccagaagtcgctgttcccttctcagggaatagaagattatcccaggtgcctgtgtccaggctggtgtctgggttctgtgctctcttccccatcccgggtgtcctgtccattctcaagatggccacatgcgtgctggtggagtgtcccatgacagatgcaaaatgcctgaattttctgactcttcccgtcagacccccccaagacacatatgacccaccaccccatctctgaccatgaggccaccctgaggtgctgggccctgggcttctaccctgcggagatcacactgacctggcagcgggatggggaggaccagacccaggacacggagctcgtggagaccaggcctgcaggggatggaaccttccagaagtgggcggctgtggtggtgccttctggagaggagcagagatacacctgccatgtgcagcatgagggtctgcccaagcccctcaccctgagatggggtaaggagggagatgggggtgtcatgtctcttagggaaagcaggagcctctctggagacctttagcagggtcagggcccctcaccttcccctcttttcccagagctgtcttcccagcccaccatccccatcgtgggcatcattgctggcctggttctccttggagctgtgatcactggagctgtggtcgctgccgtgatgtggaggaggaagagctcaggtggagaaggggtgaagggtggggtctgagatttcttgtctcactgagggttccaagccccagctagaaatgtgccctgtctcattactgggaagcaccgtccacaatcatgggcctacccagtctgggccctgtgtgccagcacttactcttttgtaaagcacctgttaaaatgaaggacagatttatcaccttgattacggcggtgatgggacctgatcccagcagtcacaagtcacaggggaaggtccctgaggacagacctcaggagggctattggtccaggacccacacctgctttcttcatgtttcctgatcccgccctgggtctgcagtcacacatttctggaaacttctctggggtccaagactaggaggttcctctaggaccttaaggccctggctcctttctggtatctcacaggacattttcttctcacagatagaaaaggagggagttacactcaggctgcaagtaagtatgaaggaggctgatgcctgaggtccttgggatattgtgtttgggagcccatgggggagcccacccacctcacaattcctcctctagccacatcttctgtgggatctgaccaggttctgtttttgttctaccccaggcagtgacagtgcccagggctctgatgtgtccctcacagcttgtaaaggtgagagcttggaggacctaatgtgtgttgggtgttgggcggaacagtggacacagctgtgctatggggtttctttgcattggatgtattgagcatgcgatgggctgtttaaggtgtgacccctcactgtgatggatatgaatttgttcatgaatatttttttctatagtgtgagacagctgccttgtgtgggactgagaggcaagagttgttcctgcccttccctttgtgacttgaagaaccctgactttgtttctgcaaaggcacctgcatgtgtctgtgttcgtgtaggcataatgtgaggaggtggggagaccaccccacccccatgtccaccatgaccctcttcccacgctgacctgtgctccctccccaatcatctttcctgttccagagaggtggggctgaggtgtctccatctctgtctcaacttcatggtgcactgagctgtaacttcttccttccctattaaaattagaaccttagtataaatttactttctcaaattcttgccatgagaggttgatgagttaattaaaggagaagattcct

SEQ ID NO: 4160 - protein, 157 aa, Homo sapiens; identical to SEQ ID NO: 4156

SEQ ID NO: 4161 - DNA, 2282 bp, Homo sapiens
aatcagtgtcgtcgcggtcgctgttctaaagcccgcacgcacccaccgggactcagattctccccagacgccgaggatggccgtcatggcgccccgaaccctcctcctgctactctcgggggccctggccctgacccagacctgggcgggctcccactccatgaggtatttcttcacatccgtgtcccggcccggccgcggggagccccgcttcatcgccgtgggctacgtggacgacacgcagttcgtgcggttcgacagcgacgccgcgagccagaggatggagccgcgggcgccgtggatagagcaggaggggccggagtattgggaccaggagacacggaatgtgaaggcccagtcacagactgaccgagtggacctggggaccctgcgcggctactacaaccagagcgaggccggttctcacaccatccagataatgtatggctgcgacgtggggtcggacgggcgcttcctccgcgggtaccggcaggacgcctacgacggcaaggattacatcgccctgaacgaggacctgcgctcttggaccgcggcggacatggcggctcagatcaccaagcacacatatgacccaccaccccatctctgaccatgaggccaccctgaggtgctgggccctgggcttctaccctgcggagatcacactgacctggcagcgggatggggaggaccagacccaggacacggagctcgtggagaccaggcctgcaggggatggaaccttccagaagtgggcggctgtggtggtgccttctggagaggagcagagatacacctgccatgtgcagcatgagggtctgcccaagcccctcaccctgagatggggtaaggagggagatgggggtgtcatgtctcttagggaaagcaggagcctctctggagacctttagcagggtcagggcccctcaccttcccctcttttcccagagctgtcttcccagcccaccatccccatcgtgggcatcattgctggcctggttctccttggagctgtgatcactggagctgtggtcgctgccgtgatgtggaggaggaagagctcaggtggagaaggggtgaagggtggggtctgagatttcttgtctcactgagggttccaagccccagctagaaatgtgccctgtctcattactgggaagcaccgtccacaatcatgggcctacccagtctgggccctgtgtgccagcacttactcttttgtaaagcacctgttaaaatgaaggacagatttatcaccttgattacggcggtgatgggacctgatcccagcagtcacaagtcacaggggaaggtccctgaggacagacctcaggagggctattggtccaggacccacacctgctttcttcatgtttcctgatcccgccctgggtctgcagtcacacatttctggaaacttctctggggtccaagactaggaggttcctctaggaccttaaggccctggctcctttctggtatctcacaggacattttcttctcacagatagaaaaggagggagttacactcaggctgcaagtaagtatgaaggaggctgatgcctgaggtccttgggatattgtgtttgggagcccatgggggagcccacccacctcacaattcctcctctagccacatcttctgtgggatctgaccaggttctgtttttgttctaccccaggcagtgacagtgcccagggctctgatgtgtccctcacagcttgtaaaggtgagagcttggaggacctaatgtgtgttgggtgttgggcggaacagtggacacagctgtgctatggggtttctttgcattggatgtattgagcatgcgatgggctgtttaaggtgtgacccctcactgtgatggatatgaatttgttcatgaatatttttttctatagtgtgagacagctgccttgtgtgggactgagaggcaagagttgttcctgcccttccctttgtgacttgaagaaccctgactttgtttctgcaaaggcacctgcatgtgtctgtgttcgtgtaggcataatgtgaggaggtggggagaccaccccacccccatgtccaccatgaccctcttcccacgctgacctgtgctccctccccaatcatctttcctgttccagagaggtggggctgaggtgtctccatctctgtctcaacttcatggtgcactgagctgtaacttcttccttccctattaaaattagaaccttagtataaatttactttctcaaattcttgccatgagaggttgatgagttaattaaaggagaagattcct

SEQ ID NO: 4162 - protein, 177 aa, Homo sapiens; identical to SEQ ID NO: 4158

SEQ ID NO: 4163 - DNA, 2862 bp, Homo sapiens
aatcagtgtcgtcgcggtcgctgttctaaagcccgcacgcacccaccgggactcagattctccccagacgccgaggatggccgtcatggcgccccgaaccctcctcctgctactctcgggggccctggccctgacccagacctgggcgggctcccactccatgaggtatttcttcacatccgtgtcccggcccggccgcggggagccccgcttcatcgccgtgggctacgtggacgacacgcagttcgtgcggttcgacagcgacgccgcgagccagaggatggagccgcgggcgccgtggatagagcaggaggggccggagtattgggaccaggagacacggaatgtgaaggcccagtcacagactgaccgagtggacctggggaccctgcgcggctactacaaccagagcgaggccggttctcacaccatccagataatgtatggctgcgacgtggggtcggacgggcgctggctccgcagatacctggagaacgggaaggagacgctgcagcgcacgggtaccaggggccacggggcgcctccctgatcgcctgtagatctcccgggctggcctcccacaaggaggggagacaattgggaccaacactagaatatcaccctccctctggtcctgagggagaggaatcctcctgggttccagatcctgtaccagagagtgactctgaggttccgccctgctctctgacacaattaagggataaaatctctgaaggagtgacgggaagacgatccctcgaatactgatgagtggttccctttgacaccggcagcagccttgggcccgtgacttttcctctcaggccttgttctctgcttcacactcaatgtgtgtgggggtctgagtccagcacttctgagtccctcagcctccactcaggtcaggaccagaagtcgctgttcccttctcagggaatagaagattatcccaggtgcctgtgtccaggctggtgtctgggttctgtgctctcttccccatcccgggtgtcctgtccattctcaagatggccacatgcgtgctggtggagtgtcccatgacagatgcaaaatgcctgaattttctgactcttcccgtcagacccccccaagacacatatgacccaccaccccatctctgaccatgaggccaccctgaggtgctgggccctgggcttctaccctgcggagatcacactgacctggcagcgggatggggaggaccagacccaggacacggagctcgtggagaccaggcctgcaggggatggaaccttccagaagtgggcggctgtggtggtgccttctggagaggagcagagatacacctgccatgtgcagcatgagggtctgcccaagcccctcaccctgagatggggtaaggagggagatgggggtgtcatgtctcttagggaaagcaggagcctctctggagacctttagcagggtcagggcccctcaccttcccctcttttcccagagctgtcttcccagcccaccatccccatcgtgggcatcattgctggcctggttctccttggagctgtgatcactggagctgtggtcgctgccgtgatgtggaggaggaagagctcaggtggagaaggggtgaagggtggggtctgagatttcttgtctcactgagggttccaagccccagctagaaatgtgccctgtctcattactgggaagcaccgtccacaatcatgggcctacccagtctgggccctgtgtgccagcacttactcttttgtaaagcacctgttaaaatgaaggacagatttatcaccttgattacggcggtgatgggacctgatcccagcagtcacaagtcacaggggaaggtccctgaggacagacctcaggagggctattggtccaggacccacacctgctttcttcatgtttcctgatcccgccctgggtctgcagtcacacatttctggaaacttctctggggtccaagactaggaggttcctctaggaccttaaggccctggctcctttctggtatctcacaggacattttcttctcacagatagaaaaggagggagttacactcaggctgcaagtaagtatgaaggaggctgatgcctgaggtccttgggatattgtgtttgggagcccatgggggagcccacccacctcacaattcctcctctagccacatcttctgtgggatctgaccaggttctgtttttgttctaccccaggcagtgacagtgcccagggctctgatgtgtccctcacagcttgtaaaggtgagagcttggaggacctaatgtgtgttgggtgttgggcggaacagtggacacagctgtgctatggggtttctttgcattggatgtattgagcatgcgatgggctgtttaaggtgtgacccctcactgtgatggatatgaatttgttcatgaatatttttttctatagtgtgagacagctgccttgtgtgggactgagaggcaagagttgttcctgcccttccctttgtgacttgaagaaccctgactttgtttctgcaaaggcacctgcatgtgtctgtgttcgtgtaggcataatgtgaggaggtggggagaccaccccacccccatgtccaccatgaccctcttcccacgctgacctgtgctccctccccaatcatctttcctgttccagagaggtggggctgaggtgtctccatctctgtctcaacttcatggtgcactgagctgtaacttcttccttccctattaaaattagaaccttagtataaatttactttctcaaattcttgccatgagaggttgatgagttaattaaaggagaagattcctaaaatttgagagacaaaataaatggaagacatgagaaccttccagagtcca

SEQ ID NO: 4164 - protein, 157 aa, Homo sapiens; identical to SEQ ID NO: 4156

SEQ ID NO: 4165 - DNA, 2333 bp, Homo sapiens
aatcagtgtcgtcgcggtcgctgttctaaagcccgcacgcacccaccgggactcagattctccccagacgccgaggatggccgtcatggcgccccgaaccctcctcctgctactctcgggggccctggccctgacccagacctgggcgggctcccactccatgaggtatttcttcacatccgtgtcccggcccggccgcggggagccccgcttcatcgccgtgggctacgtggacgacacgcagttcgtgcggttcgacagcgacgccgcgagccagaggatggagccgcgggcgccgtggatagagcaggaggggccggagtattgggaccaggagacacggaatgtgaaggcccagtcacagactgaccgagtggacctggggaccctgcgcggctactacaaccagagcgaggccggttctcacaccatccagataatgtatggctgcgacgtggggtcggacgggcgcttcctccgcgggtaccggcaggacgcctacgacggcaaggattacatcgccctgaacgaggacctgcgctcttggaccgcggcggacatggcggctcagatcaccaagcacacatatgacccaccaccccatctctgaccatgaggccaccctgaggtgctgggccctgggcttctaccctgcggagatcacactgacctggcagcgggatggggaggaccagacccaggacacggagctcgtggagaccaggcctgcaggggatggaaccttccagaagtgggcggctgtggtggtgccttctggagaggagcagagatacacctgccatgtgcagcatgagggtctgcccaagcccctcaccctgagatggggtaaggagggagatgggggtgtcatgtctcttagggaaagcaggagcctctctggagacctttagcagggtcagggcccctcaccttcccctcttttcccagagctgtcttcccagcccaccatccccatcgtgggcatcattgctggcctggttctccttggagctgtgatcactggagctgtggtcgctgccgtgatgtggaggaggaagagctcaggtggagaaggggtgaagggtggggtctgagatttcttgtctcactgagggttccaagccccagctagaaatgtgccctgtctcattactgggaagcaccgtccacaatcatgggcctacccagtctgggccctgtgtgccagcacttactcttttgtaaagcacctgttaaaatgaaggacagatttatcaccttgattacggcggtgatgggacctgatcccagcagtcacaagtcacaggggaaggtccctgaggacagacctcaggagggctattggtccaggacccacacctgctttcttcatgtttcctgatcccgccctgggtctgcagtcacacatttctggaaacttctctggggtccaagactaggaggttcctctaggaccttaaggccctggctcctttctggtatctcacaggacattttcttctcacagatagaaaaggagggagttacactcaggctgcaagtaagtatgaaggaggctgatgcctgaggtccttgggatattgtgtttgggagcccatgggggagcccacccacctcacaattcctcctctagccacatcttctgtgggatctgaccaggttctgtttttgttctaccccaggcagtgacagtgcccagggctctgatgtgtccctcacagcttgtaaaggtgagagcttggaggacctaatgtgtgttgggtgttgggcggaacagtggacacagctgtgctatggggtttctttgcattggatgtattgagcatgcgatgggctgtttaaggtgtgacccctcactgtgatggatatgaatttgttcatgaatatttttttctatagtgtgagacagctgccttgtgtgggactgagaggcaagagttgttcctgcccttccctttgtgacttgaagaaccctgactttgtttctgcaaaggcacctgcatgtgtctgtgttcgtgtaggcataatgtgaggaggtggggagaccaccccacccccatgtccaccatgaccctcttcccacgctgacctgtgctccctccccaatcatctttcctgttccagagaggtggggctgaggtgtctccatctctgtctcaacttcatggtgcactgagctgtaacttcttccttccctattaaaattagaaccttagtataaatttactttctcaaattcttgccatgagaggttgatgagttaattaaaggagaagattcctaaaatttgagagacaaaataaatggaagacatgagaaccttccagagtcca

SEQ ID NO: 4166 - protein, 177 aa, Homo sapiens; identical to SEQ ID NO: 4158

SEQ ID NO: 4167 - DNA, 845 bp, Homo sapiens
aatcagtgtcgtcgcggtcgctgttctaaagcccgcacgcacccaccgggactcagattctccccagacgccgaggatggccgtcatggcgccccgaaccctcctcctgctactctcgggggccctggccctgacccagacctgggcgggctcccactccatgaggtatttcttcacatccgtgtcccggcccggccgcggggagccccgcttcatcgccgtgggctacgtggacgacacgcagttcgtgcggttcgacagcgacgccgcgagccagaggatggagccgcgggcgccgtggatagagcaggaggggccggagtattgggaccaggagacacggaatgtgaaggcccagtcacagactgaccgagtggacctggggaccctgcgcggctactacaaccagagcgaggccggttctcacaccatccagataatgtatggctgcgacgtggggtcggacgggcgcttcctccgcgggtaccggcaggacgcctacgacggcaaggattacatcgccctgaacgaggacctgcgctcttggaccgcggcggacatggcggctcagatcaccaagcgcaagtgggaggcggcccatgaggcggagcagtggtgccttctggagaggagcagagatacacctgccatgtgcagcatgagggtctgcccaagcccctcaccctgagatgggagctgtcttcccagcccaccatccccatcgtgggcatcattgctggcctggttctccttggagctgtgatcactggagctgtggtcgctgccgtgatgtggaggaggaagagctcagatagaaaaggagggagctactctcaggctgcaag

SEQ ID NO: 4168 - protein, 203 aa, Homo sapiens
MAVMAPRTLLLLLSGALALTQTWAGSHSMRYFFTSVSRPGRGEPRFIAVGYVDDTQFVRFDSDAASQRMEPRAPWIEQEGPEYWDQETRNVKAQSQTDRVDLGTLRGYYNQSEAGSHTIQIMYGCDVGSDGRFLRGYRQDAYDGKDYIALNEDLRSWTAADMAAQITKRKWEAAHEAEQWCLLERSRDTPAMCSMRVCPSPSP

SEQ ID NO: 4169 - DNA, 1918 bp, Homo sapiens
agattctccccagacgccgaggatggccgtcatggcgccccgaaccctcctcctgctactctcgggggccctggccctgacccagacctgggcgggctcccactccatgaggtatttcttcacatccgtgtcccggcccggccgcggggagccccgcttcatcgccgtgggctacgtggacgacacgcagttcgtgcggttcgacagcgacgccgcgagccagaggatggagccgcgggcgccgtggatagagcaggaggggccggagtattgggaccaggagacacggaatgtgaaggcccagtcacagactgaccgaatacctggagaacgggaaggagacgctgcagcgcacggacccccccaagacacatatgacccaccaccccatctctgaccatgaggccaccctgaggtgctgggccctgggcttctaccctgcggagatcacactgacctggcagcgggatggggaggaccagacccaggacacggagctcgtggagaccaggcctgcaggggatggaaccttccagaagtgggcggctgtggtggtgccttctggagaggagcagagatacacctgccatgtgcagcatgagggtctgcccaagcccctcaccctgagatgggagctgtcttcccagcccaccatccccatcgtgggcatcattgctggcctggttctccttggagctgtgatcactggagctgtggtcgctgccgtgatgtggaggaggaagagctcaggtggagaaggggtgaagggtggggtctgagatttcttgtctcactgagggttccaagccccagctagaaatgtgccctgtctcattactgggaagcaccgtccacaatcatgggcctacccagtctgggccctgtgtgccagcacttactcttttgtaaagcacctgttaaaatgaaggacagatttatcaccttgattacggcggtgatgggacctgatcccagcagtcacaagtcacaggggaaggtccctgaggacagacctcaggagggctattggtccaggacccacacctgctttcttcatgtttcctgatcccgccctgggtctgcagtcacacatttctggaaacttctctggggtccaagactaggaggttcctctaggaccttaaggccctggctcctttctggtatctcacaggacattttcttctcacagatagaaaaggagggagttacactcaggctgcaagtaagtatgaaggaggctgatgcctgaggtccttgggatattgtgtttgggagcccatgggggagcccacccacctcacaattcctcctctagccacatcttctgtgggatctgaccaggttctgtttttgttctaccccaggcagtgacagtgcccagggctctgatgtgtccctcacagcttgtaaaggtgagagcttggaggacctaatgtgtgttgggtgttgggcggaacagtggacacagctgtgctatggggtttctttgcattggatgtattgagcatgcgatgggctgtttaaggtgtgacccctcactgtgatggatatgaatttgttcatgaatatttttttctatagtgtgagacagctgccttgtgtgggactgagaggcaagagttgttcctgcccttccctttgtgacttgaagaaccctgactttgtttctgcaaaggcacctgcatgtgtctgtgttcgtgtaggcataatgtgaggaggtggggagaccaccccacccccatgtccaccatgaccctcttcccacgctgacctgtgctccctccccaatcatctttcctgttccagagaggtggggctgaggtgtctccatctctgtctcaacttcatggtgcactgagctgtaacttcttccttccctattaaaattagaaccttagtataaatttactttctc

SEQ ID NO: 4170 - protein, 134 aa, Homo sapiens
MTHHPISDHEATLRCWALGFYPAEITLTWQRDGEDQTQDTELVETRPAGDGTFQKWAAVVVPSGEEQRYTCHVQHEGLPKPLTLRWELSSQPTIPIVGIIAGLVLLGAVITGAVVAAVMWRRKSSGGEGVKGGV

SEQ ID NO: 4171 - DNA, 2545 bp, Homo sapiens
agattctccccagacgccgaggatggccgtcatggcgccccgaaccctcctcctgctactctcgggggccctggccctgacccagacctgggcgggctcccactccatgaggtatttcttcacatccgtgtcccggcccggccgcggggagccccgcttcatcgccgtgggctacgtggacgacacgcagttcgtgcggttcgacagcgacgccgcgagccagaggatggagccgcgggcgccgtggatagagcaggaggggccggagtattgggaccaggagacacggaatgtgaaggcccagtcacagactgaccgagtggacctggggaccctgcgcggctactacaaccagagcgaggccggtgagtgaccccggccgggggcgcaggtcaggacccctcatcccccacggacgggccaggtcgcccacagtctccgggtccgagatccaccccgaagccgcgggaccccgagacccttgccccgggagaggcccaggcgcctttacccggtttcattttcagtttaggccaaaaatccccccgggttggtcggggctgggcggggctcgggggactgggctgaccgcggggtcggggccaggttctcacaccatccagataatgtatggctgcgacgtggggtcggacgggcgcttcctccgcgggtaccggcaggacgcctacgacggcaaggattacatcgccctgaacgaggacctgcgctcttggaccgcggcggacatggcggctcagatcaccaagcgcaagtgggaggcggcccatgaggcggagcagttgagagcctacctggatggcacgtgcgtggagtggctccgcagatacctggagaacgggaaggagacgctgcagcgcacggacccccccaagacacatatgacccaccaccccatctctgaccatgaggccaccctgaggtgctgggccctgggcttctaccctgcggagatcacactgacctggcagcgggatggggaggaccagacccaggacacggagctcgtggagaccaggcctgcaggggatggaaccttccagaagtgggcggctgtggtggtgccttctggagaggagcagagatacacctgccatgtgcagcatgagggtctgcccaagcccctcaccctgagatggggtaaggagggagatgggggtgtcatgtctcttagggaaagcaggagcctctctggagacctttagcagggtcagggcccctcaccttcccctcttttcccagagctgtcttcccagcccaccatccccatcgtgggcatcattgctggcctggttctccttggagctgtgatcactggagctgtggtcgctgccgtgatgtggaggaggaagagctcaggtggagaaggggtgaagggtggggtctgagatttcttgtctcactgagggttccaagccccagctagaaatgtgccctgtctcattactgggaagcaccgtccacaatcatgggcctacccagtctgggccctgtgtgccagcacttactcttttgtaaagcacctgttaaaatgaaggacagatttatcaccttgattacggcggtgatgggacctgatcccagcagtcacaagtcacaggggaaggtccctgaggacagacctcaggagggctattggtccaggacccacacctgctttcttcatgtttcctgatcccgccctgggtctgcagtcacacatttctggaaacttctctggggtccaagactaggaggttcctctaggaccttaaggccctggctcctttctggtatctcacaggacattttcttctcacagatagaaaaggagggagttacactcaggctgcaagtaagtatgaaggaggctgatgcctgaggtccttgggatattgtgtttgggagcccatgggggagcccacccacctcacaattcctcctctagccacatcttctgtgggatctgaccaggttctgtttttgttctaccccaggcagtgacagtgcccagggctctgatgtgtccctcacagcttgtaaaggtgagagcttggaggacctaatgtgtgttgggtgttgggcggaacagtggacacagctgtgctatggggtttctttgcattggatgtattgagcatgcgatgggctgtttaaggtgtgacccctcactgtgatggatatgaatttgttcatgaatatttttttctatagtgtgagacagctgccttgtgtgggactgagaggcaagagttgttcctgcccttccctttgtgacttgaagaaccctgactttgtttctgcaaaggcacctgcatgtgtctgtgttcgtgtaggcataatgtgaggaggtggggagaccaccccacccccatgtccaccatgaccctcttcccacgctgacctgtgctccctccccaatcatctttcctgttccagagaggtggggctgaggtgtctccatctctgtctcaacttcatggtgcactgagctgtaacttcttccttccctattaaaattagaaccttagtataaatttactttctc

SEQ ID NO: 4172 - protein, 198 aa, Homo sapiens
MYGCDVGSDGRFLRGYRQDAYDGKDYIALNEDLRSWTAADMAAQITKRKWEAAHEAEQLRAYLDGTCVEWLRRYLENGKETLQRTDPPKTHMTHHPISDHEATLRCWALGFYPAEITLTWQRDGEDQTQDTELVETRPAGDGTFQKWAAVVVPSGEEQRYTCHVQHEGLPKPLTLRWGKEGDGGVMSLRESRSLSGDL

SEQ ID NO: 4173 - DNA, 1967 bp, Homo sapiens
agattctccccagacgccgaggatggccgtcatggcgccccgaaccctcctcctgctactctcgggggccctggccctgacccagacctgggcgggctcccactccatgaggtatttcttcacatccgtgtcccggcccggccgcggggagccccgcttcatcgccgtgggctacgtggacgacacgcagttcgtgcggttcgacagcgacgccgcgagccagaggatggagccgcgggcgccgtggatagagcaggaggggccggagtattgggaccaggagacacggaatgtgaaggcccagtcacagactgaccgaatacctggagaacgggaaggagacgctgcagcgcacggacccccccaagacacatatgacccaccaccccatctctgaccatgaggccaccctgaggtgctgggccctgggcttctaccctgcggagatcacactgacctggcagcgggatggggaggaccagacccaggacacggagctcgtggagaccaggcctgcaggggatggaaccttccagaagtgggcggctgtggtggtgccttctggagaggagcagagatacacctgccatgtgcagcatgagggtctgcccaagcccctcaccctgagatgggagctgtcttcccagcccaccatccccatcgtgggcatcattgctggcctggttctccttggagctgtgatcactggagctgtggtcgctgccgtgatgtggaggaggaagagctcaggtggagaaggggtgaagggtggggtctgagatttcttgtctcactgagggttccaagccccagctagaaatgtgccctgtctcattactgggaagcaccgtccacaatcatgggcctacccagtctgggccctgtgtgccagcacttactcttttgtaaagcacctgttaaaatgaaggacagatttatcaccttgattacggcggtgatgggacctgatcccagcagtcacaagtcacaggggaaggtccctgaggacagacctcaggagggctattggtccaggacccacacctgctttcttcatgtttcctgatcccgccctgggtctgcagtcacacatttctggaaacttctctggggtccaagactaggaggttcctctaggaccttaaggccctggctcctttctggtatctcacaggacattttcttctcacagatagaaaaggagggagttacactcaggctgcaagtaagtatgaaggaggctgatgcctgaggtccttgggatattgtgtttgggagcccatgggggagcccacccacctcacaattcctcctctagccacatcttctgtgggatctgaccaggttctgtttttgttctaccccaggcagtgacagtgcccagggctctgatgtgtccctcacagcttgtaaaggtgagagcttggaggacctaatgtgtgttgggtgttgggcggaacagtggacacagctgtgctatggggtttctttgcattggatgtattgagcatgcgatgggctgtttaaggtgtgacccctcactgtgatggatatgaatttgttcatgaatatttttttctatagtgtgagacagctgccttgtgtgggactgagaggcaagagttgttcctgcccttccctttgtgacttgaagaaccctgactttgtttctgcaaaggcacctgcatgtgtctgtgttcgtgtaggcataatgtgaggaggtggggagaccaccccacccccatgtccaccatgaccctcttcccacgctgacctgtgctccctccccaatcatctttcctgttccagagaggtggggctgaggtgtctccatctctgtctcaacttcatggtgcactgagctgtaacttcttccttccctattaaaattagaaccttagtataaatttactttctcaaattcttgccatgagaggttgatgagttaattaaaggagaagattcct

SEQ ID NO: 4174 - protein, 134 aa, Homo sapiens; identical to SEQ ID NO: 4170

SEQ ID NO: 4175 - DNA, 2594 bp, Homo sapiens
agattctccccagacgccgaggatggccgtcatggcgccccgaaccctcctcctgctactctcgggggccctggccctgacccagacctgggcgggctcccactccatgaggtatttcttcacatccgtgtcccggcccggccgcggggagccccgcttcatcgccgtgggctacgtggacgacacgcagttcgtgcggttcgacagcgacgccgcgagccagaggatggagccgcgggcgccgtggatagagcaggaggggccggagtattgggaccaggagacacggaatgtgaaggcccagtcacagactgaccgagtggacctggggaccctgcgcggctactacaaccagagcgaggccggtgagtgaccccggccgggggcgcaggtcaggacccctcatcccccacggacgggccaggtcgcccacagtctccgggtccgagatccaccccgaagccgcgggaccccgagacccttgccccgggagaggcccaggcgcctttacccggtttcattttcagtttaggccaaaaatccccccgggttggtcggggctgggcggggctcgggggactgggctgaccgcggggtcggggccaggttctcacaccatccagataatgtatggctgcgacgtggggtcggacgggcgcttcctccgcgggtaccggcaggacgcctacgacggcaaggattacatcgccctgaacgaggacctgcgctcttggaccgcggcggacatggcggctcagatcaccaagcgcaagtgggaggcggcccatgaggcggagcagttgagagcctacctggatggcacgtgcgtggagtggctccgcagatacctggagaacgggaaggagacgctgcagcgcacggacccccccaagacacatatgacccaccaccccatctctgaccatgaggccaccctgaggtgctgggccctgggcttctaccctgcggagatcacactgacctggcagcgggatggggaggaccagacccaggacacggagctcgtggagaccaggcctgcaggggatggaaccttccagaagtgggcggctgtggtggtgccttctggagaggagcagagatacacctgccatgtgcagcatgagggtctgcccaagcccctcaccctgagatggggtaaggagggagatgggggtgtcatgtctcttagggaaagcaggagcctctctggagacctttagcagggtcagggcccctcaccttcccctcttttcccagagctgtcttcccagcccaccatccccatcgtgggcatcattgctggcctggttctccttggagctgtgatcactggagctgtggtcgctgccgtgatgtggaggaggaagagctcaggtggagaaggggtgaagggtggggtctgagatttcttgtctcactgagggttccaagccccagctagaaatgtgccctgtctcattactgggaagcaccgtccacaatcatgggcctacccagtctgggccctgtgtgccagcacttactcttttgtaaagcacctgttaaaatgaaggacagatttatcaccttgattacggcggtgatgggacctgatcccagcagtcacaagtcacaggggaaggtccctgaggacagacctcaggagggctattggtccaggacccacacctgctttcttcatgtttcctgatcccgccctgggtctgcagtcacacatttctggaaacttctctggggtccaagactaggaggttcctctaggaccttaaggccctggctcctttctggtatctcacaggacattttcttctcacagatagaaaaggagggagttacactcaggctgcaagtaagtatgaaggaggctgatgcctgaggtccttgggatattgtgtttgggagcccatgggggagcccacccacctcacaattcctcctctagccacatcttctgtgggatctgaccaggttctgtttttgttctaccccaggcagtgacagtgcccagggctctgatgtgtccctcacagcttgtaaaggtgagagcttggaggacctaatgtgtgttgggtgttgggcggaacagtggacacagctgtgctatggggtttctttgcattggatgtattgagcatgcgatgggctgtttaaggtgtgacccctcactgtgatggatatgaatttgttcatgaatatttttttctatagtgtgagacagctgccttgtgtgggactgagaggcaagagttgttcctgcccttccctttgtgacttgaagaaccctgactttgtttctgcaaaggcacctgcatgtgtctgtgttcgtgtaggcataatgtgaggaggtggggagaccaccccacccccatgtccaccatgaccctcttcccacgctgacctgtgctccctccccaatcatctttcctgttccagagaggtggggctgaggtgtctccatctctgtctcaacttcatggtgcactgagctgtaacttcttccttccctattaaaattagaaccttagtataaatttactttctcaaattcttgccatgagaggttgatgagttaattaaaggagaagattcct

SEQ ID NO: 4176 - protein, 198 aa, Homo sapiens; identical to SEQ ID NO: 4172

SEQ ID NO: 4177 - DNA, 2018 bp, Homo sapiens
agattctccccagacgccgaggatggccgtcatggcgccccgaaccctcctcctgctactctcgggggccctggccctgacccagacctgggcgggctcccactccatgaggtatttcttcacatccgtgtcccggcccggccgcggggagccccgcttcatcgccgtgggctacgtggacgacacgcagttcgtgcggttcgacagcgacgccgcgagccagaggatggagccgcgggcgccgtggatagagcaggaggggccggagtattgggaccaggagacacggaatgtgaaggcccagtcacagactgaccgaatacctggagaacgggaaggagacgctgcagcgcacggacccccccaagacacatatgacccaccaccccatctctgaccatgaggccaccctgaggtgctgggccctgggcttctaccctgcggagatcacactgacctggcagcgggatggggaggaccagacccaggacacggagctcgtggagaccaggcctgcaggggatggaaccttccagaagtgggcggctgtggtggtgccttctggagaggagcagagatacacctgccatgtgcagcatgagggtctgcccaagcccctcaccctgagatgggagctgtcttcccagcccaccatccccatcgtgggcatcattgctggcctggttctccttggagctgtgatcactggagctgtggtcgctgccgtgatgtggaggaggaagagctcaggtggagaaggggtgaagggtggggtctgagatttcttgtctcactgagggttccaagccccagctagaaatgtgccctgtctcattactgggaagcaccgtccacaatcatgggcctacccagtctgggccctgtgtgccagcacttactcttttgtaaagcacctgttaaaatgaaggacagatttatcaccttgattacggcggtgatgggacctgatcccagcagtcacaagtcacaggggaaggtccctgaggacagacctcaggagggctattggtccaggacccacacctgctttcttcatgtttcctgatcccgccctgggtctgcagtcacacatttctggaaacttctctggggtccaagactaggaggttcctctaggaccttaaggccctggctcctttctggtatctcacaggacattttcttctcacagatagaaaaggagggagttacactcaggctgcaagtaagtatgaaggaggctgatgcctgaggtccttgggatattgtgtttgggagcccatgggggagcccacccacctcacaattcctcctctagccacatcttctgtgggatctgaccaggttctgtttttgttctaccccaggcagtgacagtgcccagggctctgatgtgtccctcacagcttgtaaaggtgagagcttggaggacctaatgtgtgttgggtgttgggcggaacagtggacacagctgtgctatggggtttctttgcattggatgtattgagcatgcgatgggctgtttaaggtgtgacccctcactgtgatggatatgaatttgttcatgaatatttttttctatagtgtgagacagctgccttgtgtgggactgagaggcaagagttgttcctgcccttccctttgtgacttgaagaaccctgactttgtttctgcaaaggcacctgcatgtgtctgtgttcgtgtaggcataatgtgaggaggtggggagaccaccccacccccatgtccaccatgaccctcttcccacgctgacctgtgctccctccccaatcatctttcctgttccagagaggtggggctgaggtgtctccatctctgtctcaacttcatggtgcactgagctgtaacttcttccttccctattaaaattagaaccttagtataaatttactttctcaaattcttgccatgagaggttgatgagttaattaaaggagaagattcctaaaatttgagagacaaaataaatggaagacatgagaaccttccagagtcca

SEQ ID NO: 4178 - protein, 134 aa, Homo sapiens; identical to SEQ ID NO: 4170

SEQ ID NO: 4179 - DNA, 2645 bp, Homo sapiens
agattctccccagacgccgaggatggccgtcatggcgccccgaaccctcctcctgctactctcgggggccctggccctgacccagacctgggcgggctcccactccatgaggtatttcttcacatccgtgtcccggcccggccgcggggagccccgcttcatcgccgtgggctacgtggacgacacgcagttcgtgcggttcgacagcgacgccgcgagccagaggatggagccgcgggcgccgtggatagagcaggaggggccggagtattgggaccaggagacacggaatgtgaaggcccagtcacagactgaccgagtggacctggggaccctgcgcggctactacaaccagagcgaggccggtgagtgaccccggccgggggcgcaggtcaggacccctcatcccccacggacgggccaggtcgcccacagtctccgggtccgagatccaccccgaagccgcgggaccccgagacccttgccccgggagaggcccaggcgcctttacccggtttcattttcagtttaggccaaaaatccccccgggttggtcggggctgggcggggctcgggggactgggctgaccgcggggtcggggccaggttctcacaccatccagataatgtatggctgcgacgtggggtcggacgggcgcttcctccgcgggtaccggcaggacgcctacgacggcaaggattacatcgccctgaacgaggacctgcgctcttggaccgcggcggacatggcggctcagatcaccaagcgcaagtgggaggcggcccatgaggcggagcagttgagagcctacctggatggcacgtgcgtggagtggctccgcagatacctggagaacgggaaggagacgctgcagcgcacggacccccccaagacacatatgacccaccaccccatctctgaccatgaggccaccctgaggtgctgggccctgggcttctaccctgcggagatcacactgacctggcagcgggatggggaggaccagacccaggacacggagctcgtggagaccaggcctgcaggggatggaaccttccagaagtgggcggctgtggtggtgccttctggagaggagcagagatacacctgccatgtgcagcatgagggtctgcccaagcccctcaccctgagatggggtaaggagggagatgggggtgtcatgtctcttagggaaagcaggagcctctctggagacctttagcagggtcagggcccctcaccttcccctcttttcccagagctgtcttcccagcccaccatccccatcgtgggcatcattgctggcctggttctccttggagctgtgatcactggagctgtggtcgctgccgtgatgtggaggaggaagagctcaggtggagaaggggtgaagggtggggtctgagatttcttgtctcactgagggttccaagccccagctagaaatgtgccctgtctcattactgggaagcaccgtccacaatcatgggcctacccagtctgggccctgtgtgccagcacttactcttttgtaaagcacctgttaaaatgaaggacagatttatcaccttgattacggcggtgatgggacctgatcccagcagtcacaagtcacaggggaaggtccctgaggacagacctcaggagggctattggtccaggacccacacctgctttcttcatgtttcctgatcccgccctgggtctgcagtcacacatttctggaaacttctctggggtccaagactaggaggttcctctaggaccttaaggccctggctcctttctggtatctcacaggacattttcttctcacagatagaaaaggagggagttacactcaggctgcaagtaagtatgaaggaggctgatgcctgaggtccttgggatattgtgtttgggagcccatgggggagcccacccacctcacaattcctcctctagccacatcttctgtgggatctgaccaggttctgtttttgttctaccccaggcagtgacagtgcccagggctctgatgtgtccctcacagcttgtaaaggtgagagcttggaggacctaatgtgtgttgggtgttgggcggaacagtggacacagctgtgctatggggtttctttgcattggatgtattgagcatgcgatgggctgtttaaggtgtgacccctcactgtgatggatatgaatttgttcatgaatatttttttctatagtgtgagacagctgccttgtgtgggactgagaggcaagagttgttcctgcccttccctttgtgacttgaagaaccctgactttgtttctgcaaaggcacctgcatgtgtctgtgttcgtgtaggcataatgtgaggaggtggggagaccaccccacccccatgtccaccatgaccctcttcccacgctgacctgtgctccctccccaatcatctttcctgttccagagaggtggggctgaggtgtctccatctctgtctcaacttcatggtgcactgagctgtaacttcttccttccctattaaaattagaaccttagtataaatttactttctcaaattcttgccatgagaggttgatgagttaattaaaggagaagattcctaaaatttgagagacaaaataaatggaagacatgagaaccttccagagtcca

SEQ ID NO: 4180 - protein, 198 aa, Homo sapiens; identical to SEQ ID NO: 4172

SEQ ID NO: 4181 - DNA, 639 bp, Homo sapiens
agattctccccagacgccgaggatggccgtcatggcgccccgaaccctcctcctgctactctcgggggccctggccctgacccagacctgggcgggctcccactccatgaggtatttcttcacatccgtgtcccggcccggccgcggggagccccgcttcatcgccgtgggctacgtggacgacacgcagttcgtgcggttcgacagcgacgccgcgagccagaggatggagccgcgggcgccgtggatagagcaggaggggccggagtattgggaccaggagacacggaatgtgaaggcccagtcacagactgaccgagtggacctggggaccctgcgcggctactacaaccagagcgaggccggtgagtgaccccgcctcttcccacgctgacctgtgctccctccccaatcatctttcctgttccagagaggtggggctgaggtgtctccatctctgtctcaacttcatggtgcactgagctgtaacttcttccttccctattaaaattagaaccttagtataaatttactttctcaaattcttgccatgagaggttgatgagttaattaaaggagaagattcctaaaatttgagagacaaaataaatggaagacatgagaaccttccagagtcca

SEQ ID NO: 4182 - protein, 116 aa, Homo sapiens
MAVMAPRTLLLLLSGALALTQTWAGSHSMRYFFTSVSRPGRGEPRFIAVGYVDDTQFVRFDSDAASQRMEPRAPWIEQEGPEYWDQETRNVKAQSQTDRVDLGTLRGYYNQSEAGE

SEQ ID NO: 4183 - DNA, 2784 bp, Homo sapiens
attctccccagacgccgaggatggccgtcatggcgccccgaaccctcctcctgctactctcgggggccctggccctgacccagacctgggcgggctcccactccatgagcgacgccgcgagccagaggatggagccgcgggcgccgtggatagagcaggaggggccggagtattgggaccaggagacacggaatgtgaaggcccagtcacagactgaccgagtggacctggggaccctgcgcggctactacaaccagagcgaggccggttctcacaccatccagataatgtatggctgcgacgtggggtcggacgggcgcttcctccgcgggtaccggcaggacgcctacgacggcaaggattacatcgccctgaacgaggacctgcgctcttggaccgcggcggacatggcggctcagatcaccaagcgcaagtgggaggcggcccatgaggcggagcagttgagagcctacctggatggcacgtgcgtggagtggctccgcagatacctggagaacgggaaggagacgctgcagcgcacgggtaccaggggccacggggcgcctccctgatcgcctgtagatctcccgggctggcctcccacaaggaggggagacaattgggaccaacactagaatatcaccctccctctggtcctgagggagaggaatcctcctgggttccagatcctgtaccagagagtgactctgaggttccgccctgctctctgacacaattaagggataaaatctctgaaggagtgacgggaagacgatccctcgaatactgatgagtggttccctttgacaccggcagcagccttgggcccgtgacttttcctctcaggccttgttctctgcttcacactcaatgtgtgtgggggtctgagtccagcacttctgagtccctcagcctccactcaggtcaggaccagaagtcgctgttcccttctcagggaatagaagattatcccaggtgcctgtgtccaggctggtgtctgggttctgtgctctcttccccatcccgggtgtcctgtccattctcaagatggccacatgcgtgctggtggagtgtcccatgacagatgcaaaatgcctgaattttctgactcttcccgtcagacccccccaagacacatatgacccaccaccccatctctgaccatgaggccaccctgaggtgctgggccctgggcttctaccctgcggagatcacactgacctggcagcgggatggggaggaccagacccaggacacggagctcgtggagaccaggcctgcaggggatggaaccttccagaagtgggcggctgtggtggtgccttctggagaggagcagagatacacctgccatgtgcagcatgagggtctgcccaagcccctcaccctgagatggggtaaggagggagatgggggtgtcatgtctcttagggaaagcaggagcctctctggagacctttagcagggtcagggcccctcaccttcccctcttttcccagagctgtcttcccagcccaccatccccatcgtgggcatcattgctggcctggttctccttggagctgtgatcactggagctgtggtcgctgccgtgatgtggaggaggaagagctcaggtggagaaggggtgaagggtggggtctgagatttcttgtctcactgagggttccaagccccagctagaaatgtgccctgtctcattactgggaagcaccgtccacaatcatgggcctacccagtctgggccctgtgtgccagcacttactcttttgtaaagcacctgttaaaatgaaggacagatttatcaccttgattacggcggtgatgggacctgatcccagcagtcacaagtcacaggggaaggtccctgaggacagacctcaggagggctattggtccaggacccacacctgctttcttcatgtttcctgatcccgccctgggtctgcagtcacacatttctggaaacttctctggggtccaagactaggaggttcctctaggaccttaaggccctggctcctttctggtatctcacaggacattttcttctcacagatagaaaaggagggagttacactcaggctgcaagtaagtatgaaggaggctgatgcctgaggtccttgggatattgtgtttgggagcccatgggggagcccacccacctcacaattcctcctctagccacatcttctgtgggatctgaccaggttctgtttttgttctaccccaggcagtgacagtgcccagggctctgatgtgtccctcacagcttgtaaaggtgagagcttggaggacctaatgtgtgttgggtgttgggcggaacagtggacacagctgtgctatggggtttctttgcattggatgtattgagcatgcgatgggctgtttaaggtgtgacccctcactgtgatggatatgaatttgttcatgaatatttttttctatagtgtgagacagctgccttgtgtgggactgagaggcaagagttgttcctgcccttccctttgtgacttgaagaaccctgactttgtttctgcaaaggcacctgcatgtgtctgtgttcgtgtaggcataatgtgaggaggtggggagaccaccccacccccatgtccaccatgaccctcttcccacgctgacctgtgctccctccccaatcatctttcctgttccagagaggtggggctgaggtgtctccatctctgtctcaacttcatggtgcactgagctgtaacttcttccttccctattaaaattagaaccttagtataaatttactttctc

SEQ ID NO: 4184 - protein, 183 aa, Homo sapiens
MAVMAPRTLLLLLSGALALTQTWAGSHSMSDAASQRMEPRAPWIEQEGPEYWDQETRNVKAQSQTDRVDLGTLRGYYNQSEAGSHTIQIMYGCDVGSDGRFLRGYRQDAYDGKDYIALNEDLRSWTAADMAAQITKRKWEAAHEAEQLRAYLDGTCVEWLRRYLENGKETLQRTGTRGHGAPP

SEQ ID NO: 4185 - DNA, 2833 bp, Homo sapiens
attctccccagacgccgaggatggccgtcatggcgccccgaaccctcctcctgctactctcgggggccctggccctgacccagacctgggcgggctcccactccatgagcgacgccgcgagccagaggatggagccgcgggcgccgtggatagagcaggaggggccggagtattgggaccaggagacacggaatgtgaaggcccagtcacagactgaccgagtggacctggggaccctgcgcggctactacaaccagagcgaggccggttctcacaccatccagataatgtatggctgcgacgtggggtcggacgggcgcttcctccgcgggtaccggcaggacgcctacgacggcaaggattacatcgccctgaacgaggacctgcgctcttggaccgcggcggacatggcggctcagatcaccaagcgcaagtgggaggcggcccatgaggcggagcagttgagagcctacctggatggcacgtgcgtggagtggctccgcagatacctggagaacgggaaggagacgctgcagcgcacgggtaccaggggccacggggcgcctccctgatcgcctgtagatctcccgggctggcctcccacaaggaggggagacaattgggaccaacactagaatatcaccctccctctggtcctgagggagaggaatcctcctgggttccagatcctgtaccagagagtgactctgaggttccgccctgctctctgacacaattaagggataaaatctctgaaggagtgacgggaagacgatccctcgaatactgatgagtggttccctttgacaccggcagcagccttgggcccgtgacttttcctctcaggccttgttctctgcttcacactcaatgtgtgtgggggtctgagtccagcacttctgagtccctcagcctccactcaggtcaggaccagaagtcgctgttcccttctcagggaatagaagattatcccaggtgcctgtgtccaggctggtgtctgggttctgtgctctcttccccatcccgggtgtcctgtccattctcaagatggccacatgcgtgctggtggagtgtcccatgacagatgcaaaatgcctgaattttctgactcttcccgtcagacccccccaagacacatatgacccaccaccccatctctgaccatgaggccaccctgaggtgctgggccctgggcttctaccctgcggagatcacactgacctggcagcgggatggggaggaccagacccaggacacggagctcgtggagaccaggcctgcaggggatggaaccttccagaagtgggcggctgtggtggtgccttctggagaggagcagagatacacctgccatgtgcagcatgagggtctgcccaagcccctcaccctgagatggggtaaggagggagatgggggtgtcatgtctcttagggaaagcaggagcctctctggagacctttagcagggtcagggcccctcaccttcccctcttttcccagagctgtcttcccagcccaccatccccatcgtgggcatcattgctggcctggttctccttggagctgtgatcactggagctgtggtcgctgccgtgatgtggaggaggaagagctcaggtggagaaggggtgaagggtggggtctgagatttcttgtctcactgagggttccaagccccagctagaaatgtgccctgtctcattactgggaagcaccgtccacaatcatgggcctacccagtctgggccctgtgtgccagcacttactcttttgtaaagcacctgttaaaatgaaggacagatttatcaccttgattacggcggtgatgggacctgatcccagcagtcacaagtcacaggggaaggtccctgaggacagacctcaggagggctattggtccaggacccacacctgctttcttcatgtttcctgatcccgccctgggtctgcagtcacacatttctggaaacttctctggggtccaagactaggaggttcctctaggaccttaaggccctggctcctttctggtatctcacaggacattttcttctcacagatagaaaaggagggagttacactcaggctgcaagtaagtatgaaggaggctgatgcctgaggtccttgggatattgtgtttgggagcccatgggggagcccacccacctcacaattcctcctctagccacatcttctgtgggatctgaccaggttctgtttttgttctaccccaggcagtgacagtgcccagggctctgatgtgtccctcacagcttgtaaaggtgagagcttggaggacctaatgtgtgttgggtgttgggcggaacagtggacacagctgtgctatggggtttctttgcattggatgtattgagcatgcgatgggctgtttaaggtgtgacccctcactgtgatggatatgaatttgttcatgaatatttttttctatagtgtgagacagctgccttgtgtgggactgagaggcaagagttgttcctgcccttccctttgtgacttgaagaaccctgactttgtttctgcaaaggcacctgcatgtgtctgtgttcgtgtaggcataatgtgaggaggtggggagaccaccccacccccatgtccaccatgaccctcttcccacgctgacctgtgctccctccccaatcatctttcctgttccagagaggtggggctgaggtgtctccatctctgtctcaacttcatggtgcactgagctgtaacttcttccttccctattaaaattagaaccttagtataaatttactttctcaaattcttgccatgagaggttgatgagttaattaaaggagaagattcct

SEQ ID NO: 4186 - protein, 183 aa, Homo sapiens; identical to SEQ ID NO: 4184

SEQ ID NO: 4187 - DNA, 2884 bp, Homo sapiens
attctccccagacgccgaggatggccgtcatggcgccccgaaccctcctcctgctactctcgggggccctggccctgacccagacctgggcgggctcccactccatgagcgacgccgcgagccagaggatggagccgcgggcgccgtggatagagcaggaggggccggagtattgggaccaggagacacggaatgtgaaggcccagtcacagactgaccgagtggacctggggaccctgcgcggctactacaaccagagcgaggccggttctcacaccatccagataatgtatggctgcgacgtggggtcggacgggcgcttcctccgcgggtaccggcaggacgcctacgacggcaaggattacatcgccctgaacgaggacctgcgctcttggaccgcggcggacatggcggctcagatcaccaagcgcaagtgggaggcggcccatgaggcggagcagttgagagcctacctggatggcacgtgcgtggagtggctccgcagatacctggagaacgggaaggagacgctgcagcgcacgggtaccaggggccacggggcgcctccctgatcgcctgtagatctcccgggctggcctcccacaaggaggggagacaattgggaccaacactagaatatcaccctccctctggtcctgagggagaggaatcctcctgggttccagatcctgtaccagagagtgactctgaggttccgccctgctctctgacacaattaagggataaaatctctgaaggagtgacgggaagacgatccctcgaatactgatgagtggttccctttgacaccggcagcagccttgggcccgtgacttttcctctcaggccttgttctctgcttcacactcaatgtgtgtgggggtctgagtccagcacttctgagtccctcagcctccactcaggtcaggaccagaagtcgctgttcccttctcagggaatagaagattatcccaggtgcctgtgtccaggctggtgtctgggttctgtgctctcttccccatcccgggtgtcctgtccattctcaagatggccacatgcgtgctggtggagtgtcccatgacagatgcaaaatgcctgaattttctgactcttcccgtcagacccccccaagacacatatgacccaccaccccatctctgaccatgaggccaccctgaggtgctgggccctgggcttctaccctgcggagatcacactgacctggcagcgggatggggaggaccagacccaggacacggagctcgtggagaccaggcctgcaggggatggaaccttccagaagtgggcggctgtggtggtgccttctggagaggagcagagatacacctgccatgtgcagcatgagggtctgcccaagcccctcaccctgagatggggtaaggagggagatgggggtgtcatgtctcttagggaaagcaggagcctctctggagacctttagcagggtcagggcccctcaccttcccctcttttcccagagctgtcttcccagcccaccatccccatcgtgggcatcattgctggcctggttctccttggagctgtgatcactggagctgtggtcgctgccgtgatgtggaggaggaagagctcaggtggagaaggggtgaagggtggggtctgagatttcttgtctcactgagggttccaagccccagctagaaatgtgccctgtctcattactgggaagcaccgtccacaatcatgggcctacccagtctgggccctgtgtgccagcacttactcttttgtaaagcacctgttaaaatgaaggacagatttatcaccttgattacggcggtgatgggacctgatcccagcagtcacaagtcacaggggaaggtccctgaggacagacctcaggagggctattggtccaggacccacacctgctttcttcatgtttcctgatcccgccctgggtctgcagtcacacatttctggaaacttctctggggtccaagactaggaggttcctctaggaccttaaggccctggctcctttctggtatctcacaggacattttcttctcacagatagaaaaggagggagttacactcaggctgcaagtaagtatgaaggaggctgatgcctgaggtccttgggatattgtgtttgggagcccatgggggagcccacccacctcacaattcctcctctagccacatcttctgtgggatctgaccaggttctgtttttgttctaccccaggcagtgacagtgcccagggctctgatgtgtccctcacagcttgtaaaggtgagagcttggaggacctaatgtgtgttgggtgttgggcggaacagtggacacagctgtgctatggggtttctttgcattggatgtattgagcatgcgatgggctgtttaaggtgtgacccctcactgtgatggatatgaatttgttcatgaatatttttttctatagtgtgagacagctgccttgtgtgggactgagaggcaagagttgttcctgcccttccctttgtgacttgaagaaccctgactttgtttctgcaaaggcacctgcatgtgtctgtgttcgtgtaggcataatgtgaggaggtggggagaccaccccacccccatgtccaccatgaccctcttcccacgctgacctgtgctccctccccaatcatctttcctgttccagagaggtggggctgaggtgtctccatctctgtctcaacttcatggtgcactgagctgtaacttcttccttccctattaaaattagaaccttagtataaatttactttctcaaattcttgccatgagaggttgatgagttaattaaaggagaagattcctaaaatttgagagacaaaataaatggaagacatgagaaccttccagagtcca

SEQ ID NO: 4188 - protein, 183 aa, Homo sapiens; identical to SEQ ID NO: 4184

SEQ ID NO: 4189 - DNA, 2701 bp, Homo sapiens
cgccgaggatggccgtcatggcgccccgaaccctcctcctgctactctcgggggccctggccctgacccagacctgggcgggctcccactccatgagcgaggccgtttaggccaaaaatccccccgggttggtcggggctgggcggggctcgggggactgggctgaccgcggggtcggggccaggttctcacaccatccagataatgtatggctgcgacgtggggtcggacgggcgcttcctccgcgggtaccggcaggacgcctacgacggcaaggattacatcgccctgaacgaggacctgcgctcttggaccgcggcggacatggcggctcagatcaccaagcgcaagtgggaggcggcccatgaggcggagcagttgagagcctacctggatggcacgtgcgtggagtggctccgcagatacctggagaacgggaaggagacgctgcagcgcacgggtaccaggggccacggggcgcctccctgatcgcctgtagatctcccgggctggcctcccacaaggaggggagacaattgggaccaacactagaatatcaccctccctctggtcctgagggagaggaatcctcctgggttccagatcctgtaccagagagtgactctgaggttccgccctgctctctgacacaattaagggataaaatctctgaaggagtgacgggaagacgatccctcgaatactgatgagtggttccctttgacaccggcagcagccttgggcccgtgacttttcctctcaggccttgttctctgcttcacactcaatgtgtgtgggggtctgagtccagcacttctgagtccctcagcctccactcaggtcaggaccagaagtcgctgttcccttctcagggaatagaagattatcccaggtgcctgtgtccaggctggtgtctgggttctgtgctctcttccccatcccgggtgtcctgtccattctcaagatggccacatgcgtgctggtggagtgtcccatgacagatgcaaaatgcctgaattttctgactcttcccgtcagacccccccaagacacatatgacccaccaccccatctctgaccatgaggccaccctgaggtgctgggccctgggcttctaccctgcggagatcacactgacctggcagcgggatggggaggaccagacccaggacacggagctcgtggagaccaggcctgcaggggatggaaccttccagaagtgggcggctgtggtggtgccttctggagaggagcagagatacacctgccatgtgcagcatgagggtctgcccaagcccctcaccctgagatggggtaaggagggagatgggggtgtcatgtctcttagggaaagcaggagcctctctggagacctttagcagggtcagggcccctcaccttcccctcttttcccagagctgtcttcccagcccaccatccccatcgtgggcatcattgctggcctggttctccttggagctgtgatcactggagctgtggtcgctgccgtgatgtggaggaggaagagctcaggtggagaaggggtgaagggtggggtctgagatttcttgtctcactgagggttccaagccccagctagaaatgtgccctgtctcattactgggaagcaccgtccacaatcatgggcctacccagtctgggccctgtgtgccagcacttactcttttgtaaagcacctgttaaaatgaaggacagatttatcaccttgattacggcggtgatgggacctgatcccagcagtcacaagtcacaggggaaggtccctgaggacagacctcaggagggctattggtccaggacccacacctgctttcttcatgtttcctgatcccgccctgggtctgcagtcacacatttctggaaacttctctggggtccaagactaggaggttcctctaggaccttaaggccctggctcctttctggtatctcacaggacattttcttctcacagatagaaaaggagggagttacactcaggctgcaagtaagtatgaaggaggctgatgcctgaggtccttgggatattgtgtttgggagcccatgggggagcccacccacctcacaattcctcctctagccacatcttctgtgggatctgaccaggttctgtttttgttctaccccaggcagtgacagtgcccagggctctgatgtgtccctcacagcttgtaaaggtgagagcttggaggacctaatgtgtgttgggtgttgggcggaacagtggacacagctgtgctatggggtttctttgcattggatgtattgagcatgcgatgggctgtttaaggtgtgacccctcactgtgatggatatgaatttgttcatgaatatttttttctatagtgtgagacagctgccttgtgtgggactgagaggcaagagttgttcctgcccttccctttgtgacttgaagaaccctgactttgtttctgcaaaggcacctgcatgtgtctgtgttcgtgtaggcataatgtgaggaggtggggagaccaccccacccccatgtccaccatgaccctcttcccacgctgacctgtgctccctccccaatcatctttcctgttccagagaggtggggctgaggtgtctccatctctgtctcaacttcatggtgcactgagctgtaacttcttccttccctattaaaattagaaccttagtataaatttactttctc

SEQ ID NO: 4190 - protein, 33 aa, Homo sapiens
MAVMAPRTLLLLLSGALALTQTWAGSHSMSEAV

SEQ ID NO: 4191 - DNA, 2750 bp, Homo sapiens
cgccgaggatggccgtcatggcgccccgaaccctcctcctgctactctcgggggccctggccctgacccagacctgggcgggctcccactccatgagcgaggccgtttaggccaaaaatccccccgggttggtcggggctgggcggggctcgggggactgggctgaccgcggggtcggggccaggttctcacaccatccagataatgtatggctgcgacgtggggtcggacgggcgcttcctccgcgggtaccggcaggacgcctacgacggcaaggattacatcgccctgaacgaggacctgcgctcttggaccgcggcggacatggcggctcagatcaccaagcgcaagtgggaggcggcccatgaggcggagcagttgagagcctacctggatggcacgtgcgtggagtggctccgcagatacctggagaacgggaaggagacgctgcagcgcacgggtaccaggggccacggggcgcctccctgatcgcctgtagatctcccgggctggcctcccacaaggaggggagacaattgggaccaacactagaatatcaccctccctctggtcctgagggagaggaatcctcctgggttccagatcctgtaccagagagtgactctgaggttccgccctgctctctgacacaattaagggataaaatctctgaaggagtgacgggaagacgatccctcgaatactgatgagtggttccctttgacaccggcagcagccttgggcccgtgacttttcctctcaggccttgttctctgcttcacactcaatgtgtgtgggggtctgagtccagcacttctgagtccctcagcctccactcaggtcaggaccagaagtcgctgttcccttctcagggaatagaagattatcccaggtgcctgtgtccaggctggtgtctgggttctgtgctctcttccccatcccgggtgtcctgtccattctcaagatggccacatgcgtgctggtggagtgtcccatgacagatgcaaaatgcctgaattttctgactcttcccgtcagacccccccaagacacatatgacccaccaccccatctctgaccatgaggccaccctgaggtgctgggccctgggcttctaccctgcggagatcacactgacctggcagcgggatggggaggaccagacccaggacacggagctcgtggagaccaggcctgcaggggatggaaccttccagaagtgggcggctgtggtggtgccttctggagaggagcagagatacacctgccatgtgcagcatgagggtctgcccaagcccctcaccctgagatggggtaaggagggagatgggggtgtcatgtctcttagggaaagcaggagcctctctggagacctttagcagggtcagggcccctcaccttcccctcttttcccagagctgtcttcccagcccaccatccccatcgtgggcatcattgctggcctggttctccttggagctgtgatcactggagctgtggtcgctgccgtgatgtggaggaggaagagctcaggtggagaaggggtgaagggtggggtctgagatttcttgtctcactgagggttccaagccccagctagaaatgtgccctgtctcattactgggaagcaccgtccacaatcatgggcctacccagtctgggccctgtgtgccagcacttactcttttgtaaagcacctgttaaaatgaaggacagatttatcaccttgattacggcggtgatgggacctgatcccagcagtcacaagtcacaggggaaggtccctgaggacagacctcaggagggctattggtccaggacccacacctgctttcttcatgtttcctgatcccgccctgggtctgcagtcacacatttctggaaacttctctggggtccaagactaggaggttcctctaggaccttaaggccctggctcctttctggtatctcacaggacattttcttctcacagatagaaaaggagggagttacactcaggctgcaagtaagtatgaaggaggctgatgcctgaggtccttgggatattgtgtttgggagcccatgggggagcccacccacctcacaattcctcctctagccacatcttctgtgggatctgaccaggttctgtttttgttctaccccaggcagtgacagtgcccagggctctgatgtgtccctcacagcttgtaaaggtgagagcttggaggacctaatgtgtgttgggtgttgggcggaacagtggacacagctgtgctatggggtttctttgcattggatgtattgagcatgcgatgggctgtttaaggtgtgacccctcactgtgatggatatgaatttgttcatgaatatttttttctatagtgtgagacagctgccttgtgtgggactgagaggcaagagttgttcctgcccttccctttgtgacttgaagaaccctgactttgtttctgcaaaggcacctgcatgtgtctgtgttcgtgtaggcataatgtgaggaggtggggagaccaccccacccccatgtccaccatgaccctcttcccacgctgacctgtgctccctccccaatcatctttcctgttccagagaggtggggctgaggtgtctccatctctgtctcaacttcatggtgcactgagctgtaacttcttccttccctattaaaattagaaccttagtataaatttactttctcaaattcttgccatgagaggttgatgagttaattaaaggagaagattcct

SEQ ID NO: 4192 - protein, 33 aa, Homo sapiens; identical to SEQ ID NO: 4190

SEQ ID NO: 4193 - DNA, 2801 bp, Homo sapiens
cgccgaggatggccgtcatggcgccccgaaccctcctcctgctactctcgggggccctggccctgacccagacctgggcgggctcccactccatgagcgaggccgtttaggccaaaaatccccccgggttggtcggggctgggcggggctcgggggactgggctgaccgcggggtcggggccaggttctcacaccatccagataatgtatggctgcgacgtggggtcggacgggcgcttcctccgcgggtaccggcaggacgcctacgacggcaaggattacatcgccctgaacgaggacctgcgctcttggaccgcggcggacatggcggctcagatcaccaagcgcaagtgggaggcggcccatgaggcggagcagttgagagcctacctggatggcacgtgcgtggagtggctccgcagatacctggagaacgggaaggagacgctgcagcgcacgggtaccaggggccacggggcgcctccctgatcgcctgtagatctcccgggctggcctcccacaaggaggggagacaattgggaccaacactagaatatcaccctccctctggtcctgagggagaggaatcctcctgggttccagatcctgtaccagagagtgactctgaggttccgccctgctctctgacacaattaagggataaaatctctgaaggagtgacgggaagacgatccctcgaatactgatgagtggttccctttgacaccggcagcagccttgggcccgtgacttttcctctcaggccttgttctctgcttcacactcaatgtgtgtgggggtctgagtccagcacttctgagtccctcagcctccactcaggtcaggaccagaagtcgctgttcccttctcagggaatagaagattatcccaggtgcctgtgtccaggctggtgtctgggttctgtgctctcttccccatcccgggtgtcctgtccattctcaagatggccacatgcgtgctggtggagtgtcccatgacagatgcaaaatgcctgaattttctgactcttcccgtcagacccccccaagacacatatgacccaccaccccatctctgaccatgaggccaccctgaggtgctgggccctgggcttctaccctgcggagatcacactgacctggcagcgggatggggaggaccagacccaggacacggagctcgtggagaccaggcctgcaggggatggaaccttccagaagtgggcggctgtggtggtgccttctggagaggagcagagatacacctgccatgtgcagcatgagggtctgcccaagcccctcaccctgagatggggtaaggagggagatgggggtgtcatgtctcttagggaaagcaggagcctctctggagacctttagcagggtcagggcccctcaccttcccctcttttcccagagctgtcttcccagcccaccatccccatcgtgggcatcattgctggcctggttctccttggagctgtgatcactggagctgtggtcgctgccgtgatgtggaggaggaagagctcaggtggagaaggggtgaagggtggggtctgagatttcttgtctcactgagggttccaagccccagctagaaatgtgccctgtctcattactgggaagcaccgtccacaatcatgggcctacccagtctgggccctgtgtgccagcacttactcttttgtaaagcacctgttaaaatgaaggacagatttatcaccttgattacggcggtgatgggacctgatcccagcagtcacaagtcacaggggaaggtccctgaggacagacctcaggagggctattggtccaggacccacacctgctttcttcatgtttcctgatcccgccctgggtctgcagtcacacatttctggaaacttctctggggtccaagactaggaggttcctctaggaccttaaggccctggctcctttctggtatctcacaggacattttcttctcacagatagaaaaggagggagttacactcaggctgcaagtaagtatgaaggaggctgatgcctgaggtccttgggatattgtgtttgggagcccatgggggagcccacccacctcacaattcctcctctagccacatcttctgtgggatctgaccaggttctgtttttgttctaccccaggcagtgacagtgcccagggctctgatgtgtccctcacagcttgtaaaggtgagagcttggaggacctaatgtgtgttgggtgttgggcggaacagtggacacagctgtgctatggggtttctttgcattggatgtattgagcatgcgatgggctgtttaaggtgtgacccctcactgtgatggatatgaatttgttcatgaatatttttttctatagtgtgagacagctgccttgtgtgggactgagaggcaagagttgttcctgcccttccctttgtgacttgaagaaccctgactttgtttctgcaaaggcacctgcatgtgtctgtgttcgtgtaggcataatgtgaggaggtggggagaccaccccacccccatgtccaccatgaccctcttcccacgctgacctgtgctccctccccaatcatctttcctgttccagagaggtggggctgaggtgtctccatctctgtctcaacttcatggtgcactgagctgtaacttcttccttccctattaaaattagaaccttagtataaatttactttctcaaattcttgccatgagaggttgatgagttaattaaaggagaagattcctaaaatttgagagacaaaataaatggaagacatgagaaccttccagagtcca

SEQ ID NO: 4194 - protein, 33 aa, Homo sapiens; identical to SEQ ID NO: 4190

SEQ ID NO: 4195 - DNA, 2790 bp, Homo sapiens
caggctcccactccatgaggtatttcttcacatccgtgtcccggcccggccgcggggagccccgcttcatcgccgtgggctacgtggacgacacgcagttcgtgcggttcgacagcgacgccgcgagccagaggatggagccgcgggcgccgtggatagagcaggaggggccggagtattgggaccaggagacacggaatgtgaaggcccagtcacagactgaccgagtggacctggggaccctgcgcggctactacaaccagagcgaggccggttctcacaccatccagataatgtatggctgcgacgtggggtcggacgggcgcttcctccgcgggtaccggcaggacgcctacgacggcaaggattacatcgccctgaacgaggacctgcgctcttggaccgcggcggacatggcggctcagatcaccaagcgcaagtgggaggcggcccatgaggcggagcagttgagagcctacctggatggcacgtgcgtggagtggctccgcagatacctggagaacgggaaggagacgctgcagcgcacgggtaccaggggccacggggcgcctccctgatcgcctgtagatctcccgggctggcctcccacaaggaggggagacaattgggaccaacactagaatatcaccctccctctggtcctgagggagaggaatcctcctgggttccagatcctgtaccagagagtgactctgaggttccgccctgctctctgacacaattaagggataaaatctctgaaggagtgacgggaagacgatccctcgaatactgatgagtggttccctttgacaccggcagcagccttgggcccgtgacttttcctctcaggccttgttctctgcttcacactcaatgtgtgtgggggtctgagtccagcacttctgagtccctcagcctccactcaggtcaggaccagaagtcgctgttcccttctcagggaatagaagattatcccaggtgcctgtgtccaggctggtgtctgggttctgtgctctcttccccatcccgggtgtcctgtccattctcaagatggccacatgcgtgctggtggagtgtcccatgacagatgcaaaatgcctgaattttctgactcttcccgtcagacccccccaagacacatatgacccaccaccccatctctgaccatgaggccaccctgaggtgctgggccctgggcttctaccctgcggagatcacactgacctggcagcgggatggggaggaccagacccaggacacggagctcgtggagaccaggcctgcaggggatggaaccttccagaagtgggcggctgtggtggtgccttctggagaggagcagagatacacctgccatgtgcagcatgagggtctgcccaagcccctcaccctgagatggggtaaggagggagatgggggtgtcatgtctcttagggaaagcaggagcctctctggagacctttagcagggtcagggcccctcaccttcccctcttttcccagagctgtcttcccagcccaccatccccatcgtgggcatcattgctggcctggttctccttggagctgtgatcactggagctgtggtcgctgccgtgatgtggaggaggaagagctcaggtggagaaggggtgaagggtggggtctgagatttcttgtctcactgagggttccaagccccagctagaaatgtgccctgtctcattactgggaagcaccgtccacaatcatgggcctacccagtctgggccctgtgtgccagcacttactcttttgtaaagcacctgttaaaatgaaggacagatttatcaccttgattacggcggtgatgggacctgatcccagcagtcacaagtcacaggggaaggtccctgaggacagacctcaggagggctattggtccaggacccacacctgctttcttcatgtttcctgatcccgccctgggtctgcagtcacacatttctggaaacttctctggggtccaagactaggaggttcctctaggaccttaaggccctggctcctttctggtatctcacaggacattttcttctcacagatagaaaaggagggagttacactcaggctgcaagtaagtatgaaggaggctgatgcctgaggtccttgggatattgtgtttgggagcccatgggggagcccacccacctcacaattcctcctctagccacatcttctgtgggatctgaccaggttctgtttttgttctaccccaggcagtgacagtgcccagggctctgatgtgtccctcacagcttgtaaaggtgagagcttggaggacctaatgtgtgttgggtgttgggcggaacagtggacacagctgtgctatggggtttctttgcattggatgtattgagcatgcgatgggctgtttaaggtgtgacccctcactgtgatggatatgaatttgttcatgaatatttttttctatagtgtgagacagctgccttgtgtgggactgagaggcaagagttgttcctgcccttccctttgtgacttgaagaaccctgactttgtttctgcaaaggcacctgcatgtgtctgtgttcgtgtaggcataatgtgaggaggtggggagaccaccccacccccatgtccaccatgaccctcttcccacgctgacctgtgctccctccccaatcatctttcctgttccagagaggtggggctgaggtgtctccatctctgtctcaacttcatggtgcactgagctgtaacttcttccttccctattaaaattagaaccttagtataaatttactttctc

SEQ ID NO: 4196 - protein, 187 aa, Homo sapiens
MRYFFTSVSRPGRGEPRFIAVGYVDDTQFVRFDSDAASQRMEPRAPWIEQEGPEYWDQETRNVKAQSQTDRVDLGTLRGYYNQSEAGSHTIQIMYGCDVGSDGRFLRGYRQDAYDGKDYIALNEDLRSWTAADMAAQITKRKWEAAHEAEQLRAYLDGTCVEWLRRYLENGKETLQRTGTRGHGAPP

SEQ ID NO: 4197 - DNA, 2212 bp, Homo sapiens
caggctcccactccatgaggtatttcttcacatccgtgtcccggcccggccgcggggagccccgcttcatcgccgtgggctacgtggacgacacgcagttcgtgcggttcgacagcgacgccgcgagccagaggatggagccgcgggcgccgtggatagagcaggaggggccggagtattgggaccaggagacacggaatgtgaaggcccagtcacagactgaccgagtggacctggggaccctgcgcggctactacaaccagagcgaggccggttctcacaccatccagataatgtatggctgcgacgtggggtcggacgggcgcttcctccgcgggtaccggcaggacgcctacgacggcaaggattacatcgccctgaacgaggacctgcgctcttggaccgcggcggacatggcggctcagatcaccaagcgcaagtgggaggcggcccatgaggcggagcagttgagagcctacctggatggcacgtgcgtggagtggctccgcagatacctggagaacgggaaggagacgctgcagcgcacggacccccccaagacacatatgacccaccaccccatctctgaccatgaggccaccctgaggtgctgggccctgggcttctaccctgcggagatcacactgacctggcagcgggatggggaggaccagacccaggacacggagctcgtggagaccaggcctgcaggggatggaaccttccagaagtgggcggctgtggtggtgccttctggagaggagcagagatacacctgccatgtgcagcatgagggtctgcccaagcccctcaccctgagatggggtaaggagggagatgggggtgtcatgtctcttagggaaagcaggagcctctctggagacctttagcagggtcagggcccctcaccttcccctcttttcccagagctgtcttcccagcccaccatccccatcgtgggcatcattgctggcctggttctccttggagctgtgatcactggagctgtggtcgctgccgtgatgtggaggaggaagagctcaggtggagaaggggtgaagggtggggtctgagatttcttgtctcactgagggttccaagccccagctagaaatgtgccctgtctcattactgggaagcaccgtccacaatcatgggcctacccagtctgggccctgtgtgccagcacttactcttttgtaaagcacctgttaaaatgaaggacagatttatcaccttgattacggcggtgatgggacctgatcccagcagtcacaagtcacaggggaaggtccctgaggacagacctcaggagggctattggtccaggacccacacctgctttcttcatgtttcctgatcccgccctgggtctgcagtcacacatttctggaaacttctctggggtccaagactaggaggttcctctaggaccttaaggccctggctcctttctggtatctcacaggacattttcttctcacagatagaaaaggagggagttacactcaggctgcaagtaagtatgaaggaggctgatgcctgaggtccttgggatattgtgtttgggagcccatgggggagcccacccacctcacaattcctcctctagccacatcttctgtgggatctgaccaggttctgtttttgttctaccccaggcagtgacagtgcccagggctctgatgtgtccctcacagcttgtaaaggtgagagcttggaggacctaatgtgtgttgggtgttgggcggaacagtggacacagctgtgctatggggtttctttgcattggatgtattgagcatgcgatgggctgtttaaggtgtgacccctcactgtgatggatatgaatttgttcatgaatatttttttctatagtgtgagacagctgccttgtgtgggactgagaggcaagagttgttcctgcccttccctttgtgacttgaagaaccctgactttgtttctgcaaaggcacctgcatgtgtctgtgttcgtgtaggcataatgtgaggaggtggggagaccaccccacccccatgtccaccatgaccctcttcccacgctgacctgtgctccctccccaatcatctttcctgttccagagaggtggggctgaggtgtctccatctctgtctcaacttcatggtgcactgagctgtaacttcttccttccctattaaaattagaaccttagtataaatttactttctc

SEQ ID NO: 4198 - protein, 291 aa, Homo sapiens
MRYFFTSVSRPGRGEPRFIAVGYVDDTQFVRFDSDAASQRMEPRAPWIEQEGPEYWDQETRNVKAQSQTDRVDLGTLRGYYNQSEAGSHTIQIMYGCDVGSDGRFLRGYRQDAYDGKDYIALNEDLRSWTAADMAAQITKRKWEAAHEAEQLRAYLDGTCVEWLRRYLENGKETLQRTDPPKTHMTHHPISDHEATLRCWALGFYPAEITLTWQRDGEDQTQDTELVETRPAGDGTFQKWAAVVVPSGEEQRYTCHVQHEGLPKPLTLRWGKEGDGGVMSLRESRSLSGDL

SEQ ID NO: 4199 - DNA, 1357 bp, Homo sapiens
caggctcccactccatgaggtatttcttcacatccgtgtcccggcccggccgcggggagccccgcttcatcgccgtgggctacgtggacgacacgcagttcgtgcggttcgacagcgacgccgcgagccagaggatggagccgcgggcgccgtggatagagcaggaggggccggagtattgggaccaggagacacggaatgtgaaggcccagtcacagactgaccgagtggacctggggaccctgcgcggctactacaaccagagcgaggccggttctcacaccatccagataatgtatggctgcgacgtggggtcggacgggcgcttcctccgcgggtaccggcaggacgcctacgacggcaaggattacatcgccctgaacgaggacctgcgctcttggaccgcggcggacatggcggctcagatcaccaagcgcaagtgggaggcggcccatgaggcggagcagttgagagcctacctggatggcacgtgcgtggagtggctccgcagatacctggagaacgggaaggagacgctgcagcgcacggacccccccaagacacatatgacccaccaccccatctctgaccatgaggccaccctgaggtgctgggccctgggcttctaccctgcggagatcacactgacctggcagcgggatggggaggaccagacccaggacacggagctcgtggagaccaggcctgcaggggatggaaccttccagaagtgggcggctgtggtggtgccttctggagaggagcagagatacacctgccatgtgcagcatgagggtctgcccaagcccctcaccctgagatgggagctgtcttcccagcccaccatccccatcgtgggcatcattgctggcctggttctccttggagctgtgatcactggagctgtggtcgctgccgtgatgtggaggaggaagagctcagatagaaaaggagggagttacactcaggctgcaagcagtgacagtgcccagggctctgatgtgtccctcacagcttgtaaagtgtgagacagctgccttgtgtgggactgagaggcaagagttgttcctgcccttccctttgtgacttgaagaaccctgactttgtttctgcaaaggcacctgcatgtgtctgtgttcgtgtaggcataatgtgaggaggtggggagaccaccccacccccatgtccaccatgaccctcttcccacgctgacctgtgctccctccccaatcatctttcctgttccagagaggtggggctgaggtgtctccatctctgtctcaacttcatggtgcactgagctgtaacttcttccttccctattaaaattagaaccttagtataaatttactttctc

SEQ ID NO: 4200 - protein, 337 aa, Homo sapiens
MRYFFTSVSRPGRGEPRFIAVGYVDDTQFVRFDSDAASQRMEPRAPWIEQEGPEYWDQETRNVKAQSQTDRVDLGTLRGYYNQSEAGSHTIQIMYGCDVGSDGRFLRGYRQDAYDGKDYIALNEDLRSWTAADMAAQITKRKWEAAHEAEQLRAYLDGTCVEWLRRYLENGKETLQRTDPPKTHMTHHPISDHEATLRCWALGFYPAEITLTWQRDGEDQTQDTELVETRPAGDGTFQKWAAVVVPSGEEQRYTCHVQHEGLPKPLTLRWELSSQPTIPIVGIIAGLVLLGAVITGAVVAAVMWRRKSSDRKGGSYTQAASSDSAQGSDVSLTACKV

SEQ ID NO: 4201 - DNA, 2839 bp, Homo sapiens
caggctcccactccatgaggtatttcttcacatccgtgtcccggcccggccgcggggagccccgcttcatcgccgtgggctacgtggacgacacgcagttcgtgcggttcgacagcgacgccgcgagccagaggatggagccgcgggcgccgtggatagagcaggaggggccggagtattgggaccaggagacacggaatgtgaaggcccagtcacagactgaccgagtggacctggggaccctgcgcggctactacaaccagagcgaggccggttctcacaccatccagataatgtatggctgcgacgtggggtcggacgggcgcttcctccgcgggtaccggcaggacgcctacgacggcaaggattacatcgccctgaacgaggacctgcgctcttggaccgcggcggacatggcggctcagatcaccaagcgcaagtgggaggcggcccatgaggcggagcagttgagagcctacctggatggcacgtgcgtggagtggctccgcagatacctggagaacgggaaggagacgctgcagcgcacgggtaccaggggccacggggcgcctccctgatcgcctgtagatctcccgggctggcctcccacaaggaggggagacaattgggaccaacactagaatatcaccctccctctggtcctgagggagaggaatcctcctgggttccagatcctgtaccagagagtgactctgaggttccgccctgctctctgacacaattaagggataaaatctctgaaggagtgacgggaagacgatccctcgaatactgatgagtggttccctttgacaccggcagcagccttgggcccgtgacttttcctctcaggccttgttctctgcttcacactcaatgtgtgtgggggtctgagtccagcacttctgagtccctcagcctccactcaggtcaggaccagaagtcgctgttcccttctcagggaatagaagattatcccaggtgcctgtgtccaggctggtgtctgggttctgtgctctcttccccatcccgggtgtcctgtccattctcaagatggccacatgcgtgctggtggagtgtcccatgacagatgcaaaatgcctgaattttctgactcttcccgtcagacccccccaagacacatatgacccaccaccccatctctgaccatgaggccaccctgaggtgctgggccctgggcttctaccctgcggagatcacactgacctggcagcgggatggggaggaccagacccaggacacggagctcgtggagaccaggcctgcaggggatggaaccttccagaagtgggcggctgtggtggtgccttctggagaggagcagagatacacctgccatgtgcagcatgagggtctgcccaagcccctcaccctgagatggggtaaggagggagatgggggtgtcatgtctcttagggaaagcaggagcctctctggagacctttagcagggtcagggcccctcaccttcccctcttttcccagagctgtcttcccagcccaccatccccatcgtgggcatcattgctggcctggttctccttggagctgtgatcactggagctgtggtcgctgccgtgatgtggaggaggaagagctcaggtggagaaggggtgaagggtggggtctgagatttcttgtctcactgagggttccaagccccagctagaaatgtgccctgtctcattactgggaagcaccgtccacaatcatgggcctacccagtctgggccctgtgtgccagcacttactcttttgtaaagcacctgttaaaatgaaggacagatttatcaccttgattacggcggtgatgggacctgatcccagcagtcacaagtcacaggggaaggtccctgaggacagacctcaggagggctattggtccaggacccacacctgctttcttcatgtttcctgatcccgccctgggtctgcagtcacacatttctggaaacttctctggggtccaagactaggaggttcctctaggaccttaaggccctggctcctttctggtatctcacaggacattttcttctcacagatagaaaaggagggagttacactcaggctgcaagtaagtatgaaggaggctgatgcctgaggtccttgggatattgtgtttgggagcccatgggggagcccacccacctcacaattcctcctctagccacatcttctgtgggatctgaccaggttctgtttttgttctaccccaggcagtgacagtgcccagggctctgatgtgtccctcacagcttgtaaaggtgagagcttggaggacctaatgtgtgttgggtgttgggcggaacagtggacacagctgtgctatggggtttctttgcattggatgtattgagcatgcgatgggctgtttaaggtgtgacccctcactgtgatggatatgaatttgttcatgaatatttttttctatagtgtgagacagctgccttgtgtgggactgagaggcaagagttgttcctgcccttccctttgtgacttgaagaaccctgactttgtttctgcaaaggcacctgcatgtgtctgtgttcgtgtaggcataatgtgaggaggtggggagaccaccccacccccatgtccaccatgaccctcttcccacgctgacctgtgctccctccccaatcatctttcctgttccagagaggtggggctgaggtgtctccatctctgtctcaacttcatggtgcactgagctgtaacttcttccttccctattaaaattagaaccttagtataaatttactttctcaaattcttgccatgagaggttgatgagttaattaaaggagaagattcct

SEQ ID NO: 4202 - protein, 187 aa, Homo sapiens; identical to SEQ ID NO: 4196

SEQ ID NO: 4203 - DNA, 2261 bp, Homo sapiens
caggctcccactccatgaggtatttcttcacatccgtgtcccggcccggccgcggggagccccgcttcatcgccgtgggctacgtggacgacacgcagttcgtgcggttcgacagcgacgccgcgagccagaggatggagccgcgggcgccgtggatagagcaggaggggccggagtattgggaccaggagacacggaatgtgaaggcccagtcacagactgaccgagtggacctggggaccctgcgcggctactacaaccagagcgaggccggttctcacaccatccagataatgtatggctgcgacgtggggtcggacgggcgcttcctccgcgggtaccggcaggacgcctacgacggcaaggattacatcgccctgaacgaggacctgcgctcttggaccgcggcggacatggcggctcagatcaccaagcgcaagtgggaggcggcccatgaggcggagcagttgagagcctacctggatggcacgtgcgtggagtggctccgcagatacctggagaacgggaaggagacgctgcagcgcacggacccccccaagacacatatgacccaccaccccatctctgaccatgaggccaccctgaggtgctgggccctgggcttctaccctgcggagatcacactgacctggcagcgggatggggaggaccagacccaggacacggagctcgtggagaccaggcctgcaggggatggaaccttccagaagtgggcggctgtggtggtgccttctggagaggagcagagatacacctgccatgtgcagcatgagggtctgcccaagcccctcaccctgagatggggtaaggagggagatgggggtgtcatgtctcttagggaaagcaggagcctctctggagacctttagcagggtcagggcccctcaccttcccctcttttcccagagctgtcttcccagcccaccatccccatcgtgggcatcattgctggcctggttctccttggagctgtgatcactggagctgtggtcgctgccgtgatgtggaggaggaagagctcaggtggagaaggggtgaagggtggggtctgagatttcttgtctcactgagggttccaagccccagctagaaatgtgccctgtctcattactgggaagcaccgtccacaatcatgggcctacccagtctgggccctgtgtgccagcacttactcttttgtaaagcacctgttaaaatgaaggacagatttatcaccttgattacggcggtgatgggacctgatcccagcagtcacaagtcacaggggaaggtccctgaggacagacctcaggagggctattggtccaggacccacacctgctttcttcatgtttcctgatcccgccctgggtctgcagtcacacatttctggaaacttctctggggtccaagactaggaggttcctctaggaccttaaggccctggctcctttctggtatctcacaggacattttcttctcacagatagaaaaggagggagttacactcaggctgcaagtaagtatgaaggaggctgatgcctgaggtccttgggatattgtgtttgggagcccatgggggagcccacccacctcacaattcctcctctagccacatcttctgtgggatctgaccaggttctgtttttgttctaccccaggcagtgacagtgcccagggctctgatgtgtccctcacagcttgtaaaggtgagagcttggaggacctaatgtgtgttgggtgttgggcggaacagtggacacagctgtgctatggggtttctttgcattggatgtattgagcatgcgatgggctgtttaaggtgtgacccctcactgtgatggatatgaatttgttcatgaatatttttttctatagtgtgagacagctgccttgtgtgggactgagaggcaagagttgttcctgcccttccctttgtgacttgaagaaccctgactttgtttctgcaaaggcacctgcatgtgtctgtgttcgtgtaggcataatgtgaggaggtggggagaccaccccacccccatgtccaccatgaccctcttcccacgctgacctgtgctccctccccaatcatctttcctgttccagagaggtggggctgaggtgtctccatctctgtctcaacttcatggtgcactgagctgtaacttcttccttccctattaaaattagaaccttagtataaatttactttctcaaattcttgccatgagaggttgatgagttaattaaaggagaagattcct

SEQ ID NO: 4204 - protein, 291 aa, Homo sapiens; identical to SEQ ID NO: 4198

SEQ ID NO: 4205 - DNA, 1406 bp, Homo sapiens
caggctcccactccatgaggtatttcttcacatccgtgtcccggcccggccgcggggagccccgcttcatcgccgtgggctacgtggacgacacgcagttcgtgcggttcgacagcgacgccgcgagccagaggatggagccgcgggcgccgtggatagagcaggaggggccggagtattgggaccaggagacacggaatgtgaaggcccagtcacagactgaccgagtggacctggggaccctgcgcggctactacaaccagagcgaggccggttctcacaccatccagataatgtatggctgcgacgtggggtcggacgggcgcttcctccgcgggtaccggcaggacgcctacgacggcaaggattacatcgccctgaacgaggacctgcgctcttggaccgcggcggacatggcggctcagatcaccaagcgcaagtgggaggcggcccatgaggcggagcagttgagagcctacctggatggcacgtgcgtggagtggctccgcagatacctggagaacgggaaggagacgctgcagcgcacggacccccccaagacacatatgacccaccaccccatctctgaccatgaggccaccctgaggtgctgggccctgggcttctaccctgcggagatcacactgacctggcagcgggatggggaggaccagacccaggacacggagctcgtggagaccaggcctgcaggggatggaaccttccagaagtgggcggctgtggtggtgccttctggagaggagcagagatacacctgccatgtgcagcatgagggtctgcccaagcccctcaccctgagatgggagctgtcttcccagcccaccatccccatcgtgggcatcattgctggcctggttctccttggagctgtgatcactggagctgtggtcgctgccgtgatgtggaggaggaagagctcagatagaaaaggagggagttacactcaggctgcaagcagtgacagtgcccagggctctgatgtgtccctcacagcttgtaaagtgtgagacagctgccttgtgtgggactgagaggcaagagttgttcctgcccttccctttgtgacttgaagaaccctgactttgtttctgcaaaggcacctgcatgtgtctgtgttcgtgtaggcataatgtgaggaggtggggagaccaccccacccccatgtccaccatgaccctcttcccacgctgacctgtgctccctccccaatcatctttcctgttccagagaggtggggctgaggtgtctccatctctgtctcaacttcatggtgcactgagctgtaacttcttccttccctattaaaattagaaccttagtataaatttactttctcaaattcttgccatgagaggttgatgagttaattaaaggagaagattcct

SEQ ID NO: 4206 - protein, 337 aa, Homo sapiens; identical to SEQ ID NO: 4200

SEQ ID NO: 4207 - DNA, 2890 bp, Homo sapiens
caggctcccactccatgaggtatttcttcacatccgtgtcccggcccggccgcggggagccccgcttcatcgccgtgggctacgtggacgacacgcagttcgtgcggttcgacagcgacgccgcgagccagaggatggagccgcgggcgccgtggatagagcaggaggggccggagtattgggaccaggagacacggaatgtgaaggcccagtcacagactgaccgagtggacctggggaccctgcgcggctactacaaccagagcgaggccggttctcacaccatccagataatgtatggctgcgacgtggggtcggacgggcgcttcctccgcgggtaccggcaggacgcctacgacggcaaggattacatcgccctgaacgaggacctgcgctcttggaccgcggcggacatggcggctcagatcaccaagcgcaagtgggaggcggcccatgaggcggagcagttgagagcctacctggatggcacgtgcgtggagtggctccgcagatacctggagaacgggaaggagacgctgcagcgcacgggtaccaggggccacggggcgcctccctgatcgcctgtagatctcccgggctggcctcccacaaggaggggagacaattgggaccaacactagaatatcaccctccctctggtcctgagggagaggaatcctcctgggttccagatcctgtaccagagagtgactctgaggttccgccctgctctctgacacaattaagggataaaatctctgaaggagtgacgggaagacgatccctcgaatactgatgagtggttccctttgacaccggcagcagccttgggcccgtgacttttcctctcaggccttgttctctgcttcacactcaatgtgtgtgggggtctgagtccagcacttctgagtccctcagcctccactcaggtcaggaccagaagtcgctgttcccttctcagggaatagaagattatcccaggtgcctgtgtccaggctggtgtctgggttctgtgctctcttccccatcccgggtgtcctgtccattctcaagatggccacatgcgtgctggtggagtgtcccatgacagatgcaaaatgcctgaattttctgactcttcccgtcagacccccccaagacacatatgacccaccaccccatctctgaccatgaggccaccctgaggtgctgggccctgggcttctaccctgcggagatcacactgacctggcagcgggatggggaggaccagacccaggacacggagctcgtggagaccaggcctgcaggggatggaaccttccagaagtgggcggctgtggtggtgccttctggagaggagcagagatacacctgccatgtgcagcatgagggtctgcccaagcccctcaccctgagatggggtaaggagggagatgggggtgtcatgtctcttagggaaagcaggagcctctctggagacctttagcagggtcagggcccctcaccttcccctcttttcccagagctgtcttcccagcccaccatccccatcgtgggcatcattgctggcctggttctccttggagctgtgatcactggagctgtggtcgctgccgtgatgtggaggaggaagagctcaggtggagaaggggtgaagggtggggtctgagatttcttgtctcactgagggttccaagccccagctagaaatgtgccctgtctcattactgggaagcaccgtccacaatcatgggcctacccagtctgggccctgtgtgccagcacttactcttttgtaaagcacctgttaaaatgaaggacagatttatcaccttgattacggcggtgatgggacctgatcccagcagtcacaagtcacaggggaaggtccctgaggacagacctcaggagggctattggtccaggacccacacctgctttcttcatgtttcctgatcccgccctgggtctgcagtcacacatttctggaaacttctctggggtccaagactaggaggttcctctaggaccttaaggccctggctcctttctggtatctcacaggacattttcttctcacagatagaaaaggagggagttacactcaggctgcaagtaagtatgaaggaggctgatgcctgaggtccttgggatattgtgtttgggagcccatgggggagcccacccacctcacaattcctcctctagccacatcttctgtgggatctgaccaggttctgtttttgttctaccccaggcagtgacagtgcccagggctctgatgtgtccctcacagcttgtaaaggtgagagcttggaggacctaatgtgtgttgggtgttgggcggaacagtggacacagctgtgctatggggtttctttgcattggatgtattgagcatgcgatgggctgtttaaggtgtgacccctcactgtgatggatatgaatttgttcatgaatatttttttctatagtgtgagacagctgccttgtgtgggactgagaggcaagagttgttcctgcccttccctttgtgacttgaagaaccctgactttgtttctgcaaaggcacctgcatgtgtctgtgttcgtgtaggcataatgtgaggaggtggggagaccaccccacccccatgtccaccatgaccctcttcccacgctgacctgtgctccctccccaatcatctttcctgttccagagaggtggggctgaggtgtctccatctctgtctcaacttcatggtgcactgagctgtaacttcttccttccctattaaaattagaaccttagtataaatttactttctcaaattcttgccatgagaggttgatgagttaattaaaggagaagattcctaaaatttgagagacaaaataaatggaagacatgagaaccttccagagtcca

SEQ ID NO: 4208 - protein, 187 aa, Homo sapiens; identical to SEQ ID NO: 4196

SEQ ID NO: 4209 - DNA, 2312 bp, Homo sapiens
caggctcccactccatgaggtatttcttcacatccgtgtcccggcccggccgcggggagccccgcttcatcgccgtgggctacgtggacgacacgcagttcgtgcggttcgacagcgacgccgcgagccagaggatggagccgcgggcgccgtggatagagcaggaggggccggagtattgggaccaggagacacggaatgtgaaggcccagtcacagactgaccgagtggacctggggaccctgcgcggctactacaaccagagcgaggccggttctcacaccatccagataatgtatggctgcgacgtggggtcggacgggcgcttcctccgcgggtaccggcaggacgcctacgacggcaaggattacatcgccctgaacgaggacctgcgctcttggaccgcggcggacatggcggctcagatcaccaagcgcaagtgggaggcggcccatgaggcggagcagttgagagcctacctggatggcacgtgcgtggagtggctccgcagatacctggagaacgggaaggagacgctgcagcgcacggacccccccaagacacatatgacccaccaccccatctctgaccatgaggccaccctgaggtgctgggccctgggcttctaccctgcggagatcacactgacctggcagcgggatggggaggaccagacccaggacacggagctcgtggagaccaggcctgcaggggatggaaccttccagaagtgggcggctgtggtggtgccttctggagaggagcagagatacacctgccatgtgcagcatgagggtctgcccaagcccctcaccctgagatggggtaaggagggagatgggggtgtcatgtctcttagggaaagcaggagcctctctggagacctttagcagggtcagggcccctcaccttcccctcttttcccagagctgtcttcccagcccaccatccccatcgtgggcatcattgctggcctggttctccttggagctgtgatcactggagctgtggtcgctgccgtgatgtggaggaggaagagctcaggtggagaaggggtgaagggtggggtctgagatttcttgtctcactgagggttccaagccccagctagaaatgtgccctgtctcattactgggaagcaccgtccacaatcatgggcctacccagtctgggccctgtgtgccagcacttactcttttgtaaagcacctgttaaaatgaaggacagatttatcaccttgattacggcggtgatgggacctgatcccagcagtcacaagtcacaggggaaggtccctgaggacagacctcaggagggctattggtccaggacccacacctgctttcttcatgtttcctgatcccgccctgggtctgcagtcacacatttctggaaacttctctggggtccaagactaggaggttcctctaggaccttaaggccctggctcctttctggtatctcacaggacattttcttctcacagatagaaaaggagggagttacactcaggctgcaagtaagtatgaaggaggctgatgcctgaggtccttgggatattgtgtttgggagcccatgggggagcccacccacctcacaattcctcctctagccacatcttctgtgggatctgaccaggttctgtttttgttctaccccaggcagtgacagtgcccagggctctgatgtgtccctcacagcttgtaaaggtgagagcttggaggacctaatgtgtgttgggtgttgggcggaacagtggacacagctgtgctatggggtttctttgcattggatgtattgagcatgcgatgggctgtttaaggtgtgacccctcactgtgatggatatgaatttgttcatgaatatttttttctatagtgtgagacagctgccttgtgtgggactgagaggcaagagttgttcctgcccttccctttgtgacttgaagaaccctgactttgtttctgcaaaggcacctgcatgtgtctgtgttcgtgtaggcataatgtgaggaggtggggagaccaccccacccccatgtccaccatgaccctcttcccacgctgacctgtgctccctccccaatcatctttcctgttccagagaggtggggctgaggtgtctccatctctgtctcaacttcatggtgcactgagctgtaacttcttccttccctattaaaattagaaccttagtataaatttactttctcaaattcttgccatgagaggttgatgagttaattaaaggagaagattcctaaaatttgagagacaaaataaatggaagacatgagaaccttccagagtcca

SEQ ID NO: 4210 - protein, 291 aa, Homo sapiens; identical to SEQ ID NO: 4198

SEQ ID NO: 4211 - DNA, 1457 bp, Homo sapiens
caggctcccactccatgaggtatttcttcacatccgtgtcccggcccggccgcggggagccccgcttcatcgccgtgggctacgtggacgacacgcagttcgtgcggttcgacagcgacgccgcgagccagaggatggagccgcgggcgccgtggatagagcaggaggggccggagtattgggaccaggagacacggaatgtgaaggcccagtcacagactgaccgagtggacctggggaccctgcgcggctactacaaccagagcgaggccggttctcacaccatccagataatgtatggctgcgacgtggggtcggacgggcgcttcctccgcgggtaccggcaggacgcctacgacggcaaggattacatcgccctgaacgaggacctgcgctcttggaccgcggcggacatggcggctcagatcaccaagcgcaagtgggaggcggcccatgaggcggagcagttgagagcctacctggatggcacgtgcgtggagtggctccgcagatacctggagaacgggaaggagacgctgcagcgcacggacccccccaagacacatatgacccaccaccccatctctgaccatgaggccaccctgaggtgctgggccctgggcttctaccctgcggagatcacactgacctggcagcgggatggggaggaccagacccaggacacggagctcgtggagaccaggcctgcaggggatggaaccttccagaagtgggcggctgtggtggtgccttctggagaggagcagagatacacctgccatgtgcagcatgagggtctgcccaagcccctcaccctgagatgggagctgtcttcccagcccaccatccccatcgtgggcatcattgctggcctggttctccttggagctgtgatcactggagctgtggtcgctgccgtgatgtggaggaggaagagctcagatagaaaaggagggagttacactcaggctgcaagcagtgacagtgcccagggctctgatgtgtccctcacagcttgtaaagtgtgagacagctgccttgtgtgggactgagaggcaagagttgttcctgcccttccctttgtgacttgaagaaccctgactttgtttctgcaaaggcacctgcatgtgtctgtgttcgtgtaggcataatgtgaggaggtggggagaccaccccacccccatgtccaccatgaccctcttcccacgctgacctgtgctccctccccaatcatctttcctgttccagagaggtggggctgaggtgtctccatctctgtctcaacttcatggtgcactgagctgtaacttcttccttccctattaaaattagaaccttagtataaatttactttctcaaattcttgccatgagaggttgatgagttaattaaaggagaagattcctaaaatttgagagacaaaataaatggaagacatgagaaccttccagagtcca

SEQ ID NO: 4212 - protein, 337 aa, Homo sapiens; identical to SEQ ID NO: 4200

SEQ ID NO: 4213 - DNA, 1090 bp, Homo sapiens
ggccaggttctcacaccatccagataatgtatggctgcgacgtggggtcggacgggcgcttcctccgcgggtaccggcaggacgcctacgacggcaaggattacatcgccctgaacgaggacctgcgctcttggaccgcggcggacatggcggctcagatcaccaagcgcaagtgggaggcggcccatgaggcggagcagttgagagcctacctggatggcacgtgcgtggagtggctccgcagatacctggagaacgggaaggagacgctgcagcgcacggacccccccaagacacatatgacccaccaccccatctctgaccatgaggccaccctgaggtgctgggccctgggcttctaccctgcggagatcacactgacctggcagcgggatggggaggaccagacccaggacacggagctcgtggagaccaggcctgcaggggatggaaccttccagaagtgggcggctgtggtggtgccttctggagaggagcagagatacacctgccatgtgcagcatgagggtctgcccaagcccctcaccctgagatgggagctgtcttcccagcccaccatccccatcgtgggcatcattgctggcctggttctccttggagctgtgatcactggagctgtggtcgctgccgtgatgtggaggaggaagagctcagatagaaaaggagggagttacactcaggctgcaagcagtgacagtgcccagggctctgatgtgtccctcacagcttgtaaagtgtgagacagctgccttgtgtgggactgagaggcaagagttgttcctgcccttccctttgtgacttgaagaaccctgactttgtttctgcaaaggcacctgcatgtgtctgtgttcgtgtaggcataatgtgaggaggtggggagaccaccccacccccatgtccaccatgaccctcttcccacgctgacctgtgctccctccccaatcatctttcctgttccagagaggtggggctgaggtgtctccatctctgtctcaacttcatggtgcactgagctgtaacttcttccttccctattaaaattagaaccttagtataaatttactttctc

SEQ ID NO: 4214 - protein, 244 aa, Homo sapiens
MYGCDVGSDGRFLRGYRQDAYDGKDYIALNEDLRSWTAADMAAQITKRKWEAAHEAEQLRAYLDGTCVEWLRRYLENGKETLQRTDPPKTHMTHHPISDHEATLRCWALGFYPAEITLTWQRDGEDQTQDTELVETRPAGDGTFQKWAAVVVPSGEEQRYTCHVQHEGLPKPLTLRWELSSQPTIPIVGIIAGLVLLGAVITGAVVAAVMWRRKSSDRKGGSYTQAASSDSAQGSDVSLTACKV

SEQ ID NO: 4215 - DNA, 894 bp, Homo sapiens
ggccaggttctcacaccatccagataatgtatggctgcgacgtggggtcggacgggcgcttcctccgcgggtaccggcaggacgcctacgacggcaaggattacatcgccctgaacgaggacctgcgctcttggaccgcggcggacatggcggctcagatcaccaagcgcaagtgggaggcggcccatgaggcggagcagttgagagcctacctggatggcacgtgcgtggagtggctccgcagatacctggagaacgggaaggagacgctgcagcgcacggacccccccaagacacatatgacccaccaccccatctctgaccatgaggccaccctgaggtgctgggccctgggcttctaccctgcggagatcacactgacctggcagcgggatggggaggaccagacccaggacacggagctcctgtgatcactggagctgtggtcgctgccgtgatgtggaggaggaagagctcagatagaaaaggagggagttacactcaggctgcaagcagtgacagtgcccagggctctgatgtgtccctcacagcttgtaaagtgtgagacagctgccttgtgtgggactgagaggcaagagttgttcctgcccttccctttgtgacttgaagaaccctgactttgtttctgcaaaggcacctgcatgtgtctgtgttcgtgtaggcataatgtgaggaggtggggagaccaccccacccccatgtccaccatgaccctcttcccacgctgacctgtgctccctccccaatcatctttcctgttccagagaggtggggctgaggtgtctccatctctgtctcaacttcatggtgcactgagctgtaacttcttccttccctattaaaattagaaccttagtataaatttactttctc

SEQ ID NO: 4216 - protein, 134 aa, Homo sapiens
MYGCDVGSDGRFLRGYRQDAYDGKDYIALNEDLRSWTAADMAAQITKRKWEAAHEAEQLRAYLDGTCVEWLRRYLENGKETLQRTDPPKTHMTHHPISDHEATLRCWALGFYPAEITLTWQRDGEDQTQDTELL

SEQ ID NO: 4217 - DNA, 1945 bp, Homo sapiens
ggccaggttctcacaccatccagataatgtatggctgcgacgtggggtcggacgggcgcttcctccgcgggtaccggcaggacgcctacgacggcaaggattacatcgccctgaacgaggacctgcgctcttggaccgcggcggacatggcggctcagatcaccaagcgcaagtgggaggcggcccatgaggcggagcagttgagagcctacctggatggcacgtgcgtggagtggctccgcagatacctggagaacgggaaggagacgctgcagcgcacggacccccccaagacacatatgacccaccaccccatctctgaccatgaggccaccctgaggtgctgggccctgggcttctaccctgcggagatcacactgacctggcagcgggatggggaggaccagacccaggacacggagctcgtggagaccaggcctgcaggggatggaaccttccagaagtgggcggctgtggtggtgccttctggagaggagcagagatacacctgccatgtgcagcatgagggtctgcccaagcccctcaccctgagatggggtaaggagggagatgggggtgtcatgtctcttagggaaagcaggagcctctctggagacctttagcagggtcagggcccctcaccttcccctcttttcccagagctgtcttcccagcccaccatccccatcgtgggcatcattgctggcctggttctccttggagctgtgatcactggagctgtggtcgctgccgtgatgtggaggaggaagagctcaggtggagaaggggtgaagggtggggtctgagatttcttgtctcactgagggttccaagccccagctagaaatgtgccctgtctcattactgggaagcaccgtccacaatcatgggcctacccagtctgggccctgtgtgccagcacttactcttttgtaaagcacctgttaaaatgaaggacagatttatcaccttgattacggcggtgatgggacctgatcccagcagtcacaagtcacaggggaaggtccctgaggacagacctcaggagggctattggtccaggacccacacctgctttcttcatgtttcctgatcccgccctgggtctgcagtcacacatttctggaaacttctctggggtccaagactaggaggttcctctaggaccttaaggccctggctcctttctggtatctcacaggacattttcttctcacagatagaaaaggagggagttacactcaggctgcaagtaagtatgaaggaggctgatgcctgaggtccttgggatattgtgtttgggagcccatgggggagcccacccacctcacaattcctcctctagccacatcttctgtgggatctgaccaggttctgtttttgttctaccccaggcagtgacagtgcccagggctctgatgtgtccctcacagcttgtaaaggtgagagcttggaggacctaatgtgtgttgggtgttgggcggaacagtggacacagctgtgctatggggtttctttgcattggatgtattgagcatgcgatgggctgtttaaggtgtgacccctcactgtgatggatatgaatttgttcatgaatatttttttctatagtgtgagacagctgccttgtgtgggactgagaggcaagagttgttcctgcccttccctttgtgacttgaagaaccctgactttgtttctgcaaaggcacctgcatgtgtctgtgttcgtgtaggcataatgtgaggaggtggggagaccaccccacccccatgtccaccatgaccctcttcccacgctgacctgtgctccctccccaatcatctttcctgttccagagaggtggggctgaggtgtctccatctctgtctcaacttcatggtgcactgagctgtaacttcttccttccctattaaaattagaaccttagtataaatttactttctc

SEQ ID NO: 4218 - protein, 198 aa, Homo sapiens; identical to SEQ ID NO: 4172

SEQ ID NO: 4219 - DNA, 798 bp, Homo sapiens
ggccaggttctcacaccatccagataatgtatggctgcgacgtggggtcggacgggcgcttcctccgcgggtaccggcaggacgcctacgacggcaaggattacatcgccctgaacgaggacctgcgctcttggaccgcggcggacatggcggctcagatcaccaagcgcaagtgggaggcggcccatgaggcggagcagttgagagcctacctggatggcacgtgcgtggagtggctccgcagatacctggagaacgggaaggagacgctgcagcgcacggacccccccaagacacatatgacccaccaccccatctctgaccatgaggccaccctgaggtgctgggccctgggcttctaccctgtggagaaggggtgaaggatagaaaaggagggagttacactcaggctgcaagcagtgacagtgcccagggctctgatgtgtccctcacagcttgtaaagtgtgagacagctgccttgtgtgggactgagaggcaagagttgttcctgcccttccctttgtgacttgaagaaccctgactttgtttctgcaaaggcacctgcatgtgtctgtgttcgtgtaggcataatgtgaggaggtggggagaccaccccacccccatgtccaccatgaccctcttcccacgctgacctgtgctccctccccaatcatctttcctgttccagagaggtggggctgaggtgtctccatctctgtctcaacttcatggtgcactgagctgtaacttcttccttccctattaaaattagaaccttagtataaatttactttctc

SEQ ID NO: 4220 - protein, 117 aa, Homo sapiens
MYGCDVGSDGRFLRGYRQDAYDGKDYIALNEDLRSWTAADMAAQITKRKWEAAHEAEQLRAYLDGTCVEWLRRYLENGKETLQRTDPPKTHMTHHPISDHEATLRCWALGFYPVEKG

SEQ ID NO: 4221 - DNA, 794 bp, Homo sapiens
ggccaggttctcacaccatccagataatgtatggctgcgacgtggggtcggacgggcgcttcctccgcgggtaccggcaggacgcctacgacggcaaggattacatcgccctgaacgaggacctgcgctcttggaccgcggcggacatggcggctcagatcaccaagcgcaagtgggaggcggcccatgaggcggagcagttgagagcctacctggatggcacgtgcgtggagtggctccgcagatacctggagaacgggaaggagacgctgcagcgcacggacccccccaagacacatcattgctggcctggttctccttggagctgtgatcactggagctgtggtcgctgccgtgatgtggaggaggaagagctcagatagaaaaggagggagttacactcaggctgcaagcagtgacagtgcccagggctctgatgtgtccctcacagcttgtaaagtgtgagacagctgccttgtgtgggactgagaggcaagagttgttcctgcccttccctttgtgacttgaagaaccctgactttgtttctgcaaaggcacctgcatgtgtctgtgttcgtgtaggcataatgtgaggaggtggggagaccaccccacccccatgtccaccatgaccctcttcccacgctgacctgtgctccctccccaatcatctttcctgttccagagaggtggggctgaggtgtctccatctctgtctcaacttcatggtgcactgagctgtaacttcttccttccctattaaaattagaaccttagtataaatttactttctc

SEQ ID NO: 4222 - protein, 118 aa, Homo sapiens
MYGCDVGSDGRFLRGYRQDAYDGKDYIALNEDLRSWTAADMAAQITKRKWEAAHEAEQLRAYLDGTCVEWLRRYLENGKETLQRTDPPKTHHCWPGSPWSCDHWSCGRCRDVEEEELR

SEQ ID NO: 4223 - DNA, 1139 bp, Homo sapiens
ggccaggttctcacaccatccagataatgtatggctgcgacgtggggtcggacgggcgcttcctccgcgggtaccggcaggacgcctacgacggcaaggattacatcgccctgaacgaggacctgcgctcttggaccgcggcggacatggcggctcagatcaccaagcgcaagtgggaggcggcccatgaggcggagcagttgagagcctacctggatggcacgtgcgtggagtggctccgcagatacctggagaacgggaaggagacgctgcagcgcacggacccccccaagacacatatgacccaccaccccatctctgaccatgaggccaccctgaggtgctgggccctgggcttctaccctgcggagatcacactgacctggcagcgggatggggaggaccagacccaggacacggagctcgtggagaccaggcctgcaggggatggaaccttccagaagtgggcggctgtggtggtgccttctggagaggagcagagatacacctgccatgtgcagcatgagggtctgcccaagcccctcaccctgagatgggagctgtcttcccagcccaccatccccatcgtgggcatcattgctggcctggttctccttggagctgtgatcactggagctgtggtcgctgccgtgatgtggaggaggaagagctcagatagaaaaggagggagttacactcaggctgcaagcagtgacagtgcccagggctctgatgtgtccctcacagcttgtaaagtgtgagacagctgccttgtgtgggactgagaggcaagagttgttcctgcccttccctttgtgacttgaagaaccctgactttgtttctgcaaaggcacctgcatgtgtctgtgttcgtgtaggcataatgtgaggaggtggggagaccaccccacccccatgtccaccatgaccctcttcccacgctgacctgtgctccctccccaatcatctttcctgttccagagaggtggggctgaggtgtctccatctctgtctcaacttcatggtgcactgagctgtaacttcttccttccctattaaaattagaaccttagtataaatttactttctcaaattcttgccatgagaggttgatgagttaattaaaggagaagattcct

SEQ ID NO: 4224 - protein, 244 aa, Homo sapiens; identical to SEQ ID NO: 4214

SEQ ID NO: 4225 - DNA, 1994 bp, Homo sapiens
ggccaggttctcacaccatccagataatgtatggctgcgacgtggggtcggacgggcgcttcctccgcgggtaccggcaggacgcctacgacggcaaggattacatcgccctgaacgaggacctgcgctcttggaccgcggcggacatggcggctcagatcaccaagcgcaagtgggaggcggcccatgaggcggagcagttgagagcctacctggatggcacgtgcgtggagtggctccgcagatacctggagaacgggaaggagacgctgcagcgcacggacccccccaagacacatatgacccaccaccccatctctgaccatgaggccaccctgaggtgctgggccctgggcttctaccctgcggagatcacactgacctggcagcgggatggggaggaccagacccaggacacggagctcgtggagaccaggcctgcaggggatggaaccttccagaagtgggcggctgtggtggtgccttctggagaggagcagagatacacctgccatgtgcagcatgagggtctgcccaagcccctcaccctgagatggggtaaggagggagatgggggtgtcatgtctcttagggaaagcaggagcctctctggagacctttagcagggtcagggcccctcaccttcccctcttttcccagagctgtcttcccagcccaccatccccatcgtgggcatcattgctggcctggttctccttggagctgtgatcactggagctgtggtcgctgccgtgatgtggaggaggaagagctcaggtggagaaggggtgaagggtggggtctgagatttcttgtctcactgagggttccaagccccagctagaaatgtgccctgtctcattactgggaagcaccgtccacaatcatgggcctacccagtctgggccctgtgtgccagcacttactcttttgtaaagcacctgttaaaatgaaggacagatttatcaccttgattacggcggtgatgggacctgatcccagcagtcacaagtcacaggggaaggtccctgaggacagacctcaggagggctattggtccaggacccacacctgctttcttcatgtttcctgatcccgccctgggtctgcagtcacacatttctggaaacttctctggggtccaagactaggaggttcctctaggaccttaaggccctggctcctttctggtatctcacaggacattttcttctcacagatagaaaaggagggagttacactcaggctgcaagtaagtatgaaggaggctgatgcctgaggtccttgggatattgtgtttgggagcccatgggggagcccacccacctcacaattcctcctctagccacatcttctgtgggatctgaccaggttctgtttttgttctaccccaggcagtgacagtgcccagggctctgatgtgtccctcacagcttgtaaaggtgagagcttggaggacctaatgtgtgttgggtgttgggcggaacagtggacacagctgtgctatggggtttctttgcattggatgtattgagcatgcgatgggctgtttaaggtgtgacccctcactgtgatggatatgaatttgttcatgaatatttttttctatagtgtgagacagctgccttgtgtgggactgagaggcaagagttgttcctgcccttccctttgtgacttgaagaaccctgactttgtttctgcaaaggcacctgcatgtgtctgtgttcgtgtaggcataatgtgaggaggtggggagaccaccccacccccatgtccaccatgaccctcttcccacgctgacctgtgctccctccccaatcatctttcctgttccagagaggtggggctgaggtgtctccatctctgtctcaacttcatggtgcactgagctgtaacttcttccttccctattaaaattagaaccttagtataaatttactttctcaaattcttgccatgagaggttgatgagttaattaaaggagaagattcct

SEQ ID NO: 4226 - protein, 198 aa, Homo sapiens; identical to SEQ ID NO: 4172

SEQ ID NO: 4227 - DNA, 847 bp, Homo sapiens
ggccaggttctcacaccatccagataatgtatggctgcgacgtggggtcggacgggcgcttcctccgcgggtaccggcaggacgcctacgacggcaaggattacatcgccctgaacgaggacctgcgctcttggaccgcggcggacatggcggctcagatcaccaagcgcaagtgggaggcggcccatgaggcggagcagttgagagcctacctggatggcacgtgcgtggagtggctccgcagatacctggagaacgggaaggagacgctgcagcgcacggacccccccaagacacatatgacccaccaccccatctctgaccatgaggccaccctgaggtgctgggccctgggcttctaccctgtggagaaggggtgaaggatagaaaaggagggagttacactcaggctgcaagcagtgacagtgcccagggctctgatgtgtccctcacagcttgtaaagtgtgagacagctgccttgtgtgggactgagaggcaagagttgttcctgcccttccctttgtgacttgaagaaccctgactttgtttctgcaaaggcacctgcatgtgtctgtgttcgtgtaggcataatgtgaggaggtggggagaccaccccacccccatgtccaccatgaccctcttcccacgctgacctgtgctccctccccaatcatctttcctgttccagagaggtggggctgaggtgtctccatctctgtctcaacttcatggtgcactgagctgtaacttcttccttccctattaaaattagaaccttagtataaatttactttctcaaattcttgccatgagaggttgatgagttaattaaaggagaagattcct

SEQ ID NO: 4228 - protein, 117 aa, Homo sapiens; identical to SEQ ID NO: 4220

SEQ ID NO: 4229 - DNA, 843 bp, Homo sapiens
ggccaggttctcacaccatccagataatgtatggctgcgacgtggggtcggacgggcgcttcctccgcgggtaccggcaggacgcctacgacggcaaggattacatcgccctgaacgaggacctgcgctcttggaccgcggcggacatggcggctcagatcaccaagcgcaagtgggaggcggcccatgaggcggagcagttgagagcctacctggatggcacgtgcgtggagtggctccgcagatacctggagaacgggaaggagacgctgcagcgcacggacccccccaagacacatcattgctggcctggttctccttggagctgtgatcactggagctgtggtcgctgccgtgatgtggaggaggaagagctcagatagaaaaggagggagttacactcaggctgcaagcagtgacagtgcccagggctctgatgtgtccctcacagcttgtaaagtgtgagacagctgccttgtgtgggactgagaggcaagagttgttcctgcccttccctttgtgacttgaagaaccctgactttgtttctgcaaaggcacctgcatgtgtctgtgttcgtgtaggcataatgtgaggaggtggggagaccaccccacccccatgtccaccatgaccctcttcccacgctgacctgtgctccctccccaatcatctttcctgttccagagaggtggggctgaggtgtctccatctctgtctcaacttcatggtgcactgagctgtaacttcttccttccctattaaaattagaaccttagtataaatttactttctcaaattcttgccatgagaggttgatgagttaattaaaggagaagattcct

SEQ ID NO: 4230 - protein, 118 aa, Homo sapiens; identical to SEQ ID NO: 4222

SEQ ID NO: 4231 - DNA, 1190 bp, Homo sapiens
ggccaggttctcacaccatccagataatgtatggctgcgacgtggggtcggacgggcgcttcctccgcgggtaccggcaggacgcctacgacggcaaggattacatcgccctgaacgaggacctgcgctcttggaccgcggcggacatggcggctcagatcaccaagcgcaagtgggaggcggcccatgaggcggagcagttgagagcctacctggatggcacgtgcgtggagtggctccgcagatacctggagaacgggaaggagacgctgcagcgcacggacccccccaagacacatatgacccaccaccccatctctgaccatgaggccaccctgaggtgctgggccctgggcttctaccctgcggagatcacactgacctggcagcgggatggggaggaccagacccaggacacggagctcgtggagaccaggcctgcaggggatggaaccttccagaagtgggcggctgtggtggtgccttctggagaggagcagagatacacctgccatgtgcagcatgagggtctgcccaagcccctcaccctgagatgggagctgtcttcccagcccaccatccccatcgtgggcatcattgctggcctggttctccttggagctgtgatcactggagctgtggtcgctgccgtgatgtggaggaggaagagctcagatagaaaaggagggagttacactcaggctgcaagcagtgacagtgcccagggctctgatgtgtccctcacagcttgtaaagtgtgagacagctgccttgtgtgggactgagaggcaagagttgttcctgcccttccctttgtgacttgaagaaccctgactttgtttctgcaaaggcacctgcatgtgtctgtgttcgtgtaggcataatgtgaggaggtggggagaccaccccacccccatgtccaccatgaccctcttcccacgctgacctgtgctccctccccaatcatctttcctgttccagagaggtggggctgaggtgtctccatctctgtctcaacttcatggtgcactgagctgtaacttcttccttccctattaaaattagaaccttagtataaatttactttctcaaattcttgccatgagaggttgatgagttaattaaaggagaagattcctaaaatttgagagacaaaataaatggaagacatgagaaccttccagagtcca

SEQ ID NO: 4232 - protein, 244 aa, Homo sapiens; identical to SEQ ID NO: 4214

SEQ ID NO: 4233 - DNA, 2045 bp, Homo sapiens
ggccaggttctcacaccatccagataatgtatggctgcgacgtggggtcggacgggcgcttcctccgcgggtaccggcaggacgcctacgacggcaaggattacatcgccctgaacgaggacctgcgctcttggaccgcggcggacatggcggctcagatcaccaagcgcaagtgggaggcggcccatgaggcggagcagttgagagcctacctggatggcacgtgcgtggagtggctccgcagatacctggagaacgggaaggagacgctgcagcgcacggacccccccaagacacatatgacccaccaccccatctctgaccatgaggccaccctgaggtgctgggccctgggcttctaccctgcggagatcacactgacctggcagcgggatggggaggaccagacccaggacacggagctcgtggagaccaggcctgcaggggatggaaccttccagaagtgggcggctgtggtggtgccttctggagaggagcagagatacacctgccatgtgcagcatgagggtctgcccaagcccctcaccctgagatggggtaaggagggagatgggggtgtcatgtctcttagggaaagcaggagcctctctggagacctttagcagggtcagggcccctcaccttcccctcttttcccagagctgtcttcccagcccaccatccccatcgtgggcatcattgctggcctggttctccttggagctgtgatcactggagctgtggtcgctgccgtgatgtggaggaggaagagctcaggtggagaaggggtgaagggtggggtctgagatttcttgtctcactgagggttccaagccccagctagaaatgtgccctgtctcattactgggaagcaccgtccacaatcatgggcctacccagtctgggccctgtgtgccagcacttactcttttgtaaagcacctgttaaaatgaaggacagatttatcaccttgattacggcggtgatgggacctgatcccagcagtcacaagtcacaggggaaggtccctgaggacagacctcaggagggctattggtccaggacccacacctgctttcttcatgtttcctgatcccgccctgggtctgcagtcacacatttctggaaacttctctggggtccaagactaggaggttcctctaggaccttaaggccctggctcctttctggtatctcacaggacattttcttctcacagatagaaaaggagggagttacactcaggctgcaagtaagtatgaaggaggctgatgcctgaggtccttgggatattgtgtttgggagcccatgggggagcccacccacctcacaattcctcctctagccacatcttctgtgggatctgaccaggttctgtttttgttctaccccaggcagtgacagtgcccagggctctgatgtgtccctcacagcttgtaaaggtgagagcttggaggacctaatgtgtgttgggtgttgggcggaacagtggacacagctgtgctatggggtttctttgcattggatgtattgagcatgcgatgggctgtttaaggtgtgacccctcactgtgatggatatgaatttgttcatgaatatttttttctatagtgtgagacagctgccttgtgtgggactgagaggcaagagttgttcctgcccttccctttgtgacttgaagaaccctgactttgtttctgcaaaggcacctgcatgtgtctgtgttcgtgtaggcataatgtgaggaggtggggagaccaccccacccccatgtccaccatgaccctcttcccacgctgacctgtgctccctccccaatcatctttcctgttccagagaggtggggctgaggtgtctccatctctgtctcaacttcatggtgcactgagctgtaacttcttccttccctattaaaattagaaccttagtataaatttactttctcaaattcttgccatgagaggttgatgagttaattaaaggagaagattcctaaaatttgagagacaaaataaatggaagacatgagaaccttccagagtcca

SEQ ID NO: 4234 - protein, 198 aa, Homo sapiens; identical to SEQ ID NO: 4172

SEQ ID NO: 4235 - DNA, 898 bp, Homo sapiens
ggccaggttctcacaccatccagataatgtatggctgcgacgtggggtcggacgggcgcttcctccgcgggtaccggcaggacgcctacgacggcaaggattacatcgccctgaacgaggacctgcgctcttggaccgcggcggacatggcggctcagatcaccaagcgcaagtgggaggcggcccatgaggcggagcagttgagagcctacctggatggcacgtgcgtggagtggctccgcagatacctggagaacgggaaggagacgctgcagcgcacggacccccccaagacacatatgacccaccaccccatctctgaccatgaggccaccctgaggtgctgggccctgggcttctaccctgtggagaaggggtgaaggatagaaaaggagggagttacactcaggctgcaagcagtgacagtgcccagggctctgatgtgtccctcacagcttgtaaagtgtgagacagctgccttgtgtgggactgagaggcaagagttgttcctgcccttccctttgtgacttgaagaaccctgactttgtttctgcaaaggcacctgcatgtgtctgtgttcgtgtaggcataatgtgaggaggtggggagaccaccccacccccatgtccaccatgaccctcttcccacgctgacctgtgctccctccccaatcatctttcctgttccagagaggtggggctgaggtgtctccatctctgtctcaacttcatggtgcactgagctgtaacttcttccttccctattaaaattagaaccttagtataaatttactttctcaaattcttgccatgagaggttgatgagttaattaaaggagaagattcctaaaatttgagagacaaaataaatggaagacatgagaaccttccagagtcca

SEQ ID NO: 4236 - protein, 117 aa, Homo sapiens; identical to SEQ ID NO: 4220

SEQ ID NO: 4237 - DNA, 894 bp, Homo sapiens
ggccaggttctcacaccatccagataatgtatggctgcgacgtggggtcggacgggcgcttcctccgcgggtaccggcaggacgcctacgacggcaaggattacatcgccctgaacgaggacctgcgctcttggaccgcggcggacatggcggctcagatcaccaagcgcaagtgggaggcggcccatgaggcggagcagttgagagcctacctggatggcacgtgcgtggagtggctccgcagatacctggagaacgggaaggagacgctgcagcgcacggacccccccaagacacatcattgctggcctggttctccttggagctgtgatcactggagctgtggtcgctgccgtgatgtggaggaggaagagctcagatagaaaaggagggagttacactcaggctgcaagcagtgacagtgcccagggctctgatgtgtccctcacagcttgtaaagtgtgagacagctgccttgtgtgggactgagaggcaagagttgttcctgcccttccctttgtgacttgaagaaccctgactttgtttctgcaaaggcacctgcatgtgtctgtgttcgtgtaggcataatgtgaggaggtggggagaccaccccacccccatgtccaccatgaccctcttcccacgctgacctgtgctccctccccaatcatctttcctgttccagagaggtggggctgaggtgtctccatctctgtctcaacttcatggtgcactgagctgtaacttcttccttccctattaaaattagaaccttagtataaatttactttctcaaattcttgccatgagaggttgatgagttaattaaaggagaagattcctaaaatttgagagacaaaataaatggaagacatgagaaccttccagagtcca

SEQ ID NO: 4238 - protein, 118 aa, Homo sapiens; identical to SEQ ID NO: 4222

SEQ ID NO: 4239 - DNA, 781 bp, Homo sapiens
tccgcgggtaccggcaggacgcctacgacggcaaggattacatcgccctgaacgaggacctgcgctcttggaccgcggcggacatggcggctcagatcacactgacctggcagcgggatggggaggaccagacccaggacacggagctcgtggagaccaggcctgcaggggatggaaccttccagaagtgggcggctgtggtggtgccttctggagaggagcagagatacacctgccatgtgcagcatgagggtctgcccaagcccctcaccctgagatgggagctgtcttcccagcccaccatccccatcgtgggcatcattgctggcctggttctccttggagctgtgatcactggagctgtggtcgctgccgtgatgtggaggaggaagagctcaggcagtgacagtgcccagggctctgatgtgtccctcacagcttgtaaagtgtgagacagctgccttgtgtgggactgagaggcaagagttgttcctgcccttccctttgtgacttgaagaaccctgactttgtttctgcaaaggcacctgcatgtgtctgtgttcgtgtaggcataatgtgaggaggtggggagaccaccccacccccatgtccaccatgaccctcttcccacgctgacctgtgctccctccccaatcatctttcctgttccagagaggtggggctgaggtgtctccatctctgtctcaacttcatggtgcactgagctgtaacttcttccttccctattaaaattagaaccttagtataaatttactttctc

SEQ ID NO: 4240 - protein, 122 aa, Homo sapiens
MAAQITLTWQRDGEDQTQDTELVETRPAGDGTFQKWAAVVVPSGEEQRYTCHVQHEGLPKPLTLRWELSSQPTIPIVGIIAGLVLLGAVITGAVVAAVMWRRKSSGSDSAQGSDVSLTACKV

SEQ ID NO: 4241 - DNA, 830 bp, Homo sapiens
tccgcgggtaccggcaggacgcctacgacggcaaggattacatcgccctgaacgaggacctgcgctcttggaccgcggcggacatggcggctcagatcacactgacctggcagcgggatggggaggaccagacccaggacacggagctcgtggagaccaggcctgcaggggatggaaccttccagaagtgggcggctgtggtggtgccttctggagaggagcagagatacacctgccatgtgcagcatgagggtctgcccaagcccctcaccctgagatgggagctgtcttcccagcccaccatccccatcgtgggcatcattgctggcctggttctccttggagctgtgatcactggagctgtggtcgctgccgtgatgtggaggaggaagagctcaggcagtgacagtgcccagggctctgatgtgtccctcacagcttgtaaagtgtgagacagctgccttgtgtgggactgagaggcaagagttgttcctgcccttccctttgtgacttgaagaaccctgactttgtttctgcaaaggcacctgcatgtgtctgtgttcgtgtaggcataatgtgaggaggtggggagaccaccccacccccatgtccaccatgaccctcttcccacgctgacctgtgctccctccccaatcatctttcctgttccagagaggtggggctgaggtgtctccatctctgtctcaacttcatggtgcactgagctgtaacttcttccttccctattaaaattagaaccttagtataaatttactttctcaaattcttgccatgagaggttgatgagttaattaaaggagaagattcct

SEQ ID NO: 4242 - protein, 122 aa, Homo sapiens; identical to SEQ ID NO: 4240

SEQ ID NO: 4243 - DNA, 881 bp, Homo sapiens
tccgcgggtaccggcaggacgcctacgacggcaaggattacatcgccctgaacgaggacctgcgctcttggaccgcggcggacatggcggctcagatcacactgacctggcagcgggatggggaggaccagacccaggacacggagctcgtggagaccaggcctgcaggggatggaaccttccagaagtgggcggctgtggtggtgccttctggagaggagcagagatacacctgccatgtgcagcatgagggtctgcccaagcccctcaccctgagatgggagctgtcttcccagcccaccatccccatcgtgggcatcattgctggcctggttctccttggagctgtgatcactggagctgtggtcgctgccgtgatgtggaggaggaagagctcaggcagtgacagtgcccagggctctgatgtgtccctcacagcttgtaaagtgtgagacagctgccttgtgtgggactgagaggcaagagttgttcctgcccttccctttgtgacttgaagaaccctgactttgtttctgcaaaggcacctgcatgtgtctgtgttcgtgtaggcataatgtgaggaggtggggagaccaccccacccccatgtccaccatgaccctcttcccacgctgacctgtgctccctccccaatcatctttcctgttccagagaggtggggctgaggtgtctccatctctgtctcaacttcatggtgcactgagctgtaacttcttccttccctattaaaattagaaccttagtataaatttactttctcaaattcttgccatgagaggttgatgagttaattaaaggagaagattcctaaaatttgagagacaaaataaatggaagacatgagaaccttccagagtcca

SEQ ID NO: 4244 - protein, 122 aa, Homo sapiens; identical to SEQ ID NO: 4240

SEQ ID NO: 4245 - DNA, 861 bp, Homo sapiens
tccttcattttaacaggtgctttacaaaagagtaagtgctggcacacagggcccagactgggtaggcccatgattgtggacggtgcttcccagtaatgagacagggcacatttctagctggggcttggaaccctcagtgagacaagaaatctcagaccccacccttcaccccttctccacctgagctcttcctcctccacatcacggcagcgaccacagctccagtgatcacagctccaaggagaaccaggccagcaatgatgcccacgatggggatggtgggctgggaagacagctctgggaaaagaggggaaggtgaggggccctgaccctgctaaaggtctccagagaggctcctgctttccctaagagacatgacacccccatctccctccttaccccatctcagggtgaggggcttgggcagaccctcatgctgcacatggcaggtgtatctctgctcctctccagaaggcaccaccacagccgcccacttctggaaggttccatcccctgcaggcctggtctccacgagctccgtgtcctgggtctggtcctcctgagtggaggctgagggactcagaagtgctggactcagacccccacacacattgagtgtgaagcagagaacaaggcctgagaggaaaagtcacgggcccaaggctgctgccggtgtcaaagggaaccactcatcagtattcgagggatcgtcttcccgtcactccttcagagattttatcccttaattgtgtcagagagcagggcggaacctcagagtcactctctggtacaggatctggaacccaggaggattcctctccctcaggaccagagggagggtgatattctagtgttggtccc

SEQ ID NO: 4246 - protein, 62 aa, Homo sapiens
MTPPSPSLPHLRVRGLGRPSCCTWQVYLCSSPEGTTTAAHFWKVPSPAGLVSTSSVSWVWSS

SEQ ID NO: 4247 - DNA, 809 bp, Homo sapiens
gacccccccaagacacatatgacccaccaccccatctctgaccatgaggccaccctgaggtgctgggccctgggcttctaccctgcggagatcacactgacctggcagcgggatggggaggaccagacccaggacacggagctcgtggagaccaggcctgcaggggatggaaccttccagaagtgggcggctgtggtggtgccttctggagaggagcagagatacacctgccatgtgcagcatgagggtctgcccaagcccctcaccctgagatgggagctgtcttcccagcccaccatccccatcgtgggcatcattgctggcctggttctccttggagctgtgatcactggagctgtggtcgctgccgtgatgtggaggaggaagagctcagatagaaaaggagggagttacactcaggctgcaagcagtgacagtgcccagggctctgatgtgtccctcacagcttgtaaagtgtgagacagctgccttgtgtgggactgagaggcaagagttgttcctgcccttccctttgtgacttgaagaaccctgactttgtttctgcaaaggcacctgcatgtgtctgtgttcgtgtaggcataatgtgaggaggtggggagaccaccccacccccatgtccaccatgaccctcttcccacgctgacctgtgctccctccccaatcatctttcctgttccagagaggtggggctgaggtgtctccatctctgtctcaacttcatggtgcactgagctgtaacttcttccttccctattaaaattagaaccttagtataaatttactttctc

SEQ ID NO: 4248 - protein, 153 aa, Homo sapiens
MTHHPISDHEATLRCWALGFYPAEITLTWQRDGEDQTQDTELVETRPAGDGTFQKWAAVVVPSGEEQRYTCHVQHEGLPKPLTLRWELSSQPTIPIVGIIAGLVLLGAVITGAVVAAVMWRRKSSDRKGGSYTQAASSDSAQGSDVSLTACKV

SEQ ID NO: 4249 - DNA, 1562 bp, Homo sapiens
gacccccccaagacacatatgacccaccaccccatctctgaccatgaggccaccctgaggtgctgggccctgggcttctaccctgcggagatcacactgacctggcagcgggatggggaggaccagacccaggacacggagctcgtggagaccaggcctgcaggggatggaaccttccagaagtgggcggctgtggtggtgccttctggagaggagcagagatacacctgccatgtgcagcatgagggtctgcccaagcccctcaccctgagatgggagctgtcttcccagcccaccatccccatcgtgggcatcattgctggcctggttctccttggagctgtgatcactggagctgtggtcgctgccgtgatgtggaggaggaagagctcaggtggagaaggggtgaagggtggggtctgagatttcttgtctcactgagggttccaagccccagctagaaatgtgccctgtctcattactgggaagcaccgtccacaatcatgggcctacccagtctgggccctgtgtgccagcacttactcttttgtaaagcacctgttaaaatgaaggacagatttatcaccttgattacggcggtgatgggacctgatcccagcagtcacaagtcacaggggaaggtccctgaggacagacctcaggagggctattggtccaggacccacacctgctttcttcatgtttcctgatcccgccctgggtctgcagtcacacatttctggaaacttctctggggtccaagactaggaggttcctctaggaccttaaggccctggctcctttctggtatctcacaggacattttcttctcacagatagaaaaggagggagttacactcaggctgcaagtaagtatgaaggaggctgatgcctgaggtccttgggatattgtgtttgggagcccatgggggagcccacccacctcacaattcctcctctagccacatcttctgtgggatctgaccaggttctgtttttgttctaccccaggcagtgacagtgcccagggctctgatgtgtccctcacagcttgtaaaggtgagagcttggaggacctaatgtgtgttgggtgttgggcggaacagtggacacagctgtgctatggggtttctttgcattggatgtattgagcatgcgatgggctgtttaaggtgtgacccctcactgtgatggatatgaatttgttcatgaatatttttttctatagtgtgagacagctgccttgtgtgggactgagaggcaagagttgttcctgcccttccctttgtgacttgaagaaccctgactttgtttctgcaaaggcacctgcatgtgtctgtgttcgtgtaggcataatgtgaggaggtggggagaccaccccacccccatgtccaccatgaccctcttcccacgctgacctgtgctccctccccaatcatctttcctgttccagagaggtggggctgaggtgtctccatctctgtctcaacttcatggtgcactgagctgtaacttcttccttccctattaaaattagaaccttagtataaatttactttctc

SEQ ID NO: 4250 - protein, 134 aa, Homo sapiens; identical to SEQ ID NO: 4170

SEQ ID NO: 4251 - DNA, 858 bp, Homo sapiens
gacccccccaagacacatatgacccaccaccccatctctgaccatgaggccaccctgaggtgctgggccctgggcttctaccctgcggagatcacactgacctggcagcgggatggggaggaccagacccaggacacggagctcgtggagaccaggcctgcaggggatggaaccttccagaagtgggcggctgtggtggtgccttctggagaggagcagagatacacctgccatgtgcagcatgagggtctgcccaagcccctcaccctgagatgggagctgtcttcccagcccaccatccccatcgtgggcatcattgctggcctggttctccttggagctgtgatcactggagctgtggtcgctgccgtgatgtggaggaggaagagctcagatagaaaaggagggagttacactcaggctgcaagcagtgacagtgcccagggctctgatgtgtccctcacagcttgtaaagtgtgagacagctgccttgtgtgggactgagaggcaagagttgttcctgcccttccctttgtgacttgaagaaccctgactttgtttctgcaaaggcacctgcatgtgtctgtgttcgtgtaggcataatgtgaggaggtggggagaccaccccacccccatgtccaccatgaccctcttcccacgctgacctgtgctccctccccaatcatctttcctgttccagagaggtggggctgaggtgtctccatctctgtctcaacttcatggtgcactgagctgtaacttcttccttccctattaaaattagaaccttagtataaatttactttctcaaattcttgccatgagaggttgatgagttaattaaaggagaagattcct

SEQ ID NO: 4252 - protein, 153 aa, Homo sapiens; identical to SEQ ID NO: 4248
